United States Patent Application Publication US 2024/0404707 A1 - sequence listing, part 5

SEQ ID NO: 604 - DNA, 14851 bp, Homo sapiens
  source 1..14851: mol_type = other DNA
ggcgctgctgtggttggtcagtccagtaagaagccagcagggctggtgctggggcttcttctcctgaaggggctgcaagagggaaggcttagccatgtcgtccttgatcagaagggtgatcagcaccgcgaaagccccaggggccattggaccctacaggtaacgtggctggtggaagctgtgtcggacccagggcgtgcgggttcggggattcggggttggggccactccgggccggagccccagctaacacgcaaggaaattgagcctggaaagtaagcaacgcgcccgaagacccacagagagttgggagccacgatgggaccaggaacctgcactccatgggactttgctcgttctggggctgcctcgctgcggagcacagcctgccagaaagctctccccagttagaagccttcagaccctgtgttttgttttgggggagggggtcgtttttgttttcttggtaacagctttattgagatataattcacgtaccgtaagattcaccccctttaacatgtacaattcagtggttttgaccatactcacagagttgtgcagccatcaccactttcttcagaacattttcatcaccccaaaaataaatcccatccccattagcattcactccccattctcctctcccccggcccctgacaatctacttgcatcttcatggatttgcttgttgtggacatttcctataaattgaatcataaaacatgcagtcctttatgaccaacttctttcattagcttcatacttggtctgcctctctcccaactgaaaagagccccatcaacagctccctcctttaaacctactgctgtgagaaaaggcactgagatgtggcagaacaggaattattatagaaaacttggaaataaataaaatgcagtagaagtgagagggcaagtggggtagggagtaaaggagaaaaaagacaaattgattttaacttggggtggaagaggaaaaagaagatttaggaaggttccttgtgagaggtagtcctttggttttgaaggttggttttgtcatttatagtagtgttgtaaagtttgatttttaaattaatttattaaggatttcaacaggaagtcattgagtgaagggcatggaggtagaagtcaggtagagggaatggcttgagtgagggcatggaggtagaagaatgcatggtataaagattttggggagaaagttttcataattcaagtgctacttctgtcttttttgtttgtttgtttgccaaatctgtatatcacttataatttacttaacctatttctttgagatggctcacttcattttatttaacaagttaattgaaaaaggaaactttacaacagtacactaaatagaaaacaattcaatagaaagtaatagtaaaaaataaactcaattaaaaaaaggtattattaaattttagctagatattgcagttggctcaaaacctgaggcctgctctctctttgttaagagtgatgtttctttagccgggtactgtggttcacgcctgtaatcccagcactgtgggaggccgaggtaagaggattgcttgaggtcaggagttcaagaccagcctgggcaacatagtgagacccccatctctatttaaaaaaaaaaaaaagtttaattaaaaactttcaagtgatgttttaatttgttttctaaagatgattttttttctccttaatgtaatcaaacggggtagagtcatcattgctaacatttactgatgcttactcagcagcattgggcactatccctttttttttttttttttttttttttttggaggcagagtctcactctgttgcccaggctagagtgcagtggtgcaatctcagctcactgcaacctccaccccacagattcaagtgattctcatgtctcagcctcccaagtagctgggattacaggcaggtgccaccacacccggctaatttttgtatttttagtagagacagggtttcactgtgttggtcaggctggtattgaactcctgacctaaagcgatccacctacctcggcttcccaaagtactcggattacaggtgtcagccaccatgcctggccagcaccaggcactgttctaagttatttatgtgcatggttatattatagtccctatttttcagatgaagaaactgatgtgtgcaaaattaaataatttgccaaaagttacaccactaaaaagtgatgtaacaaaatttgaatttaggaaatgggtactagagcctagtcttaatcatttactttgttgtccctggtgtagattgaaaaaaaaaattggaaaaggaatcattttcttactatgtaagactgtgtataagtcttactgtgtatgactgactcctttgagaaatactgattaagagttggactttggatttgaatttttgttttgcctctttttaattatatgatcttgcagagtgacttaacctctcttagtttgcttctttgtcttctcaatgggcataaataataccatttgataagattattgtgggaattaaataaaagtgaccaacaaaaattagattttggccaggcacagtggttcacacctgtaatcccagcactttgggaggccgaggcaggtggatcacaagctcaggagttcaagaccagcctggccaagatggtgaaaccccgtctctactaaaaataccaaaaaaaaaaaaaaattagctgggtatagtggcgtatgcctgtaatctcagctactcgggaggctgaggcagtgaattgcttgaacctggaaggcagaggtcgcggtgagccaagatcgcaccactgcactccagcctgggctacagagcgagactctgtctcaaaaaaaaaaaaaaaagattttagcagggtacaggttgtggtggtttccaatactaaatggaagaatataaactttattttgtatataataaggaacaattaaatgtggtttttttcttgtggttgttgtggttgtgtgtttgtatgtgtgtatattgagacagtgtttcgctgtgtcacccaggctggagccgggatcacagcttattgtcgcctcaacctcccgggctcaagccatcctcccacctcagcttcccaagtagctggggctacaggctcaggccaccatgcccagataatttttgtattttttatagagctggggttttaccatgttgcccaggctaaatgtttttaagcagggtggaacatgatcagatcttttaaaaagaattctgatagtaattctgatagaaatttggaggtaaagaaagtgagaatagttaggggatattataagtaaaaatttgtgattttttttctccttctgccctaatgtctttctctcaatcacacagtggtagcatttagaaaaacatctttacctccaaacaagagggacacaaccaaatcaaagtgattattagagacactttgtcctggagcctgctaaagagcataccccttccttgacctatttagagatactctgtggactttgttcaggaaagaaagcataacagtaatgttcctggttgacttgaaggtaggtgggagtcaactgtctttataaagctgaaagctaaaaagaggggaatcatcatatgaatgtgccagtatgacaagaaaaaaagccaccagccagcttcatggtgtggagacttccaggacattgtgcctcttgtgcactaggtgactagaaatggtgcttattttcaatagttaatgtttaagaaaaaaaacagactgcaactaactacttatgttaattggacatgttttaggaaccttttgggaacaagagtttttgtgcgtggagtgtgtagtgagtacactttttgaaaatcctgggtcctctccaggaagaattcaaatgtgttgaactttcagtccctggcattgggatggatggggtgttgtcactaattagccaatcagctcagcacatttcaggaatacttccagacagaaccttgaaagatttcaacattgcattgctttgcattgcgcattttgcacaccgtcctcataattataaatttttgaagcagtagcccgtgtggtatagactatgatgtgagaattattagaatgcttttgaaagtgtgattaccctttaacctggtagtagaacagtgcacttttaaattttctgaagtccaaccacttgtctttggatagtaggattcttatgctcagaaagtgtcaactagccaattattcttatgaacaaacctctttagatctgtaagagataactcacatagctcagatggtctcagctccagtgcttgctttttatattttgaaaataaaagagtttctttttactatcatgaagtttctgataaataataatgcatatggtcttaaagtgtgtttcagatatggggaaagctgaaggcactttgcacaggacctagggcagacggcctaattctacacaggacagttaataaaaaacagtgttactgatggtattatttaacccgagaaaagattacaaattaacaaactcagtagttatctatttgtgggccagtatgaaagccagatagttgagaagactttctagactttctgaatcatgttatcaagtttaaacatacctccttagctctctccaaagcatttgctgtaagtcaacaggtcctgctaaaaagagattcactgacaaccaaaattgtttatgctactaagtggttaaagagcaaaacatcagcaagtagttatagtgtgcctactgtatgcaaggaatcacctacaccctacacagctacagagacatggtaagacattaccctgacctcaaggagtttagagtctaagataccttgggagacaggataataacaggatgagttacaacacgaggcaggatcctgtacatagtataaggaagatacaaccaaagcactcctgggatccaggggaaagaaaagcttagttacttagagaaagtgtgtgtgtgtgtgtgtgtgtgtgtgtttagtatagttttatttatgataacaaaatatcagaagcaatggtgactcattaaataaagtacatctatattgtaaaacatatgtagctgttaaaaaaaatgaggaagcactctacatatacttatggaaagatcttcatgatattctgttgagtgaaaaaaacaaagtgtacaagaatgtttaatataccatattttatgtaaaagaagagagaaaatatatatttgttttggttatctgttcattaaaaaaactggatgaatacataaagaagaacaatggttctgggctgggaactgagcaaatagggaacaagaatggaagaaagacttttcactgcaattctttgtgtattttctggatttttgaaccatatgaactcctattcaaaaataaattataaagggaaaaaaaagatgtggtcaagaagaccaggaaaacttcatgaaataaaagaggaaagtttggagcatgttggaaaatggaagaatagggaactaaaagaagatgattaaaatgagactatcttaaatttataaataagcatagaaattttaaaacaaatttcacttctttttttttttttttgacacagagtcttgctctgttgcccaggctggagtacagtaacgtgatcttggcttactacaacctccacctcccaggttcaagtgattctcatgcctcagcctcccaagtagctggaattacaggtgtgcaccaccactggctaatttttgtgttttttagtagagacaggatttccccatgttggcaaggctggccttgaactcctggcctcaagtggtctgcccgcctcagcctcccaaagtgctgggattataggcatgagccaccatgccctgccacatttcacttctaaattaaaattacattaagtcttctttcttcaacattttaaaaaaacagataggctttcttcatcccaaaattaatatcattcctataaaaagtagacttgtttggctttttttcaggtatcaatgtattgttttctttttcctgtgattttatcctacttctgaaatttagcatcctcataacagaaaaagtcagttacagaagtaagcactttgcagaaatgaagttgtattagttcgtttccacactgctataaagatacaacccgagtatttataaagaggcttaattgactcactgttccacatggctggggaggcctcaagaaacttacaataatggcggaaggggaagaggcacatcgtatatgatggcaagcaagagagagtgtacatgtgtaggaggaactgtcagacacttataaaactgttagatcacgtgagaactcactatcatgagaacagcatgggggaaactgcccccatggtccagtcacctcccaccaggtcctactctcaacatgtggggattatgggcattacaattccagatgaggtttgggcaaggacacagccaagccatatcagaagtggaccctcaaaagtatatccttaattgatcctccaataagcagtgactaatcttgtctgaagatgactacttatgtttttaaaagtgctcttgaaattgcatttttttgctttacagctatattgaggtataagttacttataaaagttacccattttaatggctgggtgtggtggcccacgactgtaatcccagcactttgggaagcggaggcaggcggatcacctgaggtcaggagttcaagaccagcctggccaacatggcaaaaccccatctctactaaaaatgcaaaaattagctgggcgtggtggctcacacctgtaatcccagctacttgggaggctgaggcagaattgtttgaacccgggaggcggaggttgcagtgagccaagattgtgccactgcactccagcctgggtgacagagtgagactccatctcaaaaaaacaagtcacccattttaattaagtgtagtgttccatgagttttagtaaatgtatagaatcatgcatccactataatagtcaaattttagaatatttctatcactcccaaaaaattcccttgtacccatttatgatcacccctggccctagacaacaattaataatctgctgctgctattttcttttctaaggtttcatttaagtgaaataagacaatatatagtcctttgttggatctatcagtgggtgcatgtgtgtgtgtcttgcttttttgctataaataatgctattctgaacattcacgtaaactctttggacatatgttttcatttctcttggatagttgcctaggaaagaaattgctgagttgaggctcaagcctgtaatcccagcactttgggaggccaaggcaggaggatcacttgagtccaggagtttgagaccagcctaggcaacatagcaagacctcatctctacaaaaaataaaaataagtaaataataaaataaaaaattagccaggcatggtggtgcacacctttagtctcagctacttaggaggctgagatgggaggatcacttgggcctgggaggtcaaggcttcagtgagccaacatcctaccactgcacttcagcctgggtgacagagcaagatcctgtctctaaaagaagagtttgctgggttgtatgttaaatatatgtttaaatttttaaagaaactgccaaactattttctaaagtggctgtaccattttgcattactaccgacaatgtatgagggttgctccccatcattgccaatgcttactttatcagtgatgtcttagtgtgtggttttgctttgcatttctctaatgactactaatgttgagcaaatttcatgtactctaactctttgtatattttcttttgtgaagtatcatttgctcatattttattgggtttgtcttcacattattgacttttaagagttcttcttatattctggatataggtactttattaggtatatgttttgcaaatatttttctcccaatctatgacttgccttttcttcccccgacccctttttttattttgggtctttctctgttactcagtgccactgaggctggagcgcagtggtatactcatggctcacttcagccttcaactcctgggctcaagcaattcaatcaccctagcctcctgagtagctgggactacgggtgtgcgtcaccatacttggctgttttttattgttttttgtagagactgagtggttgcccaggctgatctcaaactcctggtcccaagcgatcctcctgcttcaccctcccaaagcactaggattacagcacccagccccttttcattttcttaaagatatctttgataaacaaaagttttcaattttcatgaagtccaatgtatctgtttttttttttttacaatttatacttctctgtcctatcaaaaaagtcttctagcattgaattttatgttttatacttacataaatacactagctttctgtttattgcagtcaagctgtattagtcgacaggaccatttacatttcaggacagataggcatggacccttcaagtggacagcttgtgtcaggaggggtagcagaagaagctaaacaagtaagttattttccacatttaaggttcccttttctactacctttttaatgttgaagagcattaagaatccacttgcctgatttgttttatagagattaacagataaatgttttttaaactacttactgcttgatttaacatagtttttgatctaagagttggaaatttgatggatcatgaatcatctaacaaccaaaagagagattccacctccttaacactaaggtgaccttaaacctgaattattgacgtcagatgacatgttgccacttccacatggattgggaaattttcttctcagggccactgacctgcccctcttcaaaaaaaaaaaaaaattaccaccacagaagtaaaaagtcaacatttttaaaaataagaatggggaatataattttaatccaataaatataattaaaccataatttaggccaggcacgatgtggctcacacctgtaatcctagcactttgggaggccgaggctggcagatcacttgaggtcaggagttcaagactagcctagacaacatggtgaaaccccatctctactaaaaatacaaaaattagttgggggaggccaggcacaatggctcacacctgtaatcccagcactttgggaggccgaggcgggcagatcacctgaggtcaggagttcaagaccagcctggccaacatggtgaaaccccgtctctactgaaaatacaaaaattagccaggtgtggtggcatgtgcctgtagtcccagctactcgggaggctaaggcatgagaatcgtttgaacccggaaggcggaggttgcagtgagctgagattgtgccactccactctagcctgggcaacagagcaagaaccctgtctcaaaaaaaaaatagaaaaaaaaagtaacccagtcaggtggcacatgcctgtagtcccagttactcaggaggctgatgcagaagaatcgcttaaacctgggaggtggaagttgcaggaagccaagatcgtgccactgcactcctgcctgggacacagagcaagacactgtctcaaaaaataaaataaaataaaacaataaactataatttactgcatttactgagtcatataatgctgaaagtttgttttgttttgttttgtttcttgagacagccttgctctgtcgcccaggctggagtgcagtgtcgtgatctcagctcactgcaacctctgtcttccaggttcaagcaattctcttgcctcagcctcccaagtaactgggactacaggcacacgccaccacacctggcttattttttgtatttttagtagagacggggttttaccgtgctagccaggatggtctcgatctcctgacctcatgatccacccacctcagcctcccaaagtgctgagattacaggcatgagcctccacacccggcctagctgaaagatttttaaaaacctaaatatccactcataaagaactggttgaataaattatgctagatcaatacaactaaagtaatgtggaaagatctccgaggtaaattgttccatggtaataaaaccaagatgcagaacaacatgcacagtatgctaccatgtgtgcttgtgtgtttaaaaatatgtaacataagcattgactgtacctagaaggatatacaataaattaggaacagtggttacctctgaggagggaaacttgggagagggagagaggggtgagagatatctttacacggtatatgcttttttaatagcttttgagtttttttgttgttgttgttgccatatccatgtattacctatttagaagattattttaaaagacacaagaatataatgaaatattgcattgtgaccagcaaagtgggaagagtgaatccaaaaaaagataaatgtttttccagaagccagtgtctccaactgttatataatttactaatattgtttttttgagaaaaaggaaaaagaaccctttgaagtcaaatattgctttaaaagaaaatatgttttaatgcttactagctcatccttatccttgacgtgatatcgaatgaagaacaccagaaattatttctgtggacattggctgaacaattaacacattttagcactgaagaaggaacttcaacctagtctttttacgcacaaaaggagacaacattttcaccatatatcagaaagactcattctattaaaggaaagccaagaaacacacttgtaagcgagtagggaggatttttctgcaacataggctatttaaggaggtattagtaaaagatgattaattgaatttaattaaagctttaaatctaacatcagtgacttaggcctttcttggcttggttcacaggctcttaaaaacatgggtgaaattctgaaagctgcaggctgtgacttcactaacggtgagcaatttgatattatttcacatttctttttgatatttctttggtctttttgaaaaatatatggcatccagtaagatgccgtgccatatctttgttgctatttaaaagttgttttaaatagcaactgttctacttcacttctttggtcccatttcagtcccattttaatcaagacagtctcagattcatacactctttttctaagtaatgttttgggtcagaccaaataactaaacctaatgacaatgtttatatcttctagtggtgaaaacaactgttcttctggctgacataaatgacttcaatactgtcaatgaaatctacaaacagtgtaagtaatttggctttattcctattttccatttttaaaaagaaagaaatctggtcacattaatgaatgtgcattatgaattaagagtggtaggagatgctaaagaaatggtcatagatcttaaaagaattaataatctgattggaaatatgttgtataccccccatgaaaaagttctaagacatttctattgcattccctaaaacaatatactgaaatcctacatatccatttttcaaaagcttaatttcattaaatccttctcaggctttttaaactctcctaacaagttttttatgcatagattttatttactgtggctgtatggtgcagccaccatctttatcctggctctctcagactcattagttagttacttaatatttctatgccttggttttctcatatgcaaaatggagataatatactcctaacttatagggttgttggaatgattaaatgagtcagtacaacatgtaaagcacttagatgctggtgtgttataagcactgagtaaatgttagctattattaacattgatgttatagtagggaaaattggtgtccccaacacctaatgggatgaggcaaaggtataacttggaaaaagcatcgttacttattctctcctgaagaaattattagaaaagaccaaagttggcagaggaagtacttgccaaaatttctggagatgggcacttgttccctatttagataaatagtttataaatatcactttaaaaacaaaactccattcacatcaaacaagatcaaaatgttagggtatgtatttcttttttttttttttttttttttttgccagaaagctaagagattttaaaaagtattaactatcataggaatcatatggcaaaatattttatcaaacaaatctgatagtgagcctcttttttaaaatgttgcttaaggccaggagcagtggctcacacctataatcccagcactttgagaggctgaggtgggtggatcacttgacattaggagtttgagaccagtctggccaacatggtgaagccccgactctactaaaaatacaaaaatgagccaggcatggtggtgcacacctgtaatcccagctactcgggaggctgaggcaggagaatctcttgaacatgggagacagaggttgcagtaagctgagatcgcatcacttcactccagccttgggcgatagagcaagactctgtttcaaaaaaataaaaataaatgttgcttatatctaagaactgactagtatatgaaatatttgccagattattaattgtagatattgaataacaatagaatatctgaaaactaaaataaaaattttcacttgatctttattttttcaactcttctctattaaaaaaatgaaattcttttaaattcagatttcaagagtaattttcctgctagagctgcttaccaagttgctgctttacccaaagtaagtacactttaaatgactaatgtacacagttttcagtttctacattgttttccttctataagtaaactaagcactgtgaaaggaaacttaaaagaagtagcctgggcagggtggcttacccctgtaatcccagtgctttgagaggccaacacaggaggatcgcttgaggccaggagttctagaccagcctgggcaacatagcaagacagccatccctacaaaaacaatttaaaattagccatgcatggtggtggtgcacacctatagtcccagctacttggtaggctgaggtgggaggaacacttgaacccaggagttcaaggctgcagtgagctataatcgaaccactgtgctgcagcctgggtaacagtgtgaccttgtctcttaaaaaaaaaaaaaaaaagaaaagaaatagaccctgcttccccagggacttaaagtctgaaaggaaatatcccatattacatgcatgaaaaaaaaattaagaaaccttttaagacagcacatgaacatagaatcagaatcaaaatacttaaattgtgagaaaaggccaggcgcggtggctcacgcctgtaatcccagcgctttcggaggccgaggcgggcggatcacaaggtcagaagatcgagaccatcctggctcacatggtgaaacccgtctctactaaaaatacaaaaaaaaattagccgggtgtggtggcggacgcctgtagtcccagctactcgggaggctgaggcaggagaatggcatgaacccaggaggcagagcttgcagtgagccgaaatcgcgccactgcactccagcctgggcgacagagcgagactccatcacaaaaaaaaaaaaattgtgagaaaaaataaaatagcagctgtactgttgtagtgttacttaggggactataaatttgagccaggtttgtttgtgagttctgcagtaaaaatttcacctggatattgtacaattaaaaatctaagccttccactagaaaaataatctctaaaccaggggcacacatatttctcaccattttgattttgctacttttaactcaaagcttagcagcacaatattcctgcctataaaaaagcagctcttactgacttccacttgcagtttctactaaagaaaatttatgttttaagagtgtcatttgtattgctttaattagttgttacttggaatgatcattatcaaacctattaaggtactgggtgtagtagaaagagctctgaacttggaatcacaagacaagggttcaacctctgctatctagcttgtgacttgggatgacttaattactccttctacacttcagcatatcattctgtgaattgaggggaaaatacgtctctaatagggcttctgtgagaatcacataagctaatatagtatatgaatatacctagcatggtaacctggtctgttataggttcttggtgaatatttccttctcctttccttccttgaaaagtttaatgttaaaaatgttatattgctgttggttgcatgtttttagtaggtattatagagtttgcaatttgtacaaaatgattacaacaaattctttcattttcctcacagggcagccgaattgaaattgaagcagtagctatccaaggaccactgacaacggcatcactataagtgggcccagtgctgtgtagtctggaattgttaacattttaatttttacaattgatgtaacatcttaattaaccttttaattttcacaattgatgacagtgtgagtttgatgaaaatatctgaagctattatggaaataccatgtaatagggagagttgaacatgaatattagagaaggaatccagttacttttttaaattacacctgtgtgcacctgtattactgaatataggaaagagatacccattacatagttactcagtaaacaaaagagaaataccaggtaggaaagaagagttactattcctgagaaataatcaagaacatatttaatttaaactaatgatgtgaactatttagttttgatgtccgttatgtgattctgcttttacttgagtaaaattaaagtgtttaaatttgagatcaaggagaagatagtggaacaaaatgttatatagataatatttttctaatggaaataaaataggcagatttcctttg

SEQ ID NO: 605 - DNA, 633 bp, Homo sapiens
  source 1..633: mol_type = other DNA
aagactcccccatgatgacctattcatccacctacctcctcactctgttccactgtctcccttaagagagatggcaccggccagagcaggatgctgccccctgctgctgctgcttctggggctgtgggtggcagaggtcctagtcagagccaagcccaaggacatgacatcatctcagtggtttaaaactcagcatgtgcagcccagccctcaagcatgcaactcagccatgagcatcatcaataagtacacagaacggtgcaaagacctcaacaccttcctgcacgagcccttctccagtgtggccatcacctgccagacccccaacatagcctgcaagaatagctgtaaaaactgccaccagagccacgggcccatgtccctgaccatgggtgagctcacctcagggaagtacccaaactgcaggtacaaagagaagcacctgaacacaccttacatagtggcctgtgaccctccacaacagggtgacccagggtacccacttgttcctgtgcacttggataaagttgtctaagccctggtgcccacgttccacctcacactctgcagactgtatgctgctgcttttcctccctccagttcgttattaatccttgctccccactgcaaatg

SEQ ID NO: 606 - DNA, 32744 bp, Homo sapiens
  source 1..32744: mol_type = other DNA
tttagtccgcaacacctcgctccccaggaggtctgccagcctggactggaagcgtgcaacactccagagtcgtaggagtgaacactgcacaggaatctctgcccatctcaggagaaaccaaacttggggaaaatgtttgcggtccacttgatggcattttacttcagcaagctgaaggaggaccagatcaagaaggtaaggaggacccacgaagctgagagatgcccagctccttcttcacggacaaaactgattcccttaaaaaaaaaatcagaagggagtgaagagagcttattagaaaagatactgggagcatatgaccagtaaaagactcactgagggaagagggagtaattctcccacactcctgggcattgcattactgtcctgaaccttacacttcactcggaacttcctggcaggtattggatgcggaagcgggtgaggagggtgtttggaaagcttgaagaggattgtgtttgctgtaagggatgtttgctcggaaaggccacaaaggcgaggagaatcattttcaaagaagttttaagaactgttggagcagaaggctgggcgcagtggctcacgcctgtaatcctagcactttaggaggccgaggtgggcggattacctgaggtcaggagttcgagaccagcctggccaacatggtgaaaccccgtctcaactaaaaatacaaaaattagctgggtgtggtggcgggcacctgtaatcccatctactcgggaggctgaggcaggagaatcgcttgaacccaggtggtggaggttgcagtgagccgagatcgcgccattgcactccagcctaggggacaagagtgagacttcatctaaaaaaaaagaactgttggggcagatctgtttgttcatgtatttgaaagcatataaatgtgggcagcaagaaggtgtgagttgcaatagacagtaattgaaatatctattattggcacctgctatttgccaatggtacactattcatggtgtgcattattttgtcactttgctcagggaacttgtctacaaaattcattccaaagtgggctggttaaaggttgccaagggtcaacaggagggaaccagggttctttccaggcagctaaaatgagcccagtctgctactctggccacaccggctggctgtcacggccctgggcaaaaagcatctctcaaagtgcagatgacagaagtcctcctagcaggaggacttagccaaggtcaccaagtatttaggatggaatgaggattaaatccaagttggctgactcttccttcaatgctttctgctgtgccatgactccctcctgctttacaaaatgaataaggaggccaggcaccgtggctcacggctgtaatctgcatacactgggaggctgagatgagcagatctcatctcaaacttgaggtcaggagtttgagaccagcctgggcaacatggagcaaccccatctctacaaaacatgtaaaaattagccggtcatggtggtgtgtgcctacagtcccaactactcgggaggctgcggtggcaggatggcttgagcccgggagactgcgctactgcactccagcctgggtgacagagtgagaccctgtctgaaaaaaaaaggaaagaaaagaaaaaaaaaggccaaggatggtggctcatacctataatcccagcactttgggaggccaaggtgggtggatcacctgaggtcaggaggttgagaccaccctggccaacatggtgaaaccccgtctctactaaaaatttaaaaattagctgggcgtggtggagtgcgcctgtaatcccaactactcagaaggctgaggcaggagaatcccttgaacccgggcagcagaggttacagtgagccgagatcatgccattgtactccagcctgggcaacagaatgagactccgtctcaaaacaaaacaaagaaagagagagaggaagtgtggccccttacagccctcaggtacttggtgggataaactcccactaaattctattcatttagagagttgagttagaggttgtagcaaatttaaaaacattataaagcaatcacttgttgattagattcagagccctctactggctacttaaggaggcgctgcctaggaatccactttcttttgttatctgcttagtaaaggcacaagttgcaccatgtctctcccacccccaagggggagcctttggaaccctgaaacctttgattctgcaaacttatttcatttccttgggctcctttgtgttggttaaccttttgtaccctaggatcatgcgggacatgtttgtccaacagccctggtgcaggctcaggagcaccctgtgatgggaaatgcagcctctgctgatgggctccaggtccttctggaaggacagtcagcctttttcaatgccgggagctgacctccctctccctgtgggaggcgagaaagttggaagcacttttatagccaccttaagcaagtgccccaggaagtctctggggtagtgtgggagactggtttatggctgctgggctgagtcatggttctgagaacactcctcccaacacgtggtggaaacacacctggtcaaaaggcacagctcgtttctctgcggtcaggcagtgagtccccttcttcgtctctgtgcttcctgcctctagaattgtccagatcctgggccagcggtgcctgcaagggttactactgagaccctggaacaatttctaaaaatcttcccataccagcatggaaacaaaaataaaacaaaatgaaaaaaacgaaaatagaaaccactctgacagattcttttccaattcaatatattgacattatttgacctattgatagcaccaggccagacctggtcactgacctgcagattgttcatccacaggagaactgggaggttttcagtgtgtatttttcatggctctgtatgtcaacattacaaaaaagtggaaatgttacttgtaattccacctttaatttacttttaatctcaaacactttcatatttgctgggtggaagccttcctagtttttcttcatcctgtatgtttttagttatgtttataaggtacatacagttctgaactgcttccctcacttactgttacagtgtaaccacttacatagatttcttcattatcatcataattatcattacaatgtcttcttaatatccaatcaagtggatatgccataatgtagttaaccttttcctcttgttggacatttggatactttcgaatatccagagttgtgtaaccattaccacaatctaatttttttttttttttttttttttttgagacgaagtcttgctctgtctcccaggctggagtgcagtggtgcgatcttggctcactgcaacctccgcctccagggctcaagcgattctcctgcctcagcctcctgagtagctgggatcacaggccgcaccaccacgcccagctaatttttgtatttttagtagagacagggtttcgctgtgttggtcaggctggtctcgaactcctgacctcgggatccgcccgcctcggcctcccaaagtgctgggattacaggcatgagccaccatgcctggcctcatttggatactttcaaaaacatttttaataattaaaatattaggctggatgaagtggctcatgcctgtaatcccagcactttgggaggctgaggcgggatgatcacttgcctccaggagctcgagaccagcctggataacatagagagatctgtctctacaaaaaatgcaaaaattagctgggcatggtggcacatgcctgtagtcccaggtacttgggaggctgaggtggcaggatcactggagcccgggaggttgaggttgcagtgagctgtgattgcaccattgcactccaggctgggcaacagagcaagaccctgtctcaaaaataaaataaataaaataaaagtattgttatgttaaaccttggtagagttttagttttatttttatttatttattttttattattatttttaagatggaatctcgctctgtcacccaggctggagtgcagtggcgcgatctcggctcactgccagctctgcctcctgggttcatgccattctcctgcctcagcctccgaagtagctgggactacaggcgcccgccaccacgcctggctaatttttgtatttttagtagagacatggtttcaccagcttggccaggctggtctcgaactctgacctcaggtgatccacccgcctcggcctcccaaagtgctgggattacaggcgtgagccactgcgcccggccttggtagagatttatggttctccatagtcaggattatttcctgagaataggttctggaaatgaaagccctgggtcaaagagcggaattttttatgactctcattcctaatgtgagacctttggactagacgagctctaaggcccctccagctcccaccttctgcaattcagtcttgagtcttgaatgttggatttgctctttctaagtgaaacgggctgctggttggctttcttgcttagacgatatctcccatgatggtttgtgtgtctctccaaaagtgggcttggttttctgcagcaccagtactctcccttagtgcctgggacgtgtgtccctggttacacataccccacatgacttgtttggattgaaaataggtgctttttgtcccaacatatgtttcacttttcccttctaacaactgttcctggtgctgtggcagatacagaagatcaaaaggaaactgttgctgagttgacattctttctgtcataacctcaacttattgaaagagcagcagcaaaccaagtgctcaatgaccccattaaaccccagtcgcaaatgaccccaactgggtctcaaaaaacaggacttacatggcagggataacattgtgtggatgcctggagttttttatactctcaggctaagcaaaaatgatcagtaggttcaggggcactgtctgagagccctttgggtaggaaagaatcaagtttggttcccacatacagcatcccacccttccccaaccccaattacttgggtcacgtcctttgcatccagttttctcggcttgtgtgtggctgtgccaaccaattagtcataaacagccttgggggaacaggaagcccttaatgaagcctgacctggttccatcctgtttctcaaatatgctgaaagctcaattgtccttttttgctaatggctgtctgatgattttctggtctttctctggcccccgagtccccggagccatggtaccatttcagtgtcttgggtctgttcgttgtcacgagactgagctgggtcctggcctctgaggcctggctgatgaccgggcccctgtcctagcgcgaaggtaatgtgagccctgtgcatttggtataatttgtctgtcgggcttatgcatccccgacagagctgtgagccaaagccaggccatgggggtgagtgatctagagcctatgttacagtcccacgtagccacagctctgcagccctctcacctcacctctcacctggggacaagaactttggccttacgtggctgcctcaaagggatgctgtggcgatgagaagaggtgacgtacgtggacgcactctgtagacagtagcacgtgttcttcaccctggataaaatgccctttcaccgggaatgtgcctgggatggagcctcctgtcacctggagggtggagagtgctcagtataaaaacagggctggaaaggacagggtgcatatgcccctgtctctcctcctgcccccatcaataatccatcccagtgagcccgggctccagactgccagcaccaattgattagtgttaattagtgtgagggaggaagctttgctgccgtccctgatgtgacatattaccaacaagaggactgattttagccatagtgatttgtataacttccctcctttgggtatggtcctctgtccccgtttcctggttacatgagtgacatccactcattttcaatagcaatctgagctgactttaaaaattcagctttgtcttaactagaacaactcagttaaaccaaaatggacatttatggctgggtgaggtggctcacgcctgtaatcccagcactttgggaggccgaggcgtgtggatcacttgaggtctggagttcaagaacagcctggccaacatggcgaaaccccatctctactaaaaataaaaataaaaaaaaattagtcgggcctggtggcacctgcctgtaatactagctactcagaaggctgaggcaggaggatggcttgaacctgggaggtggaggctgcagtgagccgagatctcatcactgcactccagcctgggcgacagagtgagactctgtcttaaaaaaaaaaaggagggaaatttaaagggctagatttaggcattgcttttggaaatgaaatttagctctgagcttcctagcagccagtaaacaaagagaaacctgtctagctatatctgtggtcatcattggatgaaagaaagcttccatgtttagaaatctacgattcaagctctagctggccttttttggtggagaggaatgggacactggtgagggccctgaactgggaatcggaaaccctgaatccttcttagtttctgcctctcccttgtctcatcagaataatgggagaatcattttctcctcagattctgcccttcagagaagtaactccacaccttctcagccctccgttccattctgctttcctaactcgcttccctgtcctctgcctgaggaggggtcagatagggaggctttgggaatccacatctcaatgctgtccccagagtcaggaatgcagcttgctgagggatgtcgggggttacagcctcgactggagggtgagggcccccagcagcaccccttggtggccggtgtctgttccaggtggacaggttcctgtatcacatgcggctctccgatgacacccttttggacatcatgaggcggttccgggctgagatggagaagggcctggcaaaggacaccaaccccacggctgcagtgaagatgttgcccaccttcgtcagggccattcccgatggttccggtgagtgcagttgtccgctgccagggtccctggctcctcttggctgatgggtgtctaaagtacctaaggtttgcccctgtaccttggcttctctctctagccctctctctgctgtcccaccctccctgcccctctctgcttcagtcctgctgaatccctcttgcagttctgcagttctgcagccccaggcaccgtggcttctctgcccatcgtggcctcacacatttgctccctctcctcctggagcatctccatgttcttccctggtgagtatcaacgtggcttttccgtctcagcgtagtggtccctgcctccatctaggaagtatccctgtgctgggctgggtgcttgtcagggcacttgtcactttgctgtgtccccactctgagtctccaccaaattaaccactcactccgtgggtccaaggtcttaccacagtgttcccagcacctagtgtagcactgggaatgagtaatgggagcaagaatgatgtagtggaaatcacattcaatgataattcaacaaacctgggtctgaggcccagctctgtcactctcagtgacctgaggcaagtgtttagcctcagtttgcccagctgtagaatgagaaatggcctatgtatctgtttcctatggctgctgtgatgtattactacaatcacagtggctgaaaacaatcgaatatattctctgacagttctggtggacggaagtttgcagtgggtctcactgggccaaaattcaggtgtcggcagggctgcgttccttctggaagcttgaggggagaatctgtttccttaacttttccagtttcgagaggccacctgcatccttgaggcatgcccctttctgttctcaaagccagcagtgtagcctcttcaggtccctctctgacctgaccttctgcctcctttcaacatttaaagatcctgtgatcacgttagtcatgcttagataatccaggataatctcccaacttcaaggtcagctgatgagcaattttgatcccatctgcaaccttaattcccctttgccttgcaccctcagatattcacaggatctggggattaggatgtgagcatctttgttgggggtgggggacattattttgcctacaatggcctagaaatctgtagataggatctatgaggtcccatccaactcttccattctcagcctctgaatgaagctgtaagagggaaaagggctgctactggcctggagtggtggctcacgcctgtaatcccagaactttgggaggccgaggggggcagatcacttgaggtcagatgctcgagaccagcctggccaacatggtgaaactccacctctactaaaaatacaacaattagccaggtgtgatggcatgcacctgtaatcccagctactcgggaggctgaggcaggagaatcacttgaacctgcaaggcagaggttgcagtgagccgagattgcgccactgcactccagcctgggtgacagagcgagacgccatcaaaaaagaaagaaagaaaggaagaagaaagaaagaaagaaagagagagaaagaagaaagaaaggaaagaaagaagaaagagaaagaaagaaagagaaagaagaaagaaagaaagcaaagaaaaagaaagaaagaaagagagaaagctgccatttactgagcaaccactgtggtcatggggtgctggggactcgctgagccacatatttcctgtgacaaccctgtggtgtggctgttcagacagaaccaccaaggaccaaggggtttctcccatgtcagggtcccagtgcccaaaccgagctcgtgaaagagcactggggctctcgcaggagcagggtctgaggtttgggagctctcagggggctttgatgggatcagtcgtgttctggacctctctggagcaatgcctggatcaaggtagcttggctctgctggttgagaggccctgggacactgcactgggaaaggccctgtgccctcacttgtgggtaggtgcttgggatggacagtgccctgtcctggaaggacgttgagcttcggagagagacagccctactttgaaatcttggctctgtccttgccacagcttgacgagagtactgggacgtgtccttgacagggcatctggggcccctgggaggaagcagctgagtcatgtggggagcaccagggctaagtccgcctggcttcctggactgcagcccctcctcctgatacagacaaggtgtgtccccagaagcaagggaaggtggcctttgatggtctggaggctctgggacaggcggtgtcctcctggccctggctgcttctgaaggttcagaagtgaaactaactaagtcatagaaactctctcctccttagccgggaagacgcccagctccccatccccgtctccgcagagcctctcaccacacaaagcatctcaccagtgattctgttgtgccgaggtccctgggcccagagtccctaataagccaggtgttcttggtaaatcccggcaccatacatgattgtcaggatttaatgagatcatgtggatggcgtgctttaacatctctaaaatcttgtcccaagtcctcctagctcttgtgagctggtggtataatttcatgattaccgacaaaaaacaagcaaaactctcctaattccttatggtgtccgtttcagaaatgtatgcagcttccagagaagtcctgagtttgcctactcccatcaggacctatctgcgagggagtcacctgtttgagccttagttaccacccagccttttggtcagggggctgcagtggtctgttctgacaggatcaagtgccttaaaagtgctgtgttaatactggagccttctctgccagtcatggaaggggcatgggaagcatgagggtgactgtgattctttggcttgacccctgctggctctgttccaggccttagcctccagtcagcctccaaggccaaataggccttgggggtgagcccgggagccctgaggtcgtcagcctggagcctcgagtgtttcctaatacacactttcccagcccctccccctggggactctgaatctccaggaatctccgcattcagccactgtgcacctttgggagactctgcactgggtaaaaggagggagtgaaggcaccagcaccagcagtgacttacgagaagggaaccattgggtccaaggcagttcatggagggtcctctggagcaggcagattggccaaagcaatttaccccgcttaggacactgttttctcttttctttctttttagaaacaaggtctccctccgttgcccaacctgcagtgcaatggagccatcatagatcactgcagccttgaccttctaggctcaagtgatcctcctgcttcagcctcccaagtagctgggactacaggtgcatgccactacgcccaactgacttttttgtcttttgttttgtagagacagggttttaccatattgaccaggctggtgttgaactcttggcaagggattaattctcctgcctgggcctcccaaagtgctgggaccacaggtgtgagccaccgtgcctggccggggctgttttcttgatgtctgtgaagactctgaggccccacagactgctgttgcctgggcaagtcctccctctcccagggtccactggttccttttttctggggtcagagacagaagggatcacaccatgtggcatccatgaaatggcacctcgagccactggtggagtgaggtgtttgatagtgattgcgatgcgggccgggagtgggatgcctccacaccgacactggccaggtctcagcacatcccctcccgtccgatggcagtgcagcagcctcttcttttgttaaaccctcagtctattctggttggtgtcagaggcatttgtccccagaatctcagatcttggcactccctagcttaaaatctttctgcagctccctctcaccttccagataaagcccaagctccttggggtggatagcttttccaaatccttccaaatttaacctgagagccaccttccaacctcatttctgtgacagctgccctcctttggcaaaagcacactcactcttagcggatgctttctcattcctttgcccgtggttcctctccctgggacccccgctcccggcagcctggcagcctgactcctgctcacccttcaacactcagctctgtgtcccctccctgcaaagccagctgcctttgtctcccagctttgacctggatatctctccctgtgcctctcacaatctgagcactggtcctactatatggaaatagctgatttatgcgcctgtatttcggatcaatttcccagggagcacaccgtctttcatctgcgcatccctagcacctaacacatgttactcagcacagagtagatgctcagtaaatgtgtggacatagattgtgggatctaccctacctcctacacagcaagacagcatctgggagaaccctcttacttggtgcataatatatactaataaaagttgcataggattaactccctgaattccctcaccaaataataaatgactccatcagctcctttgtggctgatctgtgaaggtaagaatttccggatgtctacacaaaaacaaaaaatcgagctggctgcacctttgctactctaactatggtctacagaccagcaacagcagcaacatcaccaagttggccaggctgttcttgaactgctgacctcaggtgatctgcccgtctcggcctcccaaaatgctgggattacaggcatgagccactgtgcccagcccccacctttcaattaatggcatctgtcttgggctgggctgggttgtgttccaatgtctccttttggagtggctctggcctaaaaaaatcagcatccttggcacctcaagggccattgtttagtccctgtctcctctcccctccaggagtgttttccctctgcccataggatcatcggctgcaggaggctggctgctcctcgccgcacatcctgtcttccccctcatacctttatccgagtttccccaggctgggagcaccagctctctcttcccagtgatggcatcccaggatgggctccaccgtcgaggccacctctcataccaccgcaagggctgtgctcacatttgccctctccagttgacatgcacattcctacagcatgagccagtgggttgggctcaggctgcagagtcaggctgacttagttcacatctcagctctgcgccttacctcgagggctctgagaaatggccagagtcctcagccttggcaaatgagcataatgatacctagtggctgtgatttgaagacgttgattatatgtccaacctctaatgcagagcttgccatatctgtagtagaccctcaataaatggaaactgaatttgtttcttaatagaaaatggggagttcctttccctggatctcggagggtccaagttccgagtgctgaaggtgcaagtcgctgaagaggggaagcgacacgtgcagatggagagtcagttctacccaacgcccaatgaaatcatccgcgggaacggcacagaggtacctggcaggtggctcctgtgaccgcagggaaggcggtggcatccgtgtgtggggaaaccacaccttagcccatgtactttgctttctcttctctgcagctgtttgaatatgtagctgactgtctggcagatttcatgaagaccaaagatttaaagcataagaaattgccccttggcctaactttttctttcccctgtcgacagactaaactggaagaggtaaggcgcggagggaagcagcagtgcaggaattggggcttggggaatgtgggcacgggtgggagtcaggctgcacgcaggagagaacagcaggagctttcttgtttgtctttttcttttctttttgttcatgatgaggtggcagcgtgaggcagagaacttgttaacgcaatggccttgattttatgattaacgtgggcacagctcgggggagtagaatgcttttcactagctctcaaaccttggtgtgaggaattccttggagggcttgttttaagcacagattgctgggcctactggaatcagtggttctgcaaggaggccctaaattcgcctccctgacaggttcctggcagatgtgatgctgcctgaggcctgcacttaggaccactgacatagccaactagaagaaacatgggaaggctggggagtctctccctgtagtgagccctcaggaggaggattagaatgggggcactggaggaccaggcgcggtggctcacgcctataatcccagcactttgggaggccgaggcgggcggatcatgaggtcaggagatcgagaccatcctggctaacatggtgaaaccccgtctctactaaaaatgcaaaaaattagctgggtgtggtgccgggcgcctgtagtcccagccacttgggaggctgaggcaggagaatggcgtgaacccgggaggcggagcttgcagtgagccgagattgtgccactgcactccagcctgggtgacagagcaagactccgtctcaaaaaaaaaaaaaggaatgggggcactggaggagtgagaatgtcctggagcagacacagagcctgggatacacagtctgaactgtgtcaccagctaggccggggttcctggtaactcatctctgtgtgtctcagttttcaatctgtaagcaggaggaagctaacccaatcttatgtgaataaagacagcaaataaggggacgttctggggccaggttgggggagttactgtcaagagtctagtctccccgggccactcctgtctgggttggggaccctgatcaatctcctcctcctggccctcctggttatgatgcccagttgacagtcacatggacctccttgggatgtgcttgatattgttggcttgagtcacttattggtgtggaatagtgaaagggaatgagctttcatgttccacacacatggctttgaatcatggttcaggacaaattgtgtccccttggaccagttccttaatttcatgagcctcttgttttctctttgagaaaattttatttatttttatttttttctttgtagagatgaggtctcactatattgcccaagctggtctcaaactcctgggtttaagtaatctgcctgcctctgcctcccaaagcgttgggattacaggcatgggccattgtgtcccaccttgttttctcatttgtaaagcagggataataacatctgcttgttgggctgaggtgaagcttaggcaaagcatttgtaaagcatccaacactgtggttgggccttacacagtagctgctaggctgtggtgactgtccctggattacttgtctctttgtgcttttgtatcttatccctaaattcaacagaggtttttggagggcaagcagtgcccgccaagggcacagaccttccccgccaaggtctctgacaatgtgttgtatttaataggtgcttgataactatctcacagttgaaaggtgtcaatcatttatttgattccatcgtgggaatttgccatcatctatacaggggacaggctgagttttactttttcattcttttataaagaaaggactgagaaaaataatataaagaaggttccaggggcctggcgtggtggcttttgcctataatcccagcaccctgggaggctgaggcgggaggattgcttgagccagggagtccaggctgcagtgggctgtgatcacaccactgcactccagcagcgcaggccacaaagcgagactccatctctaaaacaagcagccagatgcggtggttcatgcctgtaatcccagcactttgggaggccgaggggggcagatcacctgacatcaggagttcaagaccagcctggccaacatggtgaaaccccatctctattaaaaatacaaaaattagctgggcctggtggcgggcgcctgtaatcccagctactcgggaggctgaggcaggagaatcacttgaacccacaaggtggaggttgtggtgagctgagatcacgccactgcattccagcctgggtgacagcgcgagactctgtcagaaacaaacaaacaaacaaaaaacaacaacaagcaaacaaaaaacaaacaaaaaagtttccagggaatgtttgggtgagaccaagtggagctggctggcagagaaaggtcctaggagtgagtagatgtgtatgtcagggggttgggaatcagggccctggctggatcctgtagtgcaggtggtggagtgagagtgtgccagctgctcttattagagagctctggaacagagactccaggaagaaggaagaaaattctcaagctctgtgagaattcattcaactttaagaattaaatgcacatgctttcttgatagcttggcagcggagggtgtgaacggatggtttatccatccaggattttgtcatttatctatgttgaatacccaccaacatctttctcaataataatgataaaagcacgtgcctccggttttgacactgtacctcgcgctgtgccaaatgctttatgcgcattatcttgttaaatcccccaaacaattctaagaggtagatatgattatcttcattctatatttgagaaacactgcagctcagcgaggttaagagacttgcacaaagccacacaaccaagagtagcccaccccaagttcataagctccccaactacagtgcctttccagaaagacaccactttagaacttcatttaaaatggcagcaggtgcctgaaagcattttgatttttttttttttttttgagctctgtcgcccaggctggagtgcagtggtgtgatctcggctcaccacaatctccgtctcccaggttcaggcaattctcctgtctcagcctcccgaatggtggtattacaggtgcctgccaccacacccaactaatttttgtattttcagtagagacggagtttcaccatgttggccaggctggtcttgaatgcccaacttcaggagatcctcccgcctcagcctcccaaagtgctgggattgcaggcgtggtgagccactgtgcccggcccattttgacccacttagtgtcatattacaataaagatttttcaggtaaaatttaaactaaggaagggcatttaattatatcaaggagaggccgggcacagtggctcatgcctgtaatcccagcactttgggaggccgaggagggtggatcacctgaggtcgggagttcgagaccagcctgaccaacatggagaaaccccgtctctactaaaagcacaaaattagtcgggcgtggtggcacatgcctgtaatcccagctactcgggaggctgaggcaggagaattgcttgaacctgggaggcggaggttgcagtgagctgagatggcgccactgcactccagcctgggcaacaagagtgaaacttcgtttcaaaaaaaaaaaaaaattgtatcaaggaagggaaaaatgctttttttctcatcgcagtctagtcaaatatacttatattttataaaatttcctcgcaaactgcctttcaataaaatctaaagttaagtagtaaagttccaaccacaagaaaactcattcctgataatatttgaatgtggcctcatctggcaaagctatttaagcagggctctgctgcaggagtgggttcggtaacactagaataagggctcctggggaagatgggctctgttcagctccatgactgcagagggatggaaaggggaaggctgtgtgaggaggtgtgattagggggcttctttgagaaactgaaaatgattaaagaaggtaggagcgtgagaattcttattatgtttaacccatagccaacatcatgagcataagaattaaaggaagtcacttggttttttattcttgtttttgagggaacagaaagtcttaaccaaagagaaatttctttgtgtgtgtgtgtgtgtgtgtgtgtgtgtgtgtgtgtgtgttttctgataataaaataaatggtaatacttttttcaaggtttaaaaaaagagagagagaaggaatggaaaagtttaaagaagaaaatagaaatcaccactcatctcaatattcaaatattcccaccactagaattgtgggtttttcttttactcatacctatattaaatacaagtgttatcctgtatctacagtttagcaaatctatggttgattctagtcaccaaatatttgagacaaaaagaaaatgtacagttgtatgtaattgcctttttaatttaacattctatcgcaagcatttatccctcacttcccccatccaccttccctgcaacagggatttttgaagaaagccagcctgtgcatctctccccgctctgtccctggagacagggatgttgtcatagcctatgagagcagaagttagggagagctgccacacggcggcgctgtggtgcaggaaaaaagcccgagggctggtccagagtcagagacctgcattcggcttgggctctatccttcactcgcggtgaaattcagagcaatttcctccctctctcaatcccagcgtttttaaatccataaattgagggaaatggaggaggtgcggtcaggaagtttgtgagcctgggtcagctgctcttgactgagacgacttgggcgattctcttttaacttccaagttctcttccagtctgaaacattctatgattatttgcgatttcagacacgaaactcaggaaacaccatttgtaagcaatgattggtaatgcaaattgagaaccatttttctttctttctctttattaagagacgaggtctcgctatgttgcccaggcaggcctggaactcctggcctcaagtgatccacctgcctcaggctcccaagtagctgggactacaggtacgggccactctgcctggttgggaatcatttttctaagttgaaatgaagttcctgagacaatcctgcaaggttacaccatgttagttctgttttgtggacctggcaaaccatgcattctgcatgtataatacaccaggtattttctttttttttttttttttttgagacggagtctcgctctgtcgcccaggccggactgcggactgcagtggcgcaatctcggctcactgcaagctccgcttcccgggttcacgccattctcctgcctcagcctcccgagtagctgggactacaggcgcccgccaccgcgcccggctaattttttgtatttttagtagagacggggtttcaccttgttagccaggatggtctcgatctcctgacctcatgatccacccgcctcggcctcccaaagtgctgggattacaggcgtgagccaccgcgcccggcctacaccaggtattttcattagagcattcctttgagagaggtagggaggtgacatttccactttgcagaggagtagactgaggctcagagaggttaaacgacttgtctaatgtctcatgaatccaagagctctaacttttcaataattactccttctgctaccatatatttcaaaccactcagatgagagtaatagtcctttaaattattagaaaaggctgcagaagcaatgttttaaaaaaattggggtgattcagcttagagaagagaaggccatgggggatgcacgtaggcatgaagtttctgcggctcagttgcacatctcagcacgtctttcattcaaactggacctgaaatcttctcccagggtgtcctactttcgtggacaaaaaagtttaaggcacgaggagttcaggacacggatgtggtgagccgtctgaccaaagccatgagaagacacaaggtgaggaattcacctcggtgtgggaggctctcccagccctagctcctttctcttgggttggtggggctgggggtgaggtgagggggtcacatatggtgcctgcatggagggagaatcagagaaggaattgatcttagaaaaggtcccactgtagtacagatgtggccaacttggatgaacccacagagccttggtaggcggggcttgcaccaatccctattgaaaggtggccagctcatccctgggcctccccagcagccacagccctctccggaggtcttggttagatctgatgctgtgtgtaggccccacacgccctcctctctgaggctgaaaagatcatatactttccgggctggttccatattctttctgggctggttctctatttcactgtccactccctgtccattaaatatccctatttgttgaacgtattttacaataatttaaactactgcgaaagcaagactcgctccttgctgagctggaaagtacacaaacccaaattgcttgttgccctgacagcaagaggcatgtttgctgcatagccttccagcctttttttctttaaagctgggatcttattgttttatagcctgcattttcccttattgttttcattttacttttttttttttttttttagagatgaggtcctgctgtgttgcccaggctggcagtgcctggcactccatcctcgaattcctaggctcaaatgatcctcccacctcagcctcctgcatagctgggactataggcataagccacatgcctggctctcattttactttaaaatgttcttccaaactttgggggatgttggtgcaataacccaagctgacttggcagaacaggaaatccagacaggaagtcaccatgccatacatggggaagacttggccgagtctgtgcctgctggctgagttgtccccgtgggtgaggactttggtgttttctcctggaaatgccactggataaacatgctttcctcaatgtcttcccaggatctcacaaacaaaggctgaaacctgggtgtgatgtgtgcctgtagtctcagctactcaggaggctgaggcaggaggatcacgtgagcccaggagtttgaggctgtggtgtgctatgtttgtacctgtgaacagccatcacactctagcctgggcaacatagtgagaccctatctgcagattaaaaaataaaattttttaaattaaaaaaaacatcgacaacaaaaaacaagggctggagtcccggtggcctgtccctcatatttccattgcagaggccttcacccacaaagcaagaggatgggctcccctcttcagctcctgtcggctctttctctcccctagaccctgaaccttgatgaggccttgctccttcagacaggcccagcaggcaggatctagggatgtctcagcagccaccttcactacctgctgcctctgtggggaaggagggagggaaacacctccttcccacccgctgattccctctggccttgtgttcggcaggacatggacgtggacatcctggccctggtcaatgacaccgtggggaccatgatgacctgtgcctatgacgacccctactgcgaagttggtgtcatcatcggtaactcaattggactggttttttgagggtaggggagaagggactgtttgggagtttcatttcagcgagctctgagtgaattcggcgggaagggcactgcactatttaggagaagcaacatagggacatgaaaaattcattcattcatccattcgacaagtgtttactgagcacccattgtgtgccggcccctgggcttggcactgggtttggagtggggagttcctgtgctcctggaactttcagtggggaggtgggtgagaggcccagaaggcctaggctattaagataatttcaggtggtggttagcgtgataaaaaaacaaaaaacaaaaaacaaagagagtgatgtgactgtgagtgggatgaggcgtcagggaagcctctctgaggggtggcatttgagccgggacctcagtgatgcaaaccagggagcaaggtggaggcccgagggtagggagtccctgccaaaggaaagaggacacctacaggcttggagatgggaaggggtccagggagggggcactgggggaaccctatagccgagtggtgtccggatgaggtgagtgaaggctgagagtcggaggccattcaagtgagaggcagaggacagactgggcagattgcacaggatgtgcacacagtcactgtaaggtcaccggcttatcccctgagggagactggaaggcactgggggactctgggtgggggatggataaatggatgcgcattttattttatttttttatttgagacggagtcttgctctgtcgtccaggctggagtgcagtggcacagtcttggcttactgcaacctctgcctcccaggctcaagcaattctcctgcctcagcctcctgagtagctgggattacaggtgcccaccaccacggctggccaattttttgtatttttagtacagatggggtttcacagtgtttgccaggctgctctcaagctcctgacctcaagtgattcacccgccttggtctcccaaagtgctgggattacagccatgagccaccacgcccggccggatgtgcattttttaaaagcccattttggctgctgtgtggataatagattactggggacaagagtggaagcagggtgaccatccaagagaccactggactgtcaggcaaggtgcactgcagctgtggaccagagaggtcgtggtgcagtgggggtttccagtgggtggtctccacaccagagcgagggggtcagctggaggaatgtgtgggaaggcagtttggggtacagtaaagctgaatggctctgacttataggttgttcttgaatatccccttctccttttcccattcctttaccactcctggggaaagttcttctgaattgctttttcttaatgtccctcaagaccctcctcagcctggctttcccaaagggcaggtttttaaacctgaggggctccctccacccttctgtttccaggagcctcagaatggttcaggcccttgccagtcatggcacccgcctgtcactgtggctgcgtctggtaaccacagattgggggggccacgcctaaacagtgtccgtgcatttctgagaaaagctttttccaaatattacattctgcttttctacatttctcattttccatgttggcatttaaaatactcataccagagtatcagccaagggaagatactgaagaaaaaaaaaaaaaaaaaaaaacccgaaaattcaaacagctttattgaggcataaaagtcctccgattttaggtatacgattcaatgatttgtagtaaacgtatagttttgtaaccatcaccacaatccgattttagaacatttctgtcctcccaaaagagtccaaaaagatggtgcccacttgcagtcattccccagtgctcaagtgtttgaggcatttccttggagcgattttgtgtttgcataacggaatgttgctttcttaggtggtagctaatcacagtctaagataaggatgcagcttatgctagaaacaatttgtggcaggccataagtaaagaatatttttagtatcaaatagagaggaagctaagtagcttaaggaaagaattttcaaaattaccctgggttggtgattttttgaaaaaaatatttacaagattatcttcatttgtcctcttgtaagagcgcttcgtcagctttcatccatattcatcagcggacttcttcacaattgactccattcagaacagcaaaccctgagcaccctgagaagtgcagacttgacatgtcagctgttttccccatgtgcttggggcttgcccaagctgcttccctcagcgagagccagcccccagggaatgaaaagcactttgtggtacattgaggaggactccccagcagtcaagagttctctgtctgtgcccagctgggagtcctctctctgcatattctctctgatccctggttcaggaactggcaccaatgcgtgttacatggaggacatgagcaacattgacctggtggagggcgacgagggcaggatgtgcatcaacacagagtggggggccttcggggacgacggggccctggaggacattcgcactgagttcgacagggagctggacctcggctctctcaacccaggaaagcaactgtgagttcccttctggtgttatctgggcatcggcaccaggcagtgcctaatcactcaggtcccctggctacctgggaggctttccagttgtgactagctatccatcacaactttctttctttttttctttttcctttttttttttttttgagatggagtctcactctctagcccaggctgaagtgcggtggcacgatcttggctcgctgcaacctccaccttccaggctcaagcaatcctcccacctcagtctccagaggagttgggactacgggcatgggccaccattcctggctaatttttgtattttttgtagagtcagggttttgccatgttggctaggctggttttgcactcctgagctcaggcaatcctcccgcctcagcctcccaaagtgctgggattacaggcatgagccaccatgcatggccccattacaacaaatttataaggcattgcttgtatttcagtttcatctgacaaatgaggaaatagaagccaaggacattgaaagatttccctaagtcataaccctaataaccctaattctaattcagtcagtatttgtgggttacgtatgtgcatgataggcactgaagataagagcactcggacgcttggccgcagaacacacctgggcagtgaggagaaggcaggcacagccgaactcgtcgtgttcgcatgtcccccagccgccttgctttctcggaggcctaatcactcagcaagtggtgactctggcaggaccttccctctgtgtttgctgtccacaatttttattttgatgctcaaattgtttcagatttggccaaaggaagcctctgaagctgcctcctgtgtccttttgacatgttccatcactctttaagtacttccttatttcctggcaccgtaagacgttcccggctcatgtcgcactttcctagccccagccctggaatcagccattttgtcaagacatgctggtgaatttcaagcaccttctaggagcgattcaaacactagaactgtgcacccgggaagcacattccactttggtggcacctactccaggcacatgcctgtgctctagtgacccattgcagtcatgtcccaaggacgtggtgtccattttttgaattttatcatcttcacccatttccattttacttaaaataaattctattccttccaggcctggtggctcatgcgtgtaatcccagcactttgggaggctgaggtgggaggactgctttagtcctggaatttgagaccagcttgggcaacatagtgagaccagtctctataaaaataaaaattaaaaaaaaaaaattagtcaggtgtgatggcagatgcctgtagttccaaccactcaggagactgaggtgggaggatcacttgagccagggaggtccagggtgcagtaagctgtgatcataccattgcactccagcctgggcaacagagcaagaccctgtctcaaaaaatatatatatatattatattccctgacatccaccctaaatttcttttgattgtcttctgtttcttcaatgctcaaagacttttttttttgagatggagtctcactctgtcgccaaggctggagtgcagtggtgcaatcttggctcactgcaacctctgccttctgggttcaagcaattcccctgcctcagcctcctgagtagctgggattacaggcatgcgccaccatgcccggctaatttttttgtatttttagtagagacagggtttcaccatattggccaggctggtctcaaactcttgaccttgtgatccacccgccttggcctcccaaagtgctgggattacaggcatgagtcactgtacctggcctgttctaagactttttatagtgaactatataaagtagattgtgacatagattgttcttgattttgtgtcttattgtgtttggaaaataagcattatatttaggcctgatgcggtggctcttatctgtaattccagtgcttcgggaggccagggcaggagaaacactggaggccaggagtttatgataagcctaggcaacataattagatcctgtctctacgaaaataaaaaaattagccaggtgtgatgatgcacccctatgggaggctgaggcaggaggatcacttgaggccaggagttcgaggctgcagtgagctatgattgcaccactgcactttagcctgggtgacagaacgagatcctgtctccaataataataataataataataataataataataataatgttcaatagtctgcctgggaaacaattaggaattgttggtgtgcagacttggagtaaagctgtaggtagccatggcaatgttaaatccacattgttgtagagcctgtctggggctgtccaagcccatctcacaagcacagcatctttctctcttggacagaagcttgatgtaggagtgggaagcatctgagtgtgaaatttgacttgtcgcatcatgtttgagtgattttgggaaaatacccaaagtctgtgaaattgagagtccctatgctcgatgtgagaatggtacccatggccagggtgatttgagacaaaagttcttgccatccagcactttgcgagaaggagggaatcttagctcagccctctcccatgtgctccttcctgtgggcagtggctcctggtcttcgggaaatgatgcagcttaatcaaaggggctgcgtccacagatctgttcaccaacctgcaggttcgagaagatgatcagtggcctgtacctgggggagcttgtcaggcttatcttgctgaagatggccaaggctggcctcctgtttggtggtgagaaatcttctgctctccacactaagggcaagatcgaaacacggcacgtggctgccatggagaagtaagcaagtccctctgccttggctctgtggagggctgggatgggaggcccaggtgtggggtgctccatgtggtaggacagcaggagggactagatcctcctccttcaccaggaagatttcagacctgggcatggcttcagatgggttagcaatttctgccatgactcagatgagaggttcttgttggtttcatcagtgagggactctgctgtcagagggccaccctcttcccatgttctgttgccttcttgttaaagtggtaacttgtagcatttttaggatcacagatccttttgagaactttattcaggttctagacccttagccccgaaaatgtacattcacacacaagtttgcttacaatatcagggcatccttggacactaagctcattgtggaatccaagtccagaactcctgtgatagcagagccttctccacctgctcccatcaggaactggctttgaatgtggtgatgtgaggccttacacacaggtccctcgcatggagctggctggtgaaggctgcaggtgacggcggctggccccggtgtgactgcattgccgtccagcacatctgagggtcctgctcctcaggcttagaaatcttggcatcgccttgactttgtgatcagtttagattctgagctcagccacgtggcgctgacctgcagcatctatgtctatgcagaacttggcagggacagaatttccgtgaaagtcagcatagcacagggtgattaaaagtgtgggtgctagaatctaactgctaagttcaaatctcggctctagcccttactagctgtgtagccaaggacaagttactcaacctttctgcactcacatctctcatctgtacgacagggtaatgacggtgcctcccgcaggatttttgtgggcgttgaaggagttactatgtgtaaaatccttagacaagtacctggctcatggtgactgctcagttagtggcagctgctactatcaatgttgatattgttatttttattctataccatggacctgcctattaattttcacaatcctgagaggtggagaagcttgttcccccaggaggataccagtgggatggagaagtgtcgttcactcattcctgtcccctggccaggtataaagaaggccttgctaatacaagagagatcctggtggacctgggtctggaaccgtctgaggctgactgcattgccgtccagcatgtctgtaccatcgtctccttccgctcggccaatctctgtgcagcagctctggcggccatcctgacacgcctccgggagaacaagaaggtggaacggctccggaccacagtgggcatggacggcaccctctacaagatacaccctcagtgagtgctgcctgccatccacgcccccacaaatgagtctccctggagcagggccccagtgtcttctggactatcctgcctatctggggtctggaaccaacaacccctcttgttggttctgagattacaagggaaaaggtgaatccagggcctgcattcatctagctggctgggttgcttttggggattactcttaaagaaatattctgctaaagccaattgcctaattaggaatgctgtccatccatgtatctatgtccacccatccatcacccgcccattcatctctccattcattcttccatctagccattatttactgaacacctactatgtggttaaggctgggaagtaagatacacctagtcatagatggggaaaaatagagatggcacaggttgccaagattatgggaagggtcctggtaggaaaacacagggaaatgggaattttccagaaggaaggagagtgaaagcccctttggctaccggggtggacttggaagtcaagtggttacaccctggaaagagctgagaaagaaaatccttctctttggacagaaatgatgttcagccaatacattatgcacagactggttgaaatgttcgttgacagaataagcacttccccgagcctcccaagtgccttccactgccccagcttcttagtccctccctcctctcatcccctcccctccctaccatcagcaaataaagggctgagccccgccccgcagggccctccgggactgggtttactgctgcccctgggtctgtgcctgagcctggcctttatgattgctaaatattttgccatcacccctgcttcaggtacccaaaacgcctgcacaaggtggtgaggaaactggtcccaagctgtgatgtccgcttcctcctgtcagagagtggcagcaccaagggggccgccatggtgaccgcggtggcctcccgcgtgcaggcccagcggaagcagatcgacagggtgctggctttgttccagctgacccgagagcagctcgtggacgtgcaggccaagatgcgggctgagctggagtatgggctgaagaagaagagccacgggctggccacggtcaggatgctgcccacctacgtctgcgggctgccggacggcacaggtgggccagcacagcctccctctctgaacagccatccagggctcccgtcaaaactccttaaagccagtgaggttcttggtttttagaaacttgggttcacgtctctaatggagggcaagagtaagaagaaggctagtattctttctaaatctgttggcctttgttaacccaaggcatttgcagtaaaaacaaaacaaataaacaaacaaaaacacaaaaagcctacattaggttatgtgtgtgcacttatgtgtgtgtagatgagaacatgagtgtaccccccccgacccccagatcctgaccccaggaactttgttttagatgcctgagattgcctgggcttgtcttcctgctgcttctctggctctgttctcttctgcagcttggctcacttccctttccctctcattgcttctgcccccaacttctccaacccttgatccttctggtcctcggtgctcagccaaaagaagccactaagtagtgaaatcagttcttcagacaaattattttacctctttgaatctcacgagactcttccggaaataatgaccttagtaaaatgctttacatcttataatttgcttttgaacctttcatttcatttcatcctcacaaccacttggaacgttaccaaagaggaaatggttcccattttatggatgccatacctgagacttacagaggctagatgacctactcaaggtccaacagctgtacttgggatctcttaactgagagcagtaaaagacactgtttattttatttttatttttattttttttgagacggagtctcgctctgtcacccaggctggagtgcagtagcgtgatctccgctcactgcaagctccgcctcccaggttcacaccattctcctgcctcagcctcccgagtagctgggactacaggcgcccagcaccacacccggataattaattttttgtatttttagtagagatggggtttcactgtgttagccaggatggtgtcgatctcctgacttcgtgatccacctgcctcggcctcccaaagtgctgggattacaggcgtgagccaccgcgccagaccggaggccccttgagtataagaatcatgcatttccttgactggatgccctgtaccgttccttggggctcccgagaaggctgtcagtcagtgaagctgaaagagccttcagaggttcagtctcctgattttgcagatgtggaaggatgggaccttgcctctcttgctcaagataaaaagccatttctcagaagccccaggtcccttgactccaggccagggctcttttcacggcacctcactggcgatagtgtaggtggtgcctgggactttaccacagaagtggaggccaaggaaagcagcctggcctcacgcaggctcaagatgcctgcccggggcccgggcactgtgcagggtggcccccacgaccctctggtctatgaggcccaggagtgcaggccctgggtccgctctgctccgacgtctcctcttcctcccaatgccccgacacaagtccctgtcatggaatgcagctgctgctttctccatcacagagaaaggaaagtttctcgccctggatcttgggggaaccaacttccgggtcctcctggtgaagatcagaagtggacggaggtcagtgcgaatgtacaacaagatcttcgccatccccctggagatcatgcagggcactggtgaggaggtaagtgccaggcaaggcctttgggctccgaggtgccagcctgccaccctgcatcgatgtccgcctggtgtgaatgccgctctctctctctctgcagctctttgatcacattgtgcagtgcatcgccgacttcctggactacatgggcctcaagggagcctccctacctttgggcttcacattctcatttccctgcaggcagatgagcattgacaaggtaagatagccccaccaggctcacggccagcccagtgggcttccttcctcttctgggaccatctccaggtaactcccagcctgccttcatttttacagggatcttgggttcagggcagctgggaacacatgatagagaatttcaacaatttaatttttaatcaatttatcacgattttttagactgaccattcacaagagaatttagagtagtatgcaataaagggacatgtgcataatattcctactaaaagagaggtcgaatcatattatggagagagggagaaagaggtaatgtccagtgaaggccagttataacaattgggcagtaatacgatctgtgtctttctggacagccatgtaaacagggaattacaatgggtttttatcgtctgatgaaagaaatcttgccagcacatcacaagaaatacatttcttttttttttttttttttttttttgagacagagttttgctcttgtcacccaggctggagtgcaagggcgtgatctcggctcactgcaacctctgcctcctgggttcaagcaattctcctgcctcagcctcccaagtagctgtgattacaggcacctacctccacgcctggctaattttttgtatttttagtagagatggggtttcaccatgttggcaaggctggtcatgaactcctgacctcaggtgatctacctgtctcggcctcccaaagtgctaggattacaggtgtgagccaccacacccggcctactttataagttttgaaatcaggaaatgtgagttctctttcttcttattcaagattgttttggctattcggcactccttccattttcatatgaattttagaagcagcttgtcaatttctgcaaagaagccagctgagattttcataggaattgagttgaacctatatattaatttggggagtttgccaccttaacaatagcgagttccaatccatgaacatgggatatctttccattaatttaggtcttctttattttctttcaacaatcctttgtagttttcagagtaaaagtctatacttctcttgtttattcctaagtaatttgtgctttttgatgctattataaatggaattgttttcttttcttttttttttttttgagacagagtctcactctgttactcaggctggagtacactgatgtgatctcagctcactgcaacctctgcctcccgggttcaagtgattcccctgcctcagtctcccgagtagcttggattacaggtgtgtgccaccacaactggctaatttttgtatttttagtagagatggggtttcaccatgttggccaggctggtcttgaactcctgacctcaggtaattcacctacctcagcctctcatagtgctgggattacaggcgtgagccactgtgcctggcaagaaatgcatttcttttctaatattagtatctcagaagcaattgatcacatggccactttagctgacattgaagaacatcatagtttatcatttaatagataattcataaatatggagacatttattacaaaatctttcctgtaattctagggtaaaaacacccagggttgtccaggtgtggtggctcatctctgtaatcctagcactttgggaggtcgacatggaaggattgcttgaggccaggagttcaagaccagcctgggcaacatagtgagaccctgtgtcttaaaaaacaaacaaacaggccgggagcggtggctcatgcctataatcctagcactttgggaggccaagacgggtggatcacgaggtcaggagatggagatcatcctggctaacatggtgaaaccccgtctctactaaaaatacaaaaaaattagcccggcgtggtggcaggtgcctgtagtcccagcacttgggaggctgaggcaggagaatggcgtgaacccaggaggcggagcttgcagtgagctgagatcgtgccactgcactccagcctggtgacagagcgagactctgtctcaaaaaaaaaaaaaaaaaaaactgtagccaggcatggtggcacatgcctgtggtcccagctactggagagtatgaggtgggaggatcacttgagcccaggagattgaggttccagggagctatgatcacaccactgcactccagtttgggcaacagagactccatctctattaaaaacaaaaacaaaaacaaaaacacacacaacaagcaagccaagtacagtgactcatgtctgtaatcctagcaccgtgggaggccaagatgggaggatcacttgagtccaggagtttgagaccagcctggacaatatagcaagaccccatctctaaacgtgtgtgtgtgtgtgtgtgtgtgtgtgtgtgtgtgtgtgtgtttctgtgtgtaaaaacaaaaaatcacccaggc

SEQ ID NO: 607 - DNA, 32744 bp, Homo sapiens
  source 1..32744: mol_type = other DNA
aaacatctatcttgctgtgtttggacaggccagcccctgaaacatcttgggcaatggagggttaacttctcaaagtttaataggcaagaccagcaaccatgcaacaaggtaaattgtcctcacgagaactccaaagactatttttctctctctttttttgaggcagggtctcgctatgttacccaggctgctctcgaactcttgggctcaagcaatccccccatcttaacctccccagcagctgggactacagccacgcgccactgcacccagctgacttttccttctaagcatctttggctgggcgtggtggctcatgcctgtaatccctgcactttgggaggccaaggtgggtagatcactggaggtcaggagttctagaccagcctggccaacatggtgaaacctcatctctactaaaaatacaaaaaaattagctgggcatggtggcaggtgcctgtaatcctagctactcgggaggctgaagcaggagaattgcttgaacccaggaggtagaggttgcagtgacccaagattgtgccactgcactccagcctgggtacacagcgagtctgtctaaaaaagaaaaaaaaaaaaggaagagagagcatctttatcttcattttctaacctttaagtgttactttctcccagtaacattttgcccagaaagaggtgatgaatatagatttaagaataagattttccccatgttgctgcctttccagaacaagtgagttcattctcatttgtctttcttcagaaatcttttatctgtctttctcccattagctggaatgggtgctccatgagaataaagacttgggttccattcttcctattgtccccagagcctacatactggctggcattgagtagcaattgaacagttttctgaatgaatgaatgaatgaatgctcaaataagcacatgaattaattatcactttcctttgaatctctccattcttcttcctcacccaatggggctcgatccttatacacagaagatactctataaatgatgattcaatgaatgccaagccctgttctatgcactgaagaccaaaagaaataaaagacatcattcctgctctgtaagaattcataggctagtaaggaaagaaagatatataaatatctgtaatacaacatggtaaacaggaacaaggtgacgactgttcctgaccatttcctgtatcctttagatcaggaactctcaacctttgtgcacgtgtatgtgtgtgtgcatgtaccatgtaccccttggacaatcaagaatacaagaaaccttgtattctttctcagaataatgtttttaaatgcataaaatacacaggattataagggaaattaatggcatgaattacatttattaaaatgttaaagtggcaccatggtaatacatgcatgtatttattaatgcattattcagcaagatccagcaggaacctaataacaatgacaattttgaagtctttttttttttttttttgagatggagtctcgctctgttgcccaggctgaagtgcagtggcgcaatctcggctcaccacaagctctgcctcctgggttcatgccattctcctgcctcaagcctcctgagtagctgggactacaggtgcctcccaccacgcccggctaattttttgcatttttattagagatggggtttcaccatgttagccaggatagtctcaatctcctgatctcgtgatccaccctccttggcctcccaaaatgctgggattacaggcatgagccactgcacccggcctgacaattttgaagtcctgatgagtgtaaacactactttgagacatttgcaacaacagcatagatatgaatatatctgtgatttctctttttttttcttttttttgagatggagttttgctctgttgcccaggctggagtgtagtggcacaatctcagctcactgaaacctccaccccctgggttcagtcaattctcctgcctcagcctcccgagtagctgggattacaggcacctgccaccatggccagctaatttttgtatttttggtagagacggggttttgccatgttggccaagctggtctcaaactcctggcctcaggtgatccgcctgccttggcctccaaaagtgctgggattataggcgtgaaccactgcgcctgacccaatatatttgtgatttccactggagacaaagtcacagatgctgctagcactagtgggtttgttgcccacattcagaattaaaggaaatgctaaatttcagttacagactatcagaaattaatttgtatttttttcccacagaagcttacggatatcaccttctacctgaagggtctctgatgcccaggttattaatctctgatcagaatgttctaatggagctggcacttatttagagacagatcttagatggcagatctaagcaattttagcattccttgtagtacagcactgatggtagtaaattcacgcaacttttgtttgtctgaaaatgtctttttacccttccttttttaagaatacacaatacacagttctagtttggtacttttttcctccagtattttaagaatgtcatttcattttcttctggcttccataatttattttgggaagtcagttataattcttattactgtttttctgcaagtttttttttttttcccctttctagctgtttgtaagggtttctctttctctttagtttccaacagtcatttaactataatgtgcttggatgtgtttttgttttagtgcatgtgttctttttttttctttttttaaatttatcttgcttgggctttgctaagatcttcttgaatctgtgggttaatatctttcattgtttttttgaaaattcttgttttatgactcattatttctcctctttccttctgaaattccaatatgcaaacattagagcatttcatcctgtcttacatctctttcaagttctgttccagtttttttgccattttttttttctctgtgcttccgtttgcataattccttttctttcttttttaccttttttttttttttttgagatggagtctcactctgtcagccaggctggagtgcagtagtgcaatctcagctcactgaaatttccgcctcttgggttcaagcaattctcctgcctcagcctcccaagcacctgggttacaggtgcccgccaccatgcccagctaacttttgtatttttatttatttattcatttatttatttgagatggagtctcactctgtaacacaggctggagtgcagtggcgtgatcttggctaactgcaggctccacctccggaattcatgccattctcctgcctcagactcccaagtagctgggactacaggcgcccgtcaccacacccagataatttttttgtatttttagtagagatggagtttcaccgtgtcagccaggatggtctccatctcctgacatcatgatccgcccacctcggcctcccaaagtgctaggattacaggcatgagccaccgctcccagcctaacttttgtatttttagtagagatggggtttcaccatgttggccaggctggtgtcgaactcctgacctcaggtgatccccctgtcttggcctcccaaagcgctgggattacaggcatgagccactgcgcccagccagtttgcataatctccaataactagtcttcaagttcagtgacagattttttttctgctgtggccaacctgctcttaagcctagccaatgaattcttaatttaaaacattatatttttcaattgtagaatatccatgtccttttttagagatttaatttctctattgacattatttatcttttcgtccattttttctaacttttcttttatttttctttaacataattacaaaaatcatcttaaagtccttgtctgctaattccaacatctgggttacctgtaggactgtttgtgttgtctattttttctcttgcttacaggccacatttttctacttctttgcatttttttttaatattaagcataaatagccatagagtctgatgtagatattatttttcaccagaaagagaacactctttcttctctcaggcagctaaggtgatggactgatcactttgatccagtctgatattgagctggatcagttcacttttcgtttcaaatatcagctgagcatagtggctcatacctgtcatcctagcactttggtaggctgaggcaggatgaccacttgagctcaggagttcaagaccagcctgggcaacatagatctcatctgtatttttttaatttttcaaattttaatttaaaaaatacttttgcccaggcgcagtggctcacgtttctaatcccagcactttgggaggccaaagcaggtagatcacctgaggtcaggagtttgagaccagcctggccaacatggtgaaaccttgtctctaccaaaaatacaaaaagtagctgggcatggtgtcacacacatgtaatcccagctaattgggaggctgaggcaggagaattgcttgaactcaggaggcagaggttgctgcgagccgagatggcactccagcctgggtgacagagcaaaactctgtctcaaaaaaaaaaaaaacagtttcaaatatcttagagtcatgcctgtcttgtgtttattacaggcccttttttcaagcagccttctctttctcaaatacaacaatattatagggtatctttctctgaatttcaatctagccttctttactgcccagaacttagcaaaaatcctatggggagaactggcaggtggggaaaaccagctatgcatttgaagcttctccagattctactctgtctagccagctcacatgaccataaaagctggctgctttctcattctctctgagtagtcttgcctctattctggcaagtctaatctcccccaacccatgccgagactcaacaaatgccctcatagaggaaagcagtcatgaatctccactcactttgggagggtcccttctgctctggaatttaattccattagatttccagccttccagtatctctaaaaagaaatatatatgatttttagtttatccatatatattttttctaattgctatagtggacacaatggtctactgctcccctcttacatcctatatcctaaccaccaattctaaatattttaaattcccattacaatgtcttattttattcatgagttattaaaaaaaaaaaaccaaaaaacaaaaaaccttttaaggccgggcacggtggctcacgcctgtaatctcagtactttgggaggccaaggtgggaggatagcttgaggccaggaatttgagaccagcctgagcaacatggcgagaccccatctctactagattaaaaaatacataaaaaataaaatttaaaaaaaaaacaacttaaatttgtacatttgtaatttccaagtatattgttttaaatttgatcattttgttaattttaacttaattatatgttgatttatggcctatatcagggattgactaattacttctgtaaagggccaggcagtcacaattgtaggctctgtgggccatatgatctgtgctgttgtaacaaaaaaggagccatagacaacatgtaaatgaacgggtatggcttggttctaataaaactttatttacaaaaataagtgacaggttggatttgtcctgcaattcagtttgtcaatccctggtctaaattatcttaattatttacaaatttattaagacttgctttataaatatgtttgctttgaaatttgagtgcttttcatgtgcacttaaaatatattctgtattagctgggcacagtggctcatgcctgtaatcccagcactttgggaggccgaggcaggtggatcgcctgaggtcaggagttgagaccagcctggccaacatagtgaaatcctgtctctactaaaaatacaaaaaattagctgggcgtggtgccaggtgcctgcaatcccagctactcaggaggttgaggaaggagaatcgcttgaatccaggaggcagaggttgcagtgagccaagattgtgtcattgcactccagcctgggcagcaagagcaaaactccttttcaaaaaaaaaaaaaaaaaaaaaaaaaaaaatacatatatatatatatatacacatatatatattctatattaaataagtaattctatatatttattagattaaacttgttttgttgttcaaatcttttataactttgttgattttgtttgtttgcttgcttgatctaatggcagagaaaaatacatttaaatttattcttgtaatgtggatttgtcagagtatttctgtaggtctaacaattcttgctttaatatttagaggttaatttattagaatattaacatctggccaggcacagtggttcatgcctgtaatcccagcactttgggaggccgaggcgggtggatcacctgaggttgtgagtttgagaccagcctggttaacgtggtgaaatcctgtctctactaaaaatacaaaaattagccgggtgtggtagtgcactcctgtaatcccagctactcgggaggctgagccatgagaattgctccaacccgggaggcggaggttgcagtgagctgagatcgtgccactgccctccagcctgggtgacatagtaagactctgtcttaaaaaaaaattaatatcttaattttaagatattaattttaaatgattaaaattatttaattattaattaacataataattaaacatcaaatcattcaatcatttaattaataataattataactataactattatctttatatataattacatataataggatattttatatatctatatatatcctacatatatgtaggatggaagcgaaggattgataaatgtatcttctcccaaagaagacaagtatttcagcatgcttttatgtattttagtctctcttacccctatagcccatcatactgaaatggtctagaattttagttatgtgctattattcataaactttcacttatttggcttcctctaagtgttttgacggagagatattatgtggcaagctgagggtttaaatcactgagaatatttttattatgccatcatatttgaatgctaatttcgctggatataaaattctagattcaaagatccctttcttctgttctttaaatctattaccttattcttttcttgcatcattggttgcaagtctaatgccaatctggttcttgtttctttttgagtaatctgttttgtgtctctgaaagcatttaaaattttctttttggctgggtgaagtggctcatgcctataatcctggcactttgggaggctgaggcacgaggattgcttaaggccaggagctcgagaccagcctgggcaaaatgttgaaaccccgcctctattaaaaatacaaaaattagccaggcatggtggtgcccacctgttgtcccagctactcagaggctgaggcaggaggatcacctgagccttgggaggtcgaggctgcagtgagccatgatcatgccactgcactccagcccgggcgacagagtaagaccctgtgtctaaataaataaagaaataaataggattctactttagaaattttatctagcttttttcatttattattatatattacaaaaaggctttcccactctccatcttttgtatttttgtagctccttataagcctaaataaaatactatttaccacacaactgagtgctgataaaagtggtttgttttaggccaggcacagggctcacgcctgtaatcccagcactttgggaggccgacacaggcagatcacctgaggtcaggagttcgagaccagcctggccaacatgacgaaaccctgtctctactaaaaatacaaaacttagctgggcgtggtggcaggcgcctgtaatcccagctactcaggaggctgaggaaggagaattgcttgaacctgggaggcgaaggttgcagtgagccgagattgtgccattgcactccagcttgggcaacaacagcgagactccgtctcaaaaaaaaaaaaggtttgttttatagtgaactgtggagggataagggacaaagctgggcacaaaaatagatctgatggtagggttaggactgagggggcagaggaaatgagactgacatttcctagggaaactgacaggttagccaatgttcctattccaatccatcttcttggaaactgcctgccatttcctctgacatctgaagcacttgctgtaaagcactcactgcttacactatggctgcctggctggctttccttgagaatatgtatatttaatctgtattttgtctatgaagctttttgagggctctgtagttctactccacacattgcccactcacccatcccattttcctccggtagctgctacatggaaagtactatggatcaaattggaaatccatctctcctctcaaaggcagctaaagctatgtggtcaggctctgggccccagattccagtcctgatttctgagtctgctttccaggtcagggaatgcactggggctgacgacaaggctggaacgtcccgggattgaagcttggatccgaactgttggacggcgtctggagttttgcacaaaagagaattgaattgtagatcagctgggaagttactgtggtagtcctggtgccctgcggcctccagcgactggaaccctgtgggagcacatagctggcattttttgctagagattaggaagtcttttgcttcctctgtgaaaaggcttgaattcaatggactgtgtggtaagatgaagttgttttttttttcccttattgataaaaataaaacagagatttggcttgggttattacgcagtggtgggcacatgagcttgctctccagtgtttggcgggaagccagttgaagagcatgtggttacatttttgtccggcatcatcaagagtgtagagaagctgtgattctagcctcagaggagcgagtttttattgtggggtgactcttcaaagaccatctttatgcaagaaatgtcagaggcccatttcatagtaagtttctttggaagttttgttttcgtcgatgctatattatcactcatgggctgatgtcgtctccttatgatggtgtccctaagagccttcacaggcctagggagcactggttggtggtgggaggcccaggctgagaggcaggtctctgtgttgtatttcttcctgggctttagtctgtctctttctaaaatgggctaatcctctctctgccctcttcctcatgtggtgaagggcgttgggacaacatgcaaatatggttcaaaggagaagtgaagctgctcttttgtactctgtcacatttgcttgctctgaattgggtcttttgttagcacattctttgaagtagaacttgtccatggttgactttggtgtcttgatttggagaagaaattgagtagtgcccaactgcaggtagactgagaggctgaactgggtttgcatggggtttgcaggatgtgcagaatggttaaatgaatgtatgaatgaacatatgtagatcgaatgtttgatggggaacctcagaatgacccaagaaacatgtttctccagaaactaagtagatcttgggctgtgaagtatttagtacccataacaagcaatgatagtttaaatatgtagtccaaaaatttcttcctcatcagtcaagtcataaatgcaggacttaaaggaaaccacatgtgagaggtgtctgtgacctaggatattggaggcctgggtcacagttaggaatcaggacctcgcaaaatttacttaacattctccagaatgtggcccaatctacaaagccaccctcatgtcagctgctcagctggagagcacatgtgcttgaagtttctttcaccttcactcttgctttaataaaagcatgtataagtccaggagcttattttatactttggttgatcagcgattgtgtcttcactaagaaccacccatattgtcatccttgggcagacacgaggaaggatgaaaggattgacctgcgagaatctagagaactaaggccaagggaagcaggtcagatggaggtagattgcatctcagatttaactggccaatgatgaaaaaaggttttgttttttttttttagacagagtctcgcactgtcacccaggctggagagatctcggctcactgtaagctccgcctcctgggctcacgccattctcctgcctcagcctcccaagtagctgggactacaggtgcctgctaccatgcccagctaatttttttgttttgtatttttagtagagacagggtttcactgtgttagccaggatggtctcgacctcctgactttgtgatttgcccacctcggcctcccaaagtgctgggattacaggcgtgagccaccacgcccagcccggaaaaggttttttaaagagtgaggtagcacctacctggatcttgtcttgggtgggtgctatggtctgcatgtttatggccccccaaattcataattgaaacctaatctccgatatgataatattagaaggtggggtctttggaggttattaagtcatgagggtggagccctcacgaatgtgattcatccccttataaaggagactctagagagcttgtctgccccttctaccagtgaggacggagtaagaaggctgtctttgagaaatgagccctcaccaggcaggcaccaaatctgctggtgacttaatcttggatttgccagcctccagaactgtgaaacatacatttccatcatttgtaagttacctagccaatggtaatttgttgtagcagcctgaacggaccaagacagtgagggtgggagtggaatatgatgtgctaggttctttccagttttcaaataatatgcttttaccttctggagtttcatcccctgtgccactaatctctgaattgctaaaatctttgcatttttgtctcctactctccactttatcaaacaacctgtcctatgtctctgtatagctgcagactcttatcagacctctcaaaatatcgtttatgacttcctcttccatgtggaggacatgagagagtgagagagaactgggatcttctgtacttttaatgagtgaatccacatgattgtaggcatctaaaatagggctctcaaactttagcaggtcacagaatcaccaggagggcttgttaaaacacagattcatggttccaccccaatgttttccattcagtaggtctgtggaagggcccaagaatgtgcatttctaacaagttcccacctaatgctgttgttactggtgcagggaccacactttgagaaccaccaccctagaggacggggaccaagccagcccactctcagtaaaatcccaaatgcagagggggcagattaataagtaccagggtgtgctgtcctcttcctcctctttctcttcctcatcctcctcctttatcgaggcttacctgatccctgcctcaggggcctccaaagaaaactctgacttagaccaatgtgtcccagattcaatgtcactttctataggaagccgttcatgaaccccaggattagatgttgtggcttcctatactttttcttgatagctatcatgattcacaatttgcaactgtgatttgtgtgatttcttaatctctgtttcctccagagaatgtaagctccatgaagacaggatatacgaatagtaggaaaaaaggaagggtttgggtggggaatggtggtgagtcacccttaggattgtgcacaataaaagagagtgaaacaacagattttgtccccaaagaataaaggaaggggagggaggaggaaggaaaaaggtggcctggaatatccattagaacgttggctgccaagtctagcccagctctctctggtgccaaccagaggtttgcctgctctattttggccacagagtgggcatttcatctctccacgcattttaaaatcctagttgtttctttttttagctctgagctacttacccgctctaagcctcagctacagcacccataaaacaaagaattaaggctccagggctgaagagacctaagtacaacacccagctctgctactgttgcatttccatgagtgcctgaattaactcctgtaagcgtcggcttccctcctgaaaagggtttctactcctaatcttgttgggacacttccaggaatcagggcacatgaagtccttagcacaatccctggctcaatgcacatgagtggccattgtcatcaccatcttcaatatcaccgtcctcctcaccattgtcaccatttctgtccccacacccaaggtttctgaggtctcaatgggataaaataacttcataaccatgaagcactgtctgaatgtcaagggcatccaagtgccccatcccctgcccacaagtcctggagtaacatccaaggatgccttccttccccaggacgctggcgcaggctcaaccccttgcaagcctttggtgactcttgattttacgacaaatacatcttttgtctcttctgttttcaggacttcaactaaccaactaaagaactgttccccagagcattgttcctgagaaggaaaagagtccaaacacctacccacacctgctttgtgccaagaatccacagttggattgcaaggacagtgtatgttgtccttttggaaaaatgagagtgagcccaaatgaagaacaagcaaaggtgtctcaagtcatcccaaggcaactagggggttgcctgggctgtgacggcctcacttctgcatgagactctctctctggcttttcgcattaagtagcttcctgtccttctctgtaaaacaaaatgaatgagctgggtgcggtggctcatgcctataatcccagaactttgggaggccgaggtgggtggatcacctgaggtcaggagtttgagaccagcctggccaacatggtgaaaccccttctctactaaaaatacaaaaaaaaaaaaaattagctgggtatggtggcaggcgcctgtaatcccagctacttcggaggctgaggcaggagaatcgcttgaacccaggaggcagtttgtggtgagccaagattgcgccactgcactccagcctgggtgacaagagcgaaactcagtttcaaaaaaaaaaaaaaaaaaaaaatgaatgaaggtataatctggcagggtgcggtggctcacacatgtaatcccagcactttgagaggccaaggcgggaggatcacttgagaccaggagttcgagaccagcctgggcaaaatagagagatcccatctctaccaaaattaaaaaaaaaaaaaattagcctgacgtggtggtgcatgcctgtggtcccagctactctggaggctgaggtggaaggatcacttgggcgcaggaggtcaaggctgtagtgagcccatgatcgcaccactgcactccagcctgggtgactgagtgagaccctgtctcaataataataataataatataaataaaaataaaaataaagagctggctgggcgtggtggttcatgcctgtaatcctagcactttggaaggccaaggtgggcagattacttgaggtcaggagttcgagaccagcctggccaacatggtgaaaccccatctctactaaaaatacaaaaattagccaggcatggtggcaggcaactgtagtcccagctactcaggagactgagggacgagaatcgcttgaacacaggaggcggaggctgcaacaagaggttgcaatgagccaagttcgcaccaccgcactgcattccagcctgggtgacagagtgagactctgtctcaaaaaaaaaaaaaaaaaaagaaaagaaaaaaagaaaaagaaaataaagagctatccaagtctcaggatcttaaaaggtagatcctggggtttaagcccacttattttacagatgaggcccagagagaggcaaacactttcccaaggatacacagtaatttgtaactgggccaaagctcactatagttaagtctttttgtttgaggtgactgagataatgccatctatgattttttcttttaaggcaaatgctgtgctgatattcctcacagtttgagacttgtaaaatgcctctcttccctgagtacccatctgtcctctactaccctcagggtttgggactgatgctctgcagttgagggacagtgtgcaagattggttaagaatggaggagcctgatttcaaatctcagcttggttagcttacagccatatgaccttgggaagctacttgactgctgtgagcctcagtttcctcatgtgtaaaactgggaaaatagaacttatgaggagttcttgtgaactaatgcctgtgaggtattatatttatagcagtgcctcgcagacaggaagtattcaataaatgctaatttattgaatttaatgacctccaagagagttgcttaagggcaaagtggaagtcaattgaatagtgggtacatcctctctgaaagcaaggctaaaactatgtaaaaaaaagcatcactggaaaggaagaaggaatccagctgcttaagccaagtggagtggctcactcgtgtaatcccagcacttcgggaagctgagagaggaggatcactggagcccagcagtttgagaccagcctgggcagcatagtgagatcctatttccctttttctgagacagaatcttgccctgtcgcccaggctggagtgcagtggcacaacctcggcttactgcaacctccgcctccagggttcaagtgattctcctgcctcagcctccagagtagctgggattacaggcactcaccaccacgctcagtaatttttttagtttttcttttttcttttttttaagacggagtctctctttgtcacccaggctggagtgcagtgacatgatcttggctcactgcaagctctgcctcctgggttcacgccattctcctgcctcagcctcctgaatagctgggactacaggtgccagccaccacgcccggctaatttttttgtatttttagtagagacagggtttcaccatgttggccatgatggtctcgaactcctgacctcaggtgttctgcccaccttggcctccccaaatgctgggattacaggcatgtgccaccgcacccagccgtgagatcctattccttaaaaaaacaaacaaacaggccgggcgcggtggctcacgcctgtaatcccaacactttgggaggccgaggtgggtggatcgcaaggtcaggagatcgagaccatcctggctaacatggtctctactgaaaatacaaaaaattagccgggcgaggtggcgggcgcctgtagtcccagctactcaggaggctgaggcaggagaatggcgtgcactcgggaggcggagcttgcagtaagccgagattgcgccactgcactccagcctgggcgacagagagagattccatctcaaaacaacaacaaaaaacaaacaaacaaacaaaaaacagaaaggaatccagctattagcaaaattcaaatgaattgtggatttttctgttattaaaatgtagagatatcaggatccctaaactcaagtaaatgacacaataaacaaagcatcaaatttgaagctgtgttatgatggtgcctgtgccagatttgggggaagggcaatacttggcttacacagatgctctagatcttgaagagggagagaggggcacagttctgcggcgacatgtgcgagtaccagagagagggccagttacttcggggtggagagtatatggagaatggaatgactagctataaaccagcttgcatggtgggctggtggaaacaccagtttctacatgacctctagaccaaacactctctagacaaaaagcaactctgctttgaatgaccttcaaagcgaatgccctgggccagtcccaagggttccttcccctcctcctactccgtctcctgggtaacaacattgtaagactgggaagaaaggaggtgatagcataatcttctctgtcatgttacagacccagggagcttttaagaaataaataccaatgggaaagaggtaacatgcattctctgcaagtactttggtaactcatagcagtgttttaactagactcgggaagttgcctggggatcagaaaggaaggcaaaaatgtgtgtggaatttgtcaaaatttgttaagcccatatagcataataaggagaacatctatctacaaaaacaaagttaaatcataaattatagctgagtacagtggctgacacctgtaatcccagcactttgggaggctgagggaggagaatcgcttgagcccaggggtttaagaccagcctgggcaacatagtgagatcccgtctctacaaaaaattaaaaaattagccagctgtggtagtttgagcctgtagtcccagctgcagaggctgaggtgggaggatcacttgagctctgaaggtggaggctgcagttagtgtgattgcactactgcactccagcccaggtgacagagcaggacgctgtctcaaaaacaagcaaacaaataattgcaaggcatatattttatttttagatcacgctttacttttttttttttttgagatggagtttcgctctcgttgtcctggctggagtgcaatggtgcaatctcggctcactgcaacctccgcctcccaggttcaagggattctcctggctcagcctcccaagtagctgggattacaggcatgtgctaccatgcccggctaattttttgtatttagtagagagggggtttcacctcgttggtcaggctggtctcgaactcctgacctcaggtgatccacccacctcggcctcccaacgtgctgggattacaggcatgggccacctcatgaggcgcctggcctcatgctttgctttgaactaggggaaccatcagtgcctctgtcgaggaagctcatagagaaaccagggacaaatcctagaaggctttacgctttcagccagggctctccatatcattttggttatgcactccatcagtaaaatatttttgtagacacattgtattagtctgttttcgcactgctataaagaaatggccctcaattatgtcataataacatcacacaagtatttcagttgaaaaaaaagaaaagaaagaaaaagaaatgcccgagactgggtaatttaaaaaggaaagaggtttaattgacttacagttcagcatggctagagaggcctcaggaaacttgtaatcatggcgggaaggcaaaggggaagcaaggcaccttcttcatacggctgcaggaaggagaggtgcagggtgaagggggaagagcctcttataaaaccatcagatctcatgagaacccactcactatcacaagaacagcagggggggaaccgcccccatgatccaactccttccacctggtctctcccttgacatgtggggattatggggactatggggattataattcaaaatgagatgtgggttgggacacaaagcctaaccatatcacacattcctcagtacatatattttaattattttgagattatatatctttataagtccacttatgcgaaatggccagaaggcaaattcacagacacagaaagtagattagtggttgccaggggctgggggaaggatcgaatgagaatggctggtaatgggtatgggtttccttatagagtgatgaaaattttctggaattagtgatgatggttgcacaaccttatgaatatacagaaaaccactgaattatacactttaaagggtgagtcttttggtatgtgagttatagctcattttttaaaaaatcacatataaataatgtgtacattataaagaatagccttaaaaagttatagggtgagattttaaaagtcgtaagtagactgaatgcagtggcttacacctgtaatcccagcactttgggaggctgaggcagggtaatcacttgagaccaggggttcaagaccagcttgggcaacatagcaagacactgtgtctacaaaaaaaaaaaaaaaattaaaaattaggctggcatggtggcccatgcctgtggttgcagctactcagcaggctgaggcaggaggattgcttgtgtccaagagttcaagtttgaggctgcagtgtgctacgatggcaccactgcactccaacctggtcaacggactgagactctgacttggccttttggagatgtctttgctaatttccacttctattggatttcctctccaaagcatgactctttctttggacatagtcataagcagagaaggttgtagttggtgacgaggtaccacttccagaccaggctccagggaatttcttctagaatgacaggctgccagaaaccttgactgggtgcagtagctcaggcctgtaacccagcactttaggaggctgaagtgggaggtttgcttgagcccaggagttcgaaaccagcctgagcaacagaagctgcagtgagctatgatggcgccactgcattctagtctgggcaacagagcaatactctgcctcaaacaaacaaaaggagaaactttatgacattttacctgggtttacgaatactctagaaatgtgtctgcactatgtcttggttctcagtattagggtgtttagcttcctaattggtgaggacaaaaatgagaccgacaatcctctgaccctgccttctttgaacttggcctttctctaggcgttcaagacccagctgttgagagtagaaaagcagaagaaaggacccgaggtcagcaagtgccctccccacaatggggcagatctgccagcgagaatcggtaagctctggtgtttctttctttctttctttttttgagacgtttttgttccatcgcccaggctggagtgtagtggcgcgatctcggctcactataacctctgcctcccgggttcaagcgattctcctgcctcagcctcccagtagctgggattacaggcatgggccaccacacctggctaattttgtatttttttgtagagatggggtttctccatgttggtcaggctggtctcaaactcctgacctcaggtgatccgcccacctcggcctcccaaagtgctgggattacaagccgctctggtgtttctttagcttctcagagggctcacatgtaccatagcctgctcaacctgctctccctggcagaggggtgtgttggggtccatcttagaggagggaaaactctgaccaagagcacagcaggaaagcgtcatgaggcaaggcaggagccccctcagacccagcctctaagtcttggtgcagcaggggccacttgtgttctgaccaagggaagcccagaggatcgttctgtatccccctggttaattgctttttagacagttatgctgtgaagtcatcagtgtgtgctggaaataggagtttggctttttcttctctaagagaagccccctctggctgaattttatattgccatgtaaaaatgggcttctgcccattaaaaaaaaaaattttttttttttttttttttttttttttgagatagagtctcattctgttgcccaggctggagtgcaatggcatgatctcggctcactgtaacctctgcctcctgggttaaagtgattcttgtgcctcagcctccctagtagctgaaattacaggcgtgcgccaccatgcctggctaattttgtatttttttgtagagatggggttttgtcatgttgcccaggctggtctcgaaaccctggcttcatatgatccgcccacctcagcctcccgaagtgctgggattataggcgtgagctactgcacccggccaattttttttttttttttttttaaattttaacagagacaaggtcttactatgcttcccaggctggtgttgaactcctggcttcaagtgatcctcccacctcatcctcccaaagtgttgggattacagtgtgagccactgtgcccagcccagaagcccgttcttacatcttaaagagctttgattctccccctggatgttgaaataaaccctggaaaatgtttataggataaattatgttctgagtagcgggctcatttcaaattaatctatgctgtaggtgggtccctctgaagcaaggactacagctgttccaccccgccccccaccaacagaacaatctgggaaattgagacacagtgggcttgatctcaaagacaaacacagtgctcatactaactgagtgccctgagcccagaacactctcagagccccatttaaatcactgcagtggcctggcctgtttgctttatgaagactttcccctggtcagcccttgggtggcaaattaattcctgattagtatctgaaagtggacaatacaagctcaaggagttgcttccacctcgaggcaagaggtgagggtcttgggcacgcctggggtggttatctttccctcagtcctacaagagtagcttacaatgccctcttcagcttctttgagaagggctttgcaaagtccagctcaggtgcatccctcctgcctcccagggtttttcgtttgtttgtttgttgttgttgtttttgaaacagaatttcactcttattgcccaggctggaatgctatggtgcaatcttggctcactacaacctctgcctcccaggttcatgcagttttcctgcctcagcctccccagtagccgggattacaggctcccgccaccacgcctggctaattttttgtatttttagtagagacggggtttcgccaagttggccaggctggtctcgaactcctgacctcaggtgatccacccgcctcagcctctcaaagtgctgtgattacaggcgtgaacctctgtgctcagcccctctcaggcttttgagaggattgaattctgtcctgttcctaatgcccaactggaagctctcagcctcattctcctttgtggaatccaaggctcctgtgtggttgtcagtggggagtggaggccactaaatacagaaaatcaaaattcctcttagccgttgggtctcttaggcctcttccttttctcctccttcaccccgcaaccagagtgagaaaagttttgcctgctctgggaaagaaggagcccttctaaacctggaagcttgtttgggatgtcattgccacctctcatggcccccttcttgtgcccctgcctggctttgccagtcccaggcagaatgccaccaggaatttaaagcaggccaggccagccttggagaggtggcacaaagcagccagtgtcacaggcgccatgtggcagtcagcaggtttggactcctgcacccagagttcagtgtcaatctgacgacaggccctctttggtgcttggaggtccagggagaggagcacaggttctgggatctcagacacagatggaaatccagcagctggacgttgatttggtcccatcaattagcccagagcagttgtagttcttattgcctggagcctctgtcaatccatgatctttattgtagctgctgccatttaccaagcaaatcctctatgcccaccactcccaaaggcccagtgaagaaggtgtcattcccactttacagatggggaaactgaggcttagagaggttaaattcctttgccaagcttgtacagctggtcctggcagatccaggacataaactcaggactctctcactccaggactgtgctctttctacccaccatcaagctcaaggctgaaagtgaggtgtgtgactccaaccctatcttcctaaggatagatatattttgagttgttccaagcttagaaactcatgctcgggatattgaaatttccactgttagtgtaaggaagggccaaaaattgcatggtccatttggtttctttctcataggtttcctgacaattccaagccccagagagtatttttccctgttgccttactattaattctcatgtaggcttggaagtatctgcaagccttcattagagccatttcagcagggagttggctatcatgggggtgtcagtgtaaggcctaggcagttttggctttgggcatgtggaaaacctgcctggattgttctggaagctcagactgtctatgggatgctattttttgcttccgtagttttcctaggaccataattttttttaattttattttttatagatgggatattgccctgtcacccaggttggagtgcagtggcacaatcatggctcactgaagccttgaactcctgagctcaactgatcctcttgcctcagcctcccaagtagctgggactagaggcgtgtgcccccacaaccagccagtttttaatttttttttgtagagacagggtcttgctatgttgcccaggctgttcttaaatccctggcgtcaagtgatcctcctgcctcagcctcctaaagtgctgggattacaggtatgagccactgcacccagcttaggaccttgattatgtgaggtaggacaagaagtgctggaaagatcatccctgccctccaggggagatacacacatggattacccctgattcttacagggactacctgcatgtccatgggctgctatgcaagcttccaggaacttcagtctccttccttatagagtgggattgccccttgtgctctgtcactctgggttccatcccttctcacccactaatagtggggaggaagaagaagagctaatatttatgctgtgctttctgggtctgggcactaagataggaggcactttacaggttgttattacagataaagggctgaggagggcctcagtattcgtattcgtatttttcccccagttttcccccaacctccagtgctgcagagatacctgcaggggtgagtggagattgacaatcagaatcctatgagatctccaagttgagagcagagtcctttgaagtccctaggcgtcaccaatatacttgagtttgggctacatctgttctgacttggggctccccagaaagtttgtctctagcagccctgagattggttgggaccaggacccaccctatcccctgctagtggtaggtggaaaggtggggtgaggctctaatccatctgattcatctcccctttcactggacaagactgatttggcctccactggctccagagcaggcatgctggctacactcccaacactcatttctggaggtgtgacttgagcccattaccaagcatttttattcacccccctgctccctatctggcatcttctgtatgtggggacgtttatcaactctgtgctccttgggtagccttcttctgtgcccagtgacacaggacagctcagttcccagcctcagccagatgccctgggcatgttaggcaggtgggctggtactcacatgtgcctgaggttcccagcctcagttcacctccaataggtctaggtttccttttccatgaagtattccagcaaccagaaagtcaagcatctaaacaggccagcttgcacatgatttttggagatactggaggaggaaggaagatatctccaagatatgtatgcactgtcatttctgcctccaaccttgaaacccttctctgtatcagccagcttttgctatgtgtgtggtgtaataaatcaccttaatacttagtggcttaaaacaataatctcttatttaccggcaatcctgtgagttggtaatttggactgagctcacctggaacggctcttctctgtcccatttactgtcagactggctccctcagaggtctgcaggcagcttgaggtctgtggcttctcttccacatctgaaagttgactggctgtaggcaagggtggtaactgggccatgtgccacacatgttcagcagaataactggggctcattcacatagtggtggttgcaagggttccaagagcagcatgggaagtcaagccccgaagcacaagcatatttctttcttttttttttttttttttttttttgagacagagtctcccactttggctcaggctggagtgcagtggcgtgatctcggctcactgcaagctccgcctcccgggttcacgccattctcctgcctcagcctcccgagtagctgggactacaggcgcccaccaccacgcccggctgattttttgtatttttagtagagacggggtttcaccgtgttagccaggatggtctcgatctcctgaccttgtgatccacccgcctcggcctcccaaagtgctgggattacaggcgtgagccaccgcgcccggccctgcacaagcatatttcaagtgtctgtttgcatggcattgctattgtcctatgagcccaagcaagtcacatggccagttctggagttgctgtgagtggagactatgtaaaagcatgggtatagggaggagaattagtgtggctgttttttgcaaacaatttaccacaccctccctatccattcagctatcatcaggaaaaaattcatatgagcttttctcttgattggcagcagcttccaaaatttgtgaggcaaaggaagttataaaaaagcagaatctgccaggggcagtggctcacatctgtgatcccagcactttgggaagttgaggcaggtggatcacttgagcccaggagtttgagaccagcctggtcaacacagagggactccatctgtacaaaaactaaaaaatgtggccaggcacggtgcctcacacttgtaatcccagcacttgggaagctgaggcaggcagatcactcaagttcaggagttcaagaccagctgggccaacatagagaaatcccatctctactaaaaatacaaaaaaaataattagccgggtgtggtggcggatgcctgtaatcccaactactcagaaggctgaggcaagagaatcgcttgaacctgggaggcagaggttgcagtgagcagagatcatgccactgcactccagcctgggcaacagagcgagactccatctcaataaataaataaataaataagccaggtgtggtgttgcacacctgtagtcccaactacttgggagggtgaggtgggaggattgcttgagcccgggaggtcgaggctgcagtgagccttaatcatgccaccgcactccaagcctgggcaacagagagagagagagagagagagagaaagagagaccctgtctcaaaaaaaaaaaaaaaatagcgaggggagggcagaatgctaactcatctttcgcagaccctgccaagagctggtcactgcttgatggccatgttgcctccttgctcatcagggaagcattgcatcttcagggtgggagacacagcggggcctgcggttcagtagggattagatgcctgtgctcccacagctcctctccaggcctctgccgcagctccggtgctgctgcgcttccattactgaccggcacatctgtctttcttagtggattgtgggctccttgagggccgaaccacggttgtctttcatcttggactctccagcttccaacacagtgcctggtacatttgtaagaacctagtgtttgtgtgaataaattcatgaattgcacatgactgagctctgctgcatttcatccagagaattggtaatcatgatagaatttgcttagacattccaaggttacttgtaattacttttgttttctgagcgtgattgattagttataagcatcaatatgttgtgaatgcaagttgctaaaatgcatttgtaacactttacttgtcctgtctttctctaaggctacagcagctgaaaaaccaaaacttcatctacttgctgaaagtgaggtaagaaagctatttttttttttatttccttctgtaacattttctgtaaaagatagtgcgtggcaatcccctttgggataatgattttcagccagccaagcagctgtgcagtggcttctccagggtgtggagcagtattgacctccaacttgctccctgctggactcagtacacctgaacagggaaggtgctttccaagggtgcctagtaacagaggcccccttcttagccctttcttggaagcagaatgctaattgtcagagccaaacacaaggccttcctgccttggggatgcatggtgtcctgattgtgagagaccctgggaggggaaatggaagggtctctcccctcccgtcttttccattttacagtcaggcatgccagaaacttggcacccatctgctctgcacttcaatatggacaagtttcagatctttcctgtcgacatatcccatttagccccaaatcaaagagtttcctgcgctgtttgtgctgacctaccctcttccctcccattccccaagcacacagcttactatctctttaaagtggcaacagagtggatctgagatgggttgcttcatgcgaaggtggtgaggtgtacactttatgaatcagcttgggagaaaagcacagaaactctcgatttcccctgtgtccggggccattacctagtcccaggtgagggccaaagctgggtgtggattcaacctggagccccagagctctgccctgctcctcattccactgattgcgtagctttattcttgttcttttgaaaataaataagactcggtctccagcctcaaaagacttaatgactgagaagtgaagctcaatattttttcaaaagagaaagttacaacataggtgaaacgtgctttaagagctgggtgagggagtggtcaaccccgtcttgggtccagataacaaaggctggatagaggtgatgagatttgcagagagtcttgaagaagaggaaagcatgtgtcaggcgaggaagggcatttcaagcagagagagcagcatgtgccaaaacagagcctgcaaaaatgggaaaaagctggggagactgaggaggttggatgggactgggattggttgtccagttgagaaactctgacagcatggcctgaaggatcctctaggctgaggagtcctgtgattacattgttttctgtctggcagtagcaaggagcttgagctggaggaagccttgggcatccaggaaaccagagagggggtagggggcataagtgtagtgagacctccaggatgtgtgctgtgcaagatgatctacttcccagtgggaagaaagtacagttgaccctgaagcaatgagggggttatggacactgaccacccccacatcatgcagtagaaaatccatatataactttctactcccccaaaaccaaactgctaaaactactgttgaccaaaagccttactgataacataaagtcaattaacaaatattttgtatgttttatatactatattctgtattcttacaataaagtaagctagagaaaagaaaatgttattaagaaaatcataaggaagagagatagatttactattctttaagtgggagtggatcaccatgaaggtcttcatccttgtagtcttcactttgtgtaggctgaggaggaggtagaggagggcttagtcttgctgtctcaggggtggcagaggcagaagaagatccaggtgtaagcaaactcctgcagtgcaaaccggtgttgttcgagggtcaactgtattacaattccattgtcaccaactttttaaagacaaatcaacgttggtggccttgcaggtacccaggactctcacaatgaggaggggttgatagtggccccctcctttatttcctagaccatctttagcatattctgaagcatcgcagctttagaattgcttggttgaggccggatgtggtggcttattcctgtaatcccagcactttggaaggccggggttggcgtatcacctgaggtcgggtgtttaagaccagcctggccaacacggtaaaaccccatctctactaaaaatacaaaaatttagccagacatggtggtgtgcatctgtaatcccaactacttgggaggctgaggcacgagaatcgcttgaacctgggaggcggaggttgcagtgagctgagatcctgccactgcactccagcttgggccacagagtgaaactctgtctcaaaaaaaaaaaaagaaaaaaaagtgcttggtcgggccaggtgcggtggctcacgcctgtaatcccagcactttgggaggccgaggcagatgtatcacctgaggtcaggagttccagaccagcctggccaacatggtgaaaccccgtctctactaaaaatacaaaaattagccaggcgtggtggcaggcacctgtaatcccagctactcgggaggctgaggcaggagaaatgcttgaacccaggaggcggaggttacagtgagctgagatcatgccattgcactccagcctgggcaagaagagagaaactccatctcaaggaaaaaaagaaaaaaaaagaattgcttggttgaagtagtcttacgtatcatgttatttgggtttaattagactgatcctcacaaaataggcaagtggttttaaaagatttctgcataaaaaatgtgggttgagacaggtgtagtgactcatacctgtaataccagtgctttaaaagaccaaggagaggatcacttgaggccagggtcttgagaacatcctgggcaacatagcaagacctcatctctaaaaaaaattgtaaaaattagctgagcatggtgatgtgtgcctacaatcccagctacttgagaggctgaggcaggagaattgcttgagtccaagagtttgaggctgcagtgagctatgatttgtgcccctgcaccccagcgtgggtgacagtgagaccctgtctcttaaaaggaaaaaaaaaagtagaagcttttgaagctaacacaaatgaacaatgagaaaataagatggctgataattttcctacccctggtacagactattcagctacatcatggggttgaaagaagataaagatcttattagatataatgccaagtcagtcaaaaaattaaaaattagcaggctatttaaattctggctttacatatgatattgttaatgatgaactaatcactatgtgtacagagtgccttgagagaattagctaatgacactactaggccaccaaattttaaaatagttcatctttatctctttatttatttattttttggaaacagagtctcactctgttgcccaggctggagtgcagtggcatgatctcagctcattgcaacctctccctcctgggttcaagtgattcttctgcctcagcctcccaagtacctgggattacaggcgtgcgccaccatgcccgacctatgtttttattttttttaaatgaaagtataatttactaccagtcaaacacacaaattctgtaagcttaataagtgtgttgttgttgaaacagggtctcgctctgtcatgcaggctggagtgcagtggtgcgatcttggctcactgcagcctccaccccgtgggctcaagtgaccctcccacctggtctcccaagtagctgggactacagccatgtaccagcctgcccatttttttgtttgtttgtttgtggtttttgtttgtttgtttgtttgtttgtttgagacggagtctctctctgttgcccaggctggagtgcaatggcgtgatctcggctcctgcaaccttcgcctcctgggttcaagcgattctcctgtctcagcctcccgagtagttgggattacaggcgtgcgccaccaggcccagctaatttttgtatttttagtagagacggggtttcaccatgttggttaagttggtctcgaactcctgacctcgtgattgcccagctcggcctcccaaagtgctgagattacaggcgtgagccaccgcgcccagctttgtttgtgtttttttgagatggagtctcactctgttgcctgggctggagtgcagtggcgcaatctcggctcactgcaacctctggctcctgtgttcaagcaattctcctgcctcagcctcccaagtagctgggattacaggcgcctgccactacacccagtaattttttgtacttttggtagagatgaggttttaccatgttggccaggctggtcttgaactcctgacctcatgattcgcctgccttggcctcccaaagtgctgggattacaggcctcagccaccgtacccggcctatttttaattttttttttcagtagagacagggtcttgccatgttgccccggctggtcttgaactcctgagctcaagcaatccacctgcctcagcctcccaaagtgcttggattacagatgtgagccaccatgcccggctgtttaagaagttttaacacacgtatacacctatgtaaccgttgcccagttcaagatatagaacattttcatcaccccccaaaatcccttcacagtcttttccagtcaatacttcccatttcctgtcctgacagtatcactattctgacttctatcaccagagcttttccattcttgaacctcatataaatataatcatacatatgtactctcttgtgtctggttttaatattttaatgttgctgcatatatcaaaaggttattcctatgtaattttgttttttgcttttttttcatgaggcattttatttgtaaatatgtataacatctctagaaaaagaatcccaggattttccttcctgtgtgttttcgtcttgcttctttatggtccatgatgccagctgagactgtcagtacaatgaaatcaaactggccagatggaagcagattattctgcatttctctagatctttgagttgcacatcaaatctggggctgatcatgccacacttgtttagactgcctgtgaggttcacaacaatttgcctagctctgtgatcatccatgatttcaaattcgccaatataaccatgcttcatcatcacagtgagaaaccagacgatgactttggagcatggcctaagaacctggtgtttgtctctcttttcagcattgttgatgctcttgagagcatcagccaggacattaatgtgcaccactgtggtggcgtggaaagatggcaaaaagagccctgcatgattttgtacgtagaaaatcctggaatacccacaaaaacctattagaactaataaacaatttcagcaaggttataggatacaaggttaatatacataaatcaattgtagccaggcacggtggctcacgcctgtaatcccagcactttgggaggctgaggcaggtggatcacaaggtcaggagttcaagaccagccttggtttcagactggtgaaacccagtctctactaaaaatacaaaaattagccgggtgtagtgttgggtgcctgtaatcccagctactcgggaggctgaggcagataattgcttgaacctgggagatggaggttgcagtgagccgagatcacgccactgcactccagcctgggtgacagagcaagactccatctcaaaaaaaaaaaaaaaaattaaattgtacttcttctataaaattgcaatgaacaatataaaaatgaaattaagaaaacaattcctggctgggtgtggtggtgagtgggtcacctgaggtcagaagtttgcaaccagcctggccaacatggtgaaaccccatctctactaaaaatacaaaaactagccagttgtggtggcacacacctgtaatcccagctactcgggaggctgaggcaggagaattgcttgaacctgggaggtggaggttgcagtgagctgagatcacaccagtgtactctagcctgggtaacagagtgagactctgtctcaaaaaaaaaaaaaaaaaaaaaagaaaagaaaacaattccatgtataatagcatcaaaaagaacaaattacttaggaataaacaagagaagtatagacttttactctgaaaactacaaaggattgttgaaagaaaataaagaagatctaaattaatggaaagacatcccatgttcatggattggaagacactattgttaaggtggtaaactccccaaattaatatatagattcaacccaattcctatgaaaatctcagctggcttctttgcagaaattgacaagctgcttctaaaattcatatgaaaatggaaggggtgccgaatagccaaaacaatcttgaataagaagaaagagaactcacatttcctgatttcaaaattttaaaagcaggctgggtgtggtggctcacacttgtaatcctagaactttgggaggccgaaacaggtggatcacctgaggtcaggagttcgtgaccagccttgccaacatggtgaaaccccatctctactaaaaatacaaaaaattagccaggcgtggaggtaggtgcctgtaatcccagctacttgggaggctgaggcaggagaatcacttgaacctgggaggcagaggttgcggtgagctgagatcacaccattgcactccagcctgggcaacaagagcaaaactccatctcaaaaaaagaaaaaaaaaacttataaagctacagtaatcaagacaatgtgatactaacattaggataattatatagctgcatgaactgaaattgagagttcagaaataaacccttacatttatggtataatgatttttttttttttgagacagagtctcactctgtcgcccaggctggagtgcagtggtgcgatctcagctcactgcaatctccgcctcccgggttcacaccattctcctgcctcagcctcccaggtataataatttttgacaaagatgtgaaaacaattcaatggggaaagaaaagcctttcaacagatggtgctaagactctgtctctacaaaaagtaattttaaaatttcctgagagtggtggggtgcatctgtggtcccagctacttgggaggctgaggtgggaggatcacttgggccctggaaggtcaaggctgcagtgagctgtgattgatccactgcactccagcctgggcaaaactatgg

SEQ ID NO: 608 - DNA, 32744 bp, Homo sapiens
  source 1..32744: mol_type = other DNA
ttccgcattgaaggggctgctccgaatggagggggaggggaggtgtttaggagaaagtaggggctgtgggtgtcgggagccggctgacgggtggacaagggggggttagcagctgggctgcgaccgttagggaggggctcaaggtgtgcatgtgtgagggaagagagagagagagaagggcgcctcagaggtgactttcagcctgcgagccttcttcccggggcgccataaacgcccccaatttcccagctgctaaaggaagaggaaggtgggtctcgctggcggcttgaggaggggcggggttgggcttccggcgaccccctggatgagtgtgtttcccgctctcgctggcccgctgtgtggtctcggaggcggaatttgggcttctgaggagcgcagggcaggcggggcgagaatatgtacgggaagggtcggtgccctcccttgggactcccgcgccggtgcacgggtctgcctctagccggtgaccccttagtgtccgctgcgggggaggggcagcgtagccttcggcccctaccgagaaaaagctgcggccgggtttcactgctcgaggcgggaaggcggggagctgaggccccgaccggtcggccagccagagcgtggaattggtagcgcctcctagtcccaggatgtttatggctggtgaaaatggttgcactgcccccgctggccggcctcgcccgcctccccgacccctgcttgggcgggagccgctgttaaccggggttttcgggggaggcgtttggggcctggacggcggcgcggggagggggcagctaggggcgcggcctgccagtgcctcctgcagtacagccctggagggcgtggggacttgggggcggtgaaatagccgctgtaggtccgcctctttcattgaagaaatttaagttcgtgtggttttaccttttccgggagtctccagctggccctcatttgtgtccggagctcaggagttcccaaaccgactcagtcgcaccaagtttccgtcttttggaattggggaaggagtttctttctttcttttcttttttcttgagccagttttaatcgctttgaataaatactcccttaagtagttaaatataggaggagaaagaatacatcggttgttaaagcaggagaggaagagagacctgccctgtagcgtgactcctctagaaaaaaaaaaaaaaagccggagtattttactaagcccctaaaatgtcgagatttgtacaaggtaagaaatgctgctgcttatatcccgagttgcttcaggcaaatttgggtactgacagtggagaggttggtgggtggtttggaagtggaaatgttcatttgagataacatttgcgaaacccttttcgttgaattgtcatctgagctgccttgagctgctgggttgacgttccagacgcgtataatttatgctcctgtaccctgctgggtttagttttgcctccctgaaatcaggttagtagtaccgtcgctttcctggatagtggctgtaagtgataaaacaggatttttggctgctaattaatccttgttctcttttcctggtctgtgtcaaggtacctgtgcgtgcacgcagacgggaagggctggggaagcgggaggactgagaaaagccgggtgggttttgccgggactgttggggaagctttagtgttctccgcttctacttcgtttgtgtgtacgtggtttgcgtctcagattcacttattgcgaaactgggagtagcccgaagaagctggaggtcatttcagctggagaaatgactttgctgcattgctgtgtttattttttccttttttgaactatgaaaagatgattaaggttcctttgaagtttgaaaactgctctctaaattccacatgtgtatttaaaaagggttagggaatgcctcaactgagattatcagtaacgtgtatatgaatgcatgtgtgtacggtgtactcactgaaattggtgctggcataaacctttgacaccagtttgtagcatgagatttgccttctggtatgcaagtaaactctttccttgtagactccagtgtgtgaaagcttcagccatcttgatgaacacacagctagtaaagttcacaaacacttattatgcttcctgataaatgtaggtgtacttttggaaaaaaaaagttgtgtcagtaatggccatcatttgaccctgggaataaaaatgccctactgagttctacatcgctttattaactcttctttaaattttgtgtagtagattaaagtaagagaattcgactgcctgtgttattatcgaaacagatcgaacgctatgcttgcctttagcgctaagctcagaaatgtcacttgttattagactttcaaattcatgttataccttatatgtggtaagagatgcttatgttctgattgagtaaatgtcttattcaagaatagaaaggcagaactgttagaaacgtactggttttgtaataacaatattcagttaccataaaggcggtattttgcaagaatatgctaggtaaaagtggacaagttacttctctttaaaagttagaaatattaataaacccaaggtgttccatgtagagttatgctttagaataggttgcagaattggcaagcattgactgatttcacagcctttgctgtaatgccaacttgtcctcagaagattcaaaatcaagtggtaagagttgctgtgtatgtttgtcattactttgtcatccactttttttaaaaaaactttttatattttggaatacttcaggatttatagaaaagttgcacatttgtcaaaactaagaaattaacataggtacattactgttaactaaaggctttgttcagattacagttcccatgattcactctaagataccagattgcacttagttgccagccactttttttcttttttctttttctttcttctttttttgtcaaggtcttactgtgttgtccacgctggagtacagtgggtattcacaggaacaatcatagtgcactacagcctcaagcccctgggctcaagctgtcctcctgcgttagcctcctgagtagatgggacttaggcatatgccatagcctatagttgtcatacatttttactttaaatggtagttttccttttaagatgggcagttttgcacaagaatatgacacctcctcaaaattttttgacatgaatgtgctcctgtttatcattgtttaaattttgtacagtgtgagccctctatatgtttaactctgctgctgttgtaaatgataaacctaattggcaaatgacacagctgtctccacaaaagagctttcaagtgtaagggttggaaattttggttttgattatttttttaagcaaatcaaattctttgatctttgctgcagaaaatattgatatttccaatcactggcacttagtagttcatgctccttcataggggaaagagttaacaaatgttaggtttctaacttttttttttcatgggttttctcaagctttataagagtcctgagatgtagattttttatcctgcccttacaggtgaggaaagttaagtatcttgtccaaagttcacagcttgtataaagcactgattgattgatagattgattttgaggcagggtctcactttgttgccaggctggagtgcagtggtgcgatcacagctcactgcagccttgatctccttggcttaagcaattttcccacctcagccccctgagtagctgggactacaggtgcacaccaccatgcctggctacttttctccttttttaaagagacaggctttccctatgtttctcaggctggtctcaaactcctggtcttaagcgatcttctagcctcagcctcccagagtactgggattacaggtgtgagctgctagtgcacagcactgaaattcttacatgagtgtgtctaaaaccctagtccttcccgacatcttttgttgcttctaacattaacaactgtggaaatggcctgtttctccagctagactgtcagttcccattgggcaaagataatattatatccttgggagaaatacagtgttttgtaagtggacgatactctaaatgaatttgtcatggatgacaaatgagaagcccacagcttagcattttccatctactatttagtagcttatcttacatttttggttgtagtttttataacacctcttagattatataaatgttgagaaagatggaaaggtacagacttagatttgaataccgttactagcaggtgatcttaggcacatacctttcaaacctcagtttcttcttagataaaaattgggcagtaatgcttatgcctcagggttattgagaggctgaaatgagatgaactatgtggatgtgctaggcacatattaggtagccagtcaattttacttttctttcctgaaatgatggtggcctttcagatagcattgccacccaaaatataaccacatgtcatcaacagaactaaaagaaaaaaggcaggtatgaaagttctttattttcctattccaggtttcatgttcaggcctaggtgttattatgttaaaaaaaaaaaaaaaaagtgccggggtggggcaaggtaacgtttggacaatatgaatttggttgtagtttttataacctctcaacttgagtacaagttggtgacggttttcttctgaatacagtgaacaaaattttttttgagctcttactatgtatgatgtactgtattaggatttctggcatatcccttatggtaggcactgaagttcagcagatctgggcattacacctaagtgttgtgtacacctgttttgaatgtagtaggatggttgctatacttggcttgtatctccttctccaaatcctaggcattgtgccttagaggaaagctgggtatctccatcctcaagcatattgaccgtaaactattaggtggaaatgttcaattaataaaaatattgaggtaggcaggagagttcttagtatatatttcttggtcaaaaaaaaaggttcacgtttctttggtcacatccccaagtctctgtccctcaggcacttaacattccttctcttaggaagacctttctttactggatctgcagcataattcctagctattctgctgttgggtcaccttctgcctacttgtgacattccttctgctcttccttgctccagggattgttccagggcccccagttattctaaatggatgtgagtaccatctcttccctagctgagtgagaaagggggctccctgtcatagtttaaggtaccaggggcgggggtcatcagcagctgtgggtttttgtcaggtttgtcagtgggtgccatttggaattttgcttttaaaaagttctgagagttatggggtaatcactctaaatgttttgaaacttaataaatagtgaagagagtaatgttgtctagccagctaaggctataatggatgctaatgctctaatattagaggcattgtttttttaaaaaaaatgattctaaatgtgccattatctatctaaattatgtaaaaatgtccctgatgttcttaaattgaggtacatacttacatttcagggaaagtcatttaagtacctctgtcacttaaaaaatgcttgaggcctatcagctttcccatttgttaaaattcttttcataacttttttggtgactcctatttgatagatggcagctagccagggaagattactgagctaattataactggaggggtctccgaggaatacagagatgagaagcattctggggcctggttcttctcaaatcctaaaaccaaatttagcctgttgctgattatttagatgatgaggacacttttagcacagggatagtggcatggatttgagtgaggacaagagccatgaaaataatgactagggcatacccctcattttttaaagatctgatttaagatttattatattatttgaagagaagggtttagttaaattcagtcacagttataaatgtaaaaaaaaattctaaagaaatttaaaatgaagagttgagctgatgaaaagtgctgttttccaacatggaccttgtaatctctgtggttaaattgtccgtgttcttgctaactcagcctttcttctaataagatggatgattttcatttgtgaaagtctactgaggaaaaaaaattgataagggacattagagaaattagaaatattaactggtactctttttgggagtgccattttaatattctgaataaattgaaaaatgaccttaaaaggaaattcaggtgttattttagtccataggtattttcttgtaatatgtttcacagagacccttccctttgttggtatgtattatttttcccttcatagatgaattatagcaagtttaattaaaataatgggatacttagattgtgtgaggaacatcagttggcctaataatgaaagtgtttcaaataaaagaaatatactgtagtttcctagttcccaccaagctttttgcagaagtataggctttcatgctcgtccgtgtgaagagaccaccaaataggctttgtgtgagcaacatggctatttcacctgggtgcaggtgggctgagtccgaaaagagagtcagtgaagggagataagggtggggccattttataggatttgggtaggtaaaggaaaattacagtcaaagggggtttgttctctggcgggcaggagtgggggtcacaaggtgctcagttggggtggttttgagccaggatgagccaggaaaaggactttcacaaggtaatgtcatcagttaaggcaaggaccggccatttacacttcttttgtggtggaatgtcatcagttaaggtggggcagggcatattcacttcttttgtgattcttcagttgctttaggccatctgggcgtatacgtgcaagtcacaggggatgcaatggcttggcttgggctcagaggcctgacataggcattatgagttctcagaaagttagcaatattaattactgaaaagttaacataaacagatatttgaaagtcaacctggattatctgtgaaaatgaagaagagtgtgttaactttctgtaatgccattcatcctgatatccagcatttatactgttggagaaaattccagcaatatgaataaattagtagggcaagttctctggcttggggtttaatggatgagaaaatatgattcagttactacctttttggttggatagaatctctttagaagacagagtttttctaaagactgttgccgttttgacatagcctacaatttcttttctaaatatcatattttgaacttggagtaatagtgtttgaaattgtggccatcttggtcttggtaattgaatggattgtcccaggcacaatgactattaactgaaaccatacttcttagatatttatttatttattcattgagacggagtcttgctctgttgcccaggctggaatgcagtggtgcgatcttggctcaccacaacctccgcctcccaggttcaagtgattctcctacctcagcctcctgagtagctggaattataggtgcacgccaccatgcccagctaatttttgtatttttagtagagacagggtttcaccatgttggccaggctggtcttgaactcctgaccatgtgatccgcctgtcttggcctcccaaagtgctgggattacaggtgtgagccactgcgcccagccaattcttagatatttaaaattccactgccaggcacgtgtccttctattaataacaagttctttgaaagttggctttatgaagctatcaaagaaaattaaactttgtgtgttttttgattgggtgacttatgtgtgagaaaaaagataatactctgtttgaaagctgtttcccagttttcttgattggtgatgcaggcatctcctttaatttgttgcacagtaattgtctaagactcaaatactgcctctgccaacagttccgttgtttatttttctcagtcattaacaaatgaaatcgattgtgcccccaatccattttacaattaaggattgtttttgagaaacatggagaaattggctatgttgtctcgttaatatacataaacaataaaatgtttcatttccgtaaacatttttagatatttctgttagttttttctgtgtaaatcaagagaattgtttctttgtgatttcgcttgtgtcctaaaaaacaaacaaaaagccattaattgtcttcatggaccagaaattagttgtattatgcttagtctcctttttacttgctagtcaacatattgtaaaaatactattttaggggatcctttctttgacagtagctcttcttgctccttggccacaatgaaaatgtgattggagtttgtattttcttctatttgctgctctggcagaagctgatgtaatatttcatttgtgttatatgcctgcctagaattttaaaacttccaaagagcacaagaaaacagaacaacatagttatatccactgttttgggttcatttgtgctaatggtaaaatgctttgccttggtaataaaatatttatggaatgcataaaagcattcttcgatttttttcattgcttagacaacacagtgtataaggaagagttgaagagcatgagatgcagtaagaaagtattattctaattgtagttttaacctcacatagcagacatagttgagctgccggttttcattcagatttagtggcaaacacctggaggtggtaaaccatgtaaatacactgtaactgagaaaggagagaccttgctccagaagaatgagaaacagggcgccaggcaacagggtttgagttccagcttggcattgtgtccttaggcaagtcagcatctctgggcccctgtttctttatctccaaaataaggaattggactcactgaccttaaagccgttctaagcataaaagtttctctaaatgcacacatagcaagttacacggcaggactaccggatcattttttggcttttcatcgtgattttatgttatacctctttctcttcttctcaacaaaggagtgtgaggccttttgtgatgactttcttctcatccattaaacataaaacaaagtggtattatttaacaaatctcttctgaatgttctgttttccataagtagtgttttctttttcctttgagattttaagagctactctattgtataagagtagggttaattttaattgttaatcagaagactggtttatatataaattgtagcagtttttttttaagtaaagcaatgcatgattagcaaaaatcttttttagcgagctgctctgcatatttgttgctgcaacagttcttgaaagcctgatatccttttatttttgttatcaaaaagcatttattaaccattcatatgaatgtaaagctgagtcatctaaaaatatatctcagtgtagtcatagttgacagtctaataactttagtatgaaaagatcatataaaattatgtaagatgcaacttaattgaatttacttttcttaatttatcattgaatgacatggaatattttttctatatttttccctaaattaaactaaatgtaaacatataaattgcccaattttgtttaatctctaaagttagtgaaaacattacattggcatttatattggttaataaaattgaaaagaaatttagtagtcatttgtctagactacctatctgtgtgaaacttctttgaccatatccctgatacttgactaataaatcagcctctgcttgagaagccttagggactggggcttcagatacttatgacagtctatacttatcttaactctgcctttctgtgaccagacatcatggctcttgtacagtttcactttgggcttactaggcactacctacactagactagactttgccttctgtatacccagagcatagctggatcataataggctcttactcatttaataaatgttacatgagtatctactatatctcaggctctgtgtttggcagtgggaatacagctgtgaacattacagacatatactttcacagaatttacagtctgttggataagataaacattgaataaatttttaaaattatgatgttataaaggagaggtacaaggatctagcatatgagcatgtaataggtaacttagtttagaaagatttctaggaggataatctcaggtaatatttaaactgaactctgacaaatgaataggagctattcaaactactattatatgagaatttaagtcctgatctacagtttagttacataccattattaggcacctgtactgtgcaaggtgctaaggtaggttttgggaaaacaaagttgcatgacataatgtagttttttccccctcaagagaatatgttctaggattgcagacatttaactaaagaattggggttttgaggggtgtttgatataatacagagacaggagtgattaaaactcccaaatcagttgtggtagaaagaaaggcctcttggaatgttcagaagccactgcttagaacactaggaataccaccatcaaaatgacagaagcaaatcaagtaaaacagtttgagtctttggggattgagagatcagggcggtttcccagagattgggatgattctcattattctggaactcatactgggccattcttatttttctactttttttctcatttctgcctccccttttctgaaagtgttgagtggtatttgaagtgcatggtttcgaacaatcttatagttaggatgcttttaacttcatggagtagaaaaataccaattcatttggctttcaaaaatgagggtctttttatcccataaatcctgaagtaggatatgcagggttggttaattcagtacaaaagcttatcagaccttccttctgctgtgctatctttgacatatctgcctcattcttgggtcagcttctttcaagggcactaatcatggcagaagaaacgtggggtgattggtggacacatactcattatgtgagtagaaaaaatactatcttttctcatgtatgtcttttttcagtgaggaacacctttctccaaagtgctgtgacagattatacccttatggcttactggccagaatcatattacattttatgcttaaaccaatcactaggaaggctttggaccaatctgggcctggtgccatctctgaaacacagggcattggggcagggagttggtgacagaatagcattggagtagcaagaaggatgaagaatatggctgttacaaatatgttaagataaatggagtataatctaccagagctactcaaagccatactggcaatgtttggttattagatatgcatatctttcccaccccaaacctactgaatcagaatctctctgggagcttacccaggaatctgtgttttaaccagcctccaagtgatttgtatgtacattaaagttttagaagaactattctagatgtcccaaatggaataggaaattgcagcctttaggcagtctgctttcatactttcattagctttggctactccaaaagatacttcagcttggcttttgagacatgcctggataaggaatttgtatttatttccataggcaatgagaatttcatcaaacaaggaagagaagtgatatgatgggggttgcagcttaaggagatcaatccatcctccttggcactattagattagagtgatgggcagactagttagaaagctgttgtcatgactaggagagtaaaaatgctaggggaactaaggtagcagtaatggaaatggaaaacagtgaatggaattacagcaatcatttaagaagttttgatattgcattgtccaatgtgaggggaaaggtgggaagagccaactgtgactgtgaggtataaaccttagtttctacggaaatgttaatgccgtggagaacagggtgggcaaaagagtaatttagtttggatgatcagtcatattttggacatgttgagtttgaggtacccagctgggtatccaggtgtcagaagtctttaaggaagtaaagaatgtgatcctggagctcaggaaaaaagtttaggatgagaggcacatgtttgagtgatcagtaaggagagtggcatgagaattgaggagaaaaaatggtctggggacagaattttaggaatctcaggagaggaaaggaggagccagttagggaaactgaggtgtggtcagagaggtaagaaaagatataggatacacttgagtaatggaaccccataaagagcttttctaggaggaatattcacaaataactgggtttaaaggactgtagtgagcccagaagaagctggttagcttgaattggttgtaaatctagccggcatagttcatatttccttgaaataatcaagatagctttatcttgattatttcttgattatgtcttgaaataatcaagatagctttatcttgattatttccagttgccattaaattcttggagttctatggttatttggatcacaagtcatttcccgatttaagattaagtgcgctctccaattctctgactttgagtatctctcattgtgggttttccaggaaggttgggactgatcagacagaggtggcctagggatggctcttcaacttctctgttgctcttggtgccttccctgtggtttttccatggcctgtgcattatgaaactagcttgtgtacttattttgtttgcgccagtgtcagggtgtcagggaagggtattatgtatccctcttacttgctgaaatacatgaaatgagatccatgaattaagaaacaaaaatattcacttgtcagattgactgtagccctctctcttttttggctccagctggataaaaaagcccatgatgttgaaattttagttcctatgaacaggaagaattaggaaactgggggaaaggaggaacttgtgaaaaaaagttattgcctgttctatctgaaattgacttaaagtgtctagtaagtccagttttatgtggtggggaattatcttgtctgttgattgaacataagaagaggttctgatataaatgcttttggaggagagtgtggtatttagggatttttgcgtcaaggttaaagagagccaggccaggaaaaaaacattagcaaggtatttctgcctcactgtggtggaatgggactaaaaaaacatggctttgcttctgggctccaccattggcctgctctgtgaccttggataagtcattcaactattttcaacctgtttcctcgtctgtaaaatgatgagagtaggttaaatgctccctcccatctataaaaatgtttgactaaggtaatgaaatgtttgactcccaatccactctatgtctaaaggcgtggggaatcaattttatattgctaggcaatagggacaaaacacttcatgaggttagaaatcttggattattcagaggattttagttgaccttcctttagaaacacaactgtccttgtcagaagtgtaacctgagaatgttaaatccaagaaagcttctaacatctgtactacttttcctaccagaaatttcagacctttcttaaaaaattcaggatggatgaagaagtcaccactaagggaaatggttccctgctctgtgcctcctggtctgtgcccagatgcttaagatagctacgcttcttgtctaagcactcttccttattctttattcttgaatattttttattcgttacaagcccttcctgattctttaatcactaaaaacagagcttttagaggggtagaagaggtgacaggcttgttgtaatgttcttttgtttaagccgattatatttataaagagggtggaagaaaacaaattattcttcatgtgcattggtgctgtatcaaacaaaagaaagaaacaaaggttagagacatttctcgagtttgatcctgtgtctgggattttttcaagtctgcctctgaaacttagacctgtgttgacagagagcacatgcaatattaaatgtgagtctttcagccagcctttcttagcttgggttgataggatagtgacttgggttctgtgtgttttgaccttaaatcatgtaaattaataagttattgttctgcagagggagcttctaaaatgttttgttttgttttcaaatggttctcatttagacaaatctcaaacagctactttagttacttctaaactttgtagttacatttagttttatcttatatgttgtctttaattctatctgtataaatgtcttttattcaaatataagtgaaagaatttatagtaggtggagtatataaggggaaagagtttttagccttactgaaatgtgattctgctaaattaacaggcatttgtaaaaataactagttatcaaactatttgaatagaaactttacaaatacatttttaaaataagattgaatcaaatactaaggatagaaggggaagggtggacaaataatccagttgtccctattttatgagaagtaaataagatgattactttctagataaagtataaaacagcctgtgttggtatttttctgccaaagtgtttgggtctggggtgtttctttttctgtttttttttttttttttttttctcttttcttttctttttgagacaggatctgcctctgtcacccaggctggagtgcggtggcgcgatctcgcctcactgcagcctctgcctcctcggctcaaggtatcctcctgcttcagccttccaagtagctgggaatacagacaagcgccaccacacctggctaatttttgtattttttgtagagatgaggttttgccgtgttgcccagcctggtctcaaactcctgggctccagggtctacccgcctcagcctcccacagtgttgggattgcaggcatgagctgccattgcccagcctttttctgtagttttctatttttgttgtttgtatttatctaagagggatttccgtcacctttagtgagatccatctgtcacagaagtgcccggctatgccaaaagcattaaaagtctagtctgacacacgtaagcagtggaaagtcttggctgaaattgggaaccagaagatggcaggcagccctatgcccttctccttttaaaatgaaaacgtcgatacagggaagtagaggcaccttggaattgccaatacctctcaaggggttcttgtttagtggagaatatgaaactggagtgaaacgagtcctaactagttgacaccactgaattactgccacaggataaagggaccttgggattgagcccttttcatttgctgaataccagaaatcagttatagcttaccagctgtttgaatggcttcctggagttttcagttggtggttttatgtttttgttttaagatcttagcaaagcaatgtctcaagatggtgcttctcagttccaagaagtcattcggcaagagctagaattatctgtgaagaaggaactagaaaaaatactcaccacagcatcatcacatgaatttgaggtaaggaggtttctacagtgttccacccccccgcccctcccttcatctgtcttcatgctgagttgctgccggtgatgatgataatcatcacctcaaatcagcacaagatgtacgataacatcaaaaacaaaaaaattagaattgcttaacaattaccggcttttaacatttgccctttgtaaatccattatctttttttcatttaagcctaggaagttttcaaagtcattaaaataatcagaaccaaattatactttgttctgtgttttgatgtcattgggtggagaaatgcatacctgtgttcagttgtaattgagagaagttagcttcatatgtcctgcatgccttttccagagagtcacttctgatagaaccatgctactttgacaattgtcatagaagttttccagaactgggaggcatttacttttttacttgtaaatcaataggttagtattttcatttttatatttcaatttatacttaatgttttgaagctagctgtgttttatttctttttgttcttttagtgaagattaattttcattgagaagtagagaaagatattggtaagtaagtgtagcggccaggcgcagtggctcttagctgtaatcccagcactttgggagaccaaggcaggaggattgcttgagctcaggagtttgagactggcctgggcaacatggcgaaaccctgtctctaccaaaaaatacaaaaattagccaggcatggtggtatgcgcctgtggtcccagctactggggaggctgaggtgggagggtagtttaagcctgggaggtgaagtttgtagtgagccgagattgcgccactacactctagcctggacaacagagcaagactctgtctcaaaaaaaaaaaaaaaagtacagagccagttggaattcccattaaacaaatggtgtttgtttgtttgtttttgtttgtttttgagacaggatctcactctgtcacccaggctggagtgcagtggtgcaatctctgctcactgcagcctcaacttcctgggctcaagtgatcctcccacctcagcccccgagtaggtgagactacaggcacacaccaccacatctggctaatttttgtattttttttgtagacaccgggttttgccatattgccgaggctggtctcaaactcctgagctcaaacgatcagctggcctgagcctcccaaagtgctgggattacaggcatgcaccaactacgcccagcctgtattagcttttaggatgtgaaaaagtcttgctccctccatgtcctaatggtgtaagaatttcatttaacgatattttaaatgtgtaacttgtatctgtctttatgtttttattaaatattaagcattctgctggttgtaacaatgacttctattttcacagcacaccaaaaaagacctggatggatttcggaagctatttcatagatttttgcaagaaaaggggccttctgtggattggggaaaaatccagagaccccctgaagattcggtaagttttagataaaatgtaggaaaatgtagggtaatcttgggcactggttttaacttaggacggttgggtagtgtaggggacctataacaatcatgtgagacaagacaggacttgctttgaattctctgacccctcatcctgaaactatggagacagccttcagctcctttcccttcttttagacctctgagtcttgctgaggtcctctaacagtctgatctccctgtggcagtacccagtatccctggatatgaaatgacttttgcaaagcactaaatatcccataagagcttcgtttactttgtttcttccttctctctcccaaaacatttgatttctcattgcccgtagggtcatggatgcttagccagaccttaaagctctcttcttgtattttattggaatacagcttcactcattaatttatatactatttatcatagcttaagctaatgaatctctcttgttttttcctaatgagaaaattatatatatagttcctagttagaggtacgtttatttgcatatgtggaaaatgtctttcagttcttaatgttttaaaaactatacataacattctcactataaaaaaaaaagctaaaaaataaaaatctcacgtaatgttctctctgaggagcctcttatttttgatgttaaagctaaaattcctcttggctgtaatgcttaacagttacaatatgcatttttttttagggtctattttggtctttaatttccttgaccctagtgaatgaattgtgatttatttttctacttttaagtagtagatttaatagtattttcttccaagaaagagttagaattcttctggataggtatgttgtttaagaaaataagtaggtgtaaattcagtcagattcttaaaaatgtttgggaacagcctaaaattataataaatttaggcactatttattcccacacccccccgcccccccgaaacacttataacttttgcttaggaattaccctaatttaagtaacctcacttatataatttatgatggacctgggtgtagaagtgtagtttccttttttcttttttcttttttttttttagacagtctcactctgtcacccaagctggagtacaatggcatgatcaaggctcattgcagcctctatttccctgggcttgtgtcctcccacctcagcctcctggatagctgggaccacaggcatttaccaacatgtctggctaatttttgtattttttttgtagagatggggtttcgccatgttgcccaggctggtctcaaacgtctgggctcgagcaatctacctgccttggcctcccaaaatgctgggattacagacatgaaccactgttcctgacagtggttttggtcttaattcttgcttgcagacctgggaattttttgttttctactgtacaaacttaacttttcggagacagagcctacttgaaggaaggtacgcagatttattatgttcaatatattttagggttcaagaattagtttttttcagtggagaaatctatcttttgtactttgagagatcatgatatatagtagggattcttgaagtgggggtcagagggtggagaaggaaggagaagaggaatcatgggattttttcggttcagtactaccctaccccattcccaggaaagttctgataaattctttcaggaggctatgcccatgtagtgagccatagttactgatagtaatacagaattgatataggacaaaagaatagaaatataaaataaattctagatgtaacatgattttatgccgtctttttctgtttataaaagtgtaagtcttcattaaaagtgtctttattttgaagcataagttttaagcttcttcagaaaatgtatttgcaatcccatatgcccttaatcttgaaaattttggaatgcagaggcaaaaaataagtttgctcttcaactacgtcatgagtttcttgagggcacaaatgtgttttatatacgatatgcatgttaccagcttttgcagatagttctgagaatacaaatcttgagctaatgtttgttcaccttggttcttttggattcctccttctagcctcctcgtcctactcttctctttcccataggtttcctttctcaggtcttagagattattatagagatcaattttcctttcaaaatgtaatttttaaaagtgaacataggtctttttttaaaaaaaatgcaaataatattttatattcctaagtaaaaagaaattactgtggaagaacagccatttagagtaacatttctcatgtcagccttatatcaaaggtgtgacataaacattgtcataccagtggatctatatttttgtgtatgagttgacaattagcagagtcagccacctggtttgtaagtaaagttttattggaacacacccacacattcatttatgtattgtctataactgcttttttgcaacaatggcagagttgaatagttggagtggagacagtatggcttgtaacaaaacctgaaatacttattatctagcctatttactgaccccattttagtgtatgtattttcagaacatctttggtagctttctttatttctttggccctcagaaaactgacctcatatgcctttgtcatttcagatgatcacttttaatttttatctttattttttattttcttttagagatgaggtcttgttctgtcactcaggctggagggtagtggcacagtcatagctcactacagcctcgaactcctgggctcaagggatcctcctgcctcagcctcctgagtaggcaggactacaggcattgtgccaccaggcccagctaattttttttttttttttttttttgtagagacagggtctccctatgttgtctaggctggtcttaaagtcctggcctcaagtgatcctcctgccttaaccactttttagataaaaatagtttttcataaatactagattgaaggacatattttatagataggcattgaaattttatattgtgaggttttactcgttcttaccttttgtgttgaatgctttgttttagctctcagtgagtacatagatgttttgtgagaagtcttttgagttcatgttttatgaattatggctaataagaacccagtttatagcgttatggataatgctctgctccttctttgtaaatgttaactaaatgtaataataagattatcttgatatttaactacataagtaaaaaaatttttatatatatataaaggttaatgttttaaattagagcaagaaaggacaagccagcatatgtagcttatttgaccatttcattgttttccagagaggttatgagagtgtcttggtcttggccaagcttacacgttgggcatggacagggatgggaaatagatcagagttacgaggaagtacggggcctgttcaagaaggtattggagctgacgagttctcttgagcgctaatttaaaacctgttgaagtcacatggctggcactgacccctggtggtgatgtattttcatttctatacaaaatattctctaaagaaggcttttttaccagcacaggcaacatagacctcacctctacaaattttttttttttagttagctgtgcatggtggcatctacctgtagtcccagctacttggaaggctgaggtaggaagatcacttgagcccaggagtttgaggctacagtaagctatgatatcaccactgcactccagcctgggcaacagagtgagatcctgtctcaaaaaaaaaaaaaaaacaaaaaaacgactttttcatttcaatatttaataggatcaaaagagtgaaggtatatttgtgaacagggaggagttatgtagggtcatagggtagagaattggcatgaagagaatagcatgcatcaatgtggtatttagctccaatggattttttgttttgttccataaaattgctgagactttttcttagtctatcaatacaaaaaacattaaaagctattgtttatttataaggaagtctgaggaagttacagtttatgtgtgcagagtacagatacatagcatttttttttctgaaggtgaaccgtagtacactgtgcatttaaagtttgcacattaaaagaaaaaaatcttgaggcaatctggccaagcatctgatatagtatgccatataggatgatttgctttgagcatgtgaagatttcccagctgcaactagccaatgataaagccattagagacttgttttgtgtgtatgtggagatacacacacaaatgagattctaaaaagtattccacaaaaaggaattagtggcatttaaagaaatggctctgaggacatggctgaataccaaagagtctcatcatttctttgacataaagttttaaaacagtaatatatagaaatactgacactaagcagacatactaatttagcaaatattgccaaagcttcaacttttgatttcatgatgaattgaacagtttttgaatttccctcgggattaccttccttcacattccttcgtgtacaggactttcagaaatggggacctgataaaggaactgacaacaagcccatgattattaattccatactggttacatgtctataatttcactttagaaatagcaatagcaaatacatggaactttaatggcagttacatatttgatttgatagactcccggttttattgttggaccagggtctctaactactgcctttgtgtccaaagtagaggacagtccagtcccacagaattgaattcattaggaaaatcagagtgtgggtttaggtggtaatactactatttgaacattgccagtccctccaattccaatttccaccccacagagaaagtatggtgttaaagaaatggtgttaaagtttctgaaacttcttttgcccacaggcaggctaacaagaagggagatacaagatgattttagtaaagagtcctttactaaggactttactggaacagattgtgacgtaagcaggttggtatttggaactccatttctgttagcatacctttccagctccctgagtcatctacctttgtcctttctaatcatactaaagtggagtgttcttttaaaactatcttcttagctgataaggatatgggtcagatgttccacaaggttgactaattttatgacttcagctgacttctataaaaaggtgatgaatatacataactgttggtagtgtttgaatttttttaaaccatctgtgtatcacttttaccttttacacttaaaaaatactcagaagtctttgaacttcttaaaatttctataaaaattctagatacagtaaggtttagggagcagttggtaccttctcttcataggtaccatctactttgtaggatcgtttgccatctgtaaccacagtgttttacttatttcttgtttttttcatctgggttttctgccaattcttttattgtcatctcttctctagttttccaggtttaaagtgcacagttgggagcattataattttacatctctttagcattttggaaattgctacaatttttaatgaaagggcagtagttacatgagtttgagaggcaaatatatcaagaggaagaaataaaatgctgtaagtaggttaacacatgagcattgaataagtgagaagcaacttacaatatgtgttttaaaatcaacttttaattttagaatagtttgatttacaaaaaagttgcaaagatacactatttttaactagaaacattataaagctatccaagctaatttgttactgtatctcatttttaaaattcccactgagtcaaaggaaggacaaggtaataactaagagtactgatggaatttttctttcaaggtcagaagtgaaaatatatgaaagatagctgagaagaaacttggatgtgccaggagaatacctgtgactagactaaatatggaaagaagtagaagtaggccattaaatacagatttctatttatagatgggcttatttaagacaagtgtcttcatcgtacatagtcctaatgccaacagcagattggaaaatattctcttatttcaaaagaacaagaaacaccatttcaaagggttttttggtttttaatgaagcaaagctttaagcatttttccttttttaaaactttgtaaaaagctgtgtatgcaaagctctatattctgtagttaatgattattgccagtgtttgggtactgacatgtcaggctttgtgctgaatcctttatgtttgtgatttcatttaatattcataacagacctggaagataggtactgttatgtcattttacaaaagaggaaactgaagttcagagtaagtcacctaagagaaggggccctgatgaaccaggtgtagatagtcaggccctaagacctggttctttggtatcctgtagtaacaacaaggagtacatccctatgtttatctctagtgcacagaatgtggcatattttatgtgcttatcaacaacagtagtaataacaatagcaacaaacatttattcagcactaataagcattcttctcaactcttctacatgtgttttcttacatgatactcagataactctaggagctcactgttatcctttttttcataatgcaagacacagtgggggctgagagggattgagttatccacacaattttccttagctaataaggcagaatttaggcccaggtctacctgagcccgcattcctaatcactatgatgtattgtagaacacccaccagttaccaccagtgtttgaaagaaacttgaaagtctttaaagtatggcctttccatcagttctccatctttgggtagagtagagcaggctccattccttcctttagagcctaaaataccctcacttctctttgaagttcttcccacgatacatttaacaaatatttattgactagctactgtgtgataggcactgggcactgagatacaagtgaacaagatagtcaagggcctaatactaacagagctctattctagtgggagagataaaacataaattcataaataagtaaaataatttagaagactaatttcccatcactgctcttctggcccaggcttacccccaacagtcacatctccctgtctgaagtacttttttctgatttatctgtagtcactatgtgaggctgtcgaagtctcctttattcattacatttattctacagacctatcaaatacccactgttttattttaattattgggaatgcaaaaataaagacagtcactcccctcaaagaacttaaaatttggaccatacagtgtttcccaaattttcccgtagaaaatgagtagggtaaatgtaagaggccgtttagttgggaaggaggctgtggctgcctccagccctgcccagctgcctagagggctgaaggaatcaataacacaggcatgcaatagcaagccagttcagaacttttggtttagtgaggagatgtttgcacaaaaatatgtttattgtgcaactgagtaatagctatgaatgtggttcaggagatatttcactaacaggcttctacctagagagaatgaataactggtgttctccattctcagaatgcttgggtctatttttttttttttttttttttaaagagacagggtctcactctgttgcccaggctgaagtgcagtggtgtgaccatagctcattgttaccttgaacttgtgaactcaagggatcctcttgcctcgacctcttgagtagcagggactacaggcacgtgtcagcatgcccacctaattttcaaattttttataaagacaaggtctcgctgtgttacccaggctggtaactcctgggctcaagcgattctcctacctaggtctcccaaagtgctgggattgtaggtgtgagtgacctcacctggccttgggtctactttttattatgcatatgttctcccaccaaagtgagtggcttgcttaccgaagtcagttgtgcttgttctcaaatgtgttcatgctagttatcttggttataatgacataatataattaaattttatacaaactagtgaaatgggtttaaaaaagctctttctaagaaaactgaattgaatgctttgggaaacttggataaagagtaatagcaaaaaaaaatgttgaataggtgtgacaactaagaaagactgggaaaatttcataaatctagaatgattcttctgcatgcagattgtttcacaaatgtctaagctcttggtccacttggaagaaactgaaactgaaaatcacagaatgtatattattgatgtggtttatttaagaaagatgacacacagctctgggtcaacagattcgtgctataaataaggaaaagaccctggtgaatgaatgtagacttatttgtaaaaagttaaaacagttaatgtgtctaaaactttttcatgattctatgcttgcacttatttttaaaattaactgactacttgttcagatgttctaaataattaaataagtgggtttctggtatatgtgctcagtgtagcaggagaaggagcagctggtgagttggtgaagtcctaatcaagttaaggataagaggtaatgttagagctgagacttgaagtatgagtaagagtttgcccaaaaaatcaggggtagatactccaggtttaagagaatgtggtatgcagatactccaggtttaagagaatgtggtatgcaaaggcccacaggcatgagagaacagaacgtgctctaagaactataatttttatagtactcctggagaataagaatgcaaataggtgggaaatgagggtaggcaaggtagtgggggccatgctgcaagctcattgtcaattgggggatcattttggctgaaataagatgctggaaaacacaggatggacgatcctatgccttatagcagtctaggcggatgcattttttaggaagcaagtagggagtagctgtgctttaaattcctcagtgtgaaaccccaaattacataggaaatacagatttctcgtggttcttggtcactgttactgaaatggctactttgacatttacctgtttttaaattttttatttttaacaccatttctcagggatagctgagcttgtggtttaatttctgtatatttatgttgtttattgtgtgaatttttatagttttaaaatccctaattttatgatagagagctataatattcttaaccaagtgcacagtcaacaggtatctgagaaattacttcaagctctatgtaaatcactaaaaaatcctaccattacaaagaccacctacatatacattttgaattcattctgccttcagtgtatttaacacttttttttccaatttgttagtaatggcagtgagataaaaaggcttaagagatttgtcctagcctcattactccttaaccatgtaacattgggcaagttatttaactgctttaagtgtcggtttccttactcataaaaagtagaaataataaaagaacctactttataggattttagtgaggattattaacaatattcataaaagcatttactgtgtgccaggcattttggcaaaggctcaaccacagcaaaggatgctatcgttacacattcaacaaatatttatgaagtacctcctctatgtcaggtattatgctgggcacagtaaaaacaatggaattaagagtctagattgtgctttttaaaattctgtgactttcatatttattctttgcctttggttttaaatatatttttatatgtttgttatcagtgtacttaatttgatgtatgtttcatttatgattcatgaataatttaatactttgtttttatttttagcaagatatcctatcaagtagaagaaccatatttacattcttataattttctttatcaaatgtgttgttagtctgcagttttcattgtattaaataactcatctagcctaacaaatttttgttattgcaaagatacactttagctaattctttaaacttcaggattgcaggaggcctctagtctgtcaggtcaatgagaataaacaacattatgaacatgcttaggtgactattttgtttaatgagttttattgaaggatatctagattcacatactgaaagccctaggttatatgtagaattacctttaaccagcaactccaaccatgtttataggttttatgtctaccaaactcaagataaatgtaagaggtaggccttgtcttagaggactattgtagctattaaaataattaagtacccgttttcatattgtatggaggtggagatgtttaaagagttggtgtgtgttcattatgtggtgtttagtgggccaaggaggctttgcacagtgtccttggcattaagttgtcaaaatttgggtgaaattttaggaaggatggttgatggccatcataggatctttgatcatctatcattaagcatggcaaaaccttggaaatgtcttttcttaattttttgatggtggaaaataagacagtggattcagttaatcacttgaaggaaatattgtagttcacggtagtgtgagcatatcagctcctgttacttctggggattctcttatagttgggtaggttggttctgattttttcctgttattaaaaccgtgtaatgaatataaaactttgcatttctgaattttctaagaataaatgttcagaaatggtgttttcttcagaggatatgcactttttaaaggttttgttttgtatttctgattgttttttaaaaagagtatatcaggctgggcgcggtagctcacacctgtaatcccagcacttttaatcccagcactttgggaagctgaggcgggcagatcacctgaggtcaggagttcgagactagccaacatggtgaaaccccatctctactaaaaatacaaaaattagccgggcgtggtggcatgtacctgtaatcccagctacttgggaggctgaggcaggagaatcacttgaacctgggaggcaatgagctgagatcacgccatcgcactctagcctgggcgacaagagtgaaactccatctcaaaaaaaaaaaaagaaagtatatcaatttgcactcccattcatattaatttgttggtccaacagctgttttttgagcaccaactgtatgtatattagtagagaaccataatgataaaaccctccattcatctagtttctagtttacaatctagtaaagaagtggacaataaaaaatatgtaacgtgatttcaagtagcggtaagtgaatgaagaaaaagaaagatgaacagagaatgaaggggtagaggtaatattttagataggctgggtagagaaggcgtctctaagttgacatttgagtagagacctacagtctgttttattgccaatctcactgtatttattaaagcatttaatattatcactttaaaacatatttgccagttgagatgaaaaatatttttaaatttctagatttttctttgatttttatttattagcaggttgatcttttttccattggctgttgtattaactgctgtttgaaacatttaatagagaactaaccttttatttgtagtaattggtcattggattttgaattgctatgatgctttaatataacaaaaaggcacactattcaagtttggcttcctagagaggacagcgcaaaatttaggctgaaaatgagtgacttttatgattctggctcacaaatacgtggtttttgcttagagttttactaaggctgactttagtaactgaagtagcagattatattgaaggatattgagcatgaatgattgtgttagtactggtgtatgtagctgtttggaggacagtgttggtgccaagatttctaactagctctttgaaaagacctctttacttacatgtaaaaatgttacaaatttttgcctttggactgtgaggactcatccatcactggaaaaattgccttcgtgttttcctttccatagtgttagtaacatttattttagagtaattaaaattaattttttttttttttttttgagacagagtctcgctctgtcacccaggctggagtgcagtggcgcaatctcggctcactgcaagctccacctcctaggtttacaccattctcctgcctcagcctcctgagtagctgggactgtaggcgccggccaccatgcctggctaattttttgtatttttaatagagatggggtttcaccatgttagccaggatgatctcgatatcctgaccttgtgattcacctgactctgtctcccaaagtgctgggattaccggtgtgagccaccgtgcccgcccctaaaattaatttttaaaaaccccaaagatttgggagttaatagctgggaaaataaaaatatgtacttgatctgatagtttgctttgcttataatttataagtggtagaagacaaaaaactttcttaggaaatttgcttttccgggcttgtgatatgtgattgttcattctatttgtttattatagggggattgctttgtaattcctgtactaattttatgacctataaaatttcttatgcaaaacaaagttttctatttaggttttctttcatcaaacttgtatataacgtctattgatccagtattttattttttgaattaaagtagtgggtggttgtaatctggtttctaatcagtgatcaaaccacttttattttaaactaaggatttaaaagtaggacaagaaataattttcagagaacagatttcattaattaatagccgtttgttttattcatttattcgcttattcacaaatgtttgagtgctgccaacgctggggagctaacctgttcgtttaaagatgatgaatatggtggggagtatcaggtggaagtttctgcccttatggagtttacagtcttataatagagccagagaacttagcagacagtttggagactgtaagaattgctgtgataggaggcggtagctcccaaagccaagagctgcaccagattcactactagggctgagggtcacaaatggcttctaaaggaagtgatagttttgccatttggttcttgaactccttgatggggcatacatgtgtgactgcacatacacacacaaaatattttttaaattaaattttaaattgtaaaatacacataacataaaatttactatcttaattattttaaaatgtatccttcagtgttgttaagtatatttttattatttggcaaccaatcttcagaactttttcatcttgtaaaactgagactctgtagcattaaagaacagttccccattcccttctaccccctctcccctaatcccctggcaagcaccattctggtttctgtctgtatgaatttgattacttttgatgactcactagtggacaaaagccttttttttttcctccttgctcttactgcccaggctggagtgcagtggtgcaatcttggctcaccgtaacctctgcctcccaggttcaagcaattttcctgcctcagcctcctgagtagctgggattacaggaatgcgccaccatgtctggctaatttttgtacttttagtagagacggggttttgccgtgttggccaggctggtgttgaactcctgacctcaggtgatccgcccgcctcggcctcccagtgtgctgggattacaggcgtgagccactgtgcacggccacaaaaacctttttaaatctcaagttttctttctgttgttttgaaaattgcctgatttctgttaccaattacatattactggttttgctttcctggagaaatttgagaacatacaaaagcctagggggttgtttatatggcagcgttcttgccagtggaagcacgaagccaacatatagccttagttagagagaccctcttttctctggccatcctgaggcgtctcaggcagtatggagctattttaggagaagaagcatggtttgaaaagggagaaatattatcaaagcttgggttttttccagaaggctttcttaaatcaggggttggcaaacgttttctgtaaggggcagatagtaaatattttaggttttataggccatacaatttggggatgattactcaattcagccatggtagcatgaaaatagccgtagactatatgtaaacgaatgagtatggctatgttccaataaaactttatgaaaacaagtggcagctctcacagaccatagtttgttgacctctgtcttaacatcctcaggctacacatgactggagagaaactttggctgaagcccatgtctgggagatcattcagctagttcgtgacttgaaacctagaaattcaatactatatttcatcaaatttgggccattgattataagttacaccttttatgtaccactaataaagaaaagaaatcaaccaattaattgtaagaacctattggttatatggtggatcctgctttcagagatgttaaaatgttgggtacgggtgagggagtgtgtctgaatcagtgaagtagtaataatatcagccaacatttgaatatttactgtggggccaggcactttgctaagcactttatatgcattatctcatttatcttcataacgaattaatgaagtaaatgaaaaagacttagagcagttaaataatttgccatagtaagtggtagattctaagaaacccaggtagcctggcattaaagcctgtgttctctctcacttactatattttactgtctcatttgatttaaaaggaggctttttgtcaaatgatatcattcatgctggaattgatgtagtttattgaatcgggtcacggaggaaacagcaactacataatttccctttagcatgtccttggaatttcagacatttctcactgcagccagctattgcatgccagtgccctcaaaaaaaaaaaaaaaagatttatgaacctcttctgaaagtgttttttaaatgataacatgtctaagccaagcaaaacatgctggacgaggtgttggtgctctgtatgccagtagagtgtctgtgatgctagccagcacttctggtcctgctgcagaggaggagagtgagctccacgtattactgtaattcaccttcttctgcatccgtgagccttacatccaggatggtgcaatcctgtatgaatgatgcagacttctgcaaagatgaccttattgactttcaaagatacaggacacacatgaaccactcagctctcagtcttagagaattctggtgtttgtagcacaggctgcatacaactaacagaacaaaagttgtggaagcttgcttttgagcacattagggttttcagcacttgtgaccatcaaaaagaaaagtcaaaatggaatggcaattaaagatggtatgcacgtaatcatctcaaaccacatcacagcatcagcttcttattcaagccaaacagaagccttctcattgaaacttagtttggagagaggtaaagtttattttttactctatttgcacattaattttcactgggaaatgaatgacttctgttactaagatgaattttatattctgtgaatgacatttccaatgtagtgaagtaaattgtaagcaaacattttgtttttttgggggtggtgaactagtctgaaagaggctccatttttttatcttcgcaagtacccgttggctcataaagcctgtaaatcgccggtcttagctgagatgtggaagagaaagaaaaagtagttggtgaaatgaagttgtatgagaggaaaaagcgcaaggccttacaagcaagagatgtggtatgttagagaacccaatgctccatgttcctggagcagcgt

SEQ ID NO: 609 - DNA, 32744 bp, Homo sapiens
  source 1..32744: mol_type = other DNA
ggattatgatttttgtttatttttcctgtttatccatatattatttttcaacaatgagtattgattacttatataataattttaaggctgtacacattgcagacagcaccccactgtttgaaaaactcctcctcagtagaacatggcagaccttcatcttccttccctgaaccttttccaaccttaggcttgccattctccaccagtgctaatgtcatgtctcttgaaatctgtattgaagtcagtatttcattcttgccagtttccactgtgtgtttaaatttggagtctggtgtctagcattagctggggttggagcttccactcctctcagcattggtaagcctcctcacccaccccatcccatgtccaagatcacccagttacacacttaccatctacccagttcattcacatcatcagtcccagagctgcagagatgctctttttctacctcctacttctctggctcttagagaggcagcatgggataatggggcaagcgaatagggccttaaagtagagggacaagggttctcttccctatctgccacttattagctatgtgacctcgtgtaagtctcttttctttttgagacagggtctccctctgtcacctaggctggagtacagtggtatgatcatagctcactgcagcctcgaactcctgggctcaagctatccttccaccttagccttctgagcagcagggactacaggcacatgccaccatgtccggctgatttatttatttttatttgggaagatgggggtctcactatgtcgcccaggctggtcatgaactcctggtctcaagcaaccctccaaccttggactcccaaagtgctgggattacaggtgtgagccctggccttgcctcaatttcctcatctgtaaaacggggttagtgaaactcacatcctatcagtggttttgaggatgggccgactcttgtattgcctgctctagtacaatcagcagctaaggcggctcactttccggccgtgctacaataggtaagaactaggatgctttagacgtgtgactgggcagtgggagcccctcacatgatcccgagatgccagacagtgtctctccgcacagggcgtgtgctggtccagaggcccgtttttccagtcgccccacaccccgggtccgcgatcacgctccccccacccatagccgagcctgacgcggcggtggctcatgcgcctttccgtcccagcctttagccacggaccacacgtcccatctcaggcgccccgcccctcccccgccccccgcccccggcgcgcctccccaggctgccggctccggtgtctgagcggccgcgcccgcgagccgtgagcgatgattggctgcgccacggcggcgggcggtccgtgggcgcacacaccctccccgcgcagccaatgggcgtgcgcacgtcactgatccggaggcccgcgggccggcagcccctcaataagccacattgttgcatgaaactccggcgcaggagtcccgggctgccgctggcaacatcgtgtcacccagctaagaaaatccgcgggcccgagccacgcgcctgtgaatcggagaggtcccactgcccgagtggagccgggctgagattcttctcaagttgagcctcagtgatcctgtggccgaagttagcgccttgacgtgggacaaccggacacgtcgccaggagagaactgaggcgccttctagcagttgtgacgccaaaatcacgtctccggagacccgcgccctccgccagccgggcgcaccctcgccggtagccttctttgtgcgccgtccggactcccagctcccggcccggcagccgagccccagcacaaagcagtcggaccgcgccgcccgcctcccctctcgcgtctccgcctcggtttcccaactctgcgccgtcgggccgcggcaggatgattgcctcgcatctgcttgcctacttcttcacggagctcaaccatgaccaagtgcagaaggtaagtcagcgcgggcggggcggcaggctgggctctggcaaagtggtctggcctccatcagtctcttcctcgaccctgcggggacccgcttcctccctactccgggcctgggagcggaaaaagtttgggcagccgggacactcctgggcgccaggagccacgtccgctaagcacagccggcgagtgcgcgcgggcggggagccgaggtcgcgctccgccgggcgccctccctccctgagctccggcacgcgctcacgctctctcccccagtccctttttccctgttactggaggggcgggtcaccccgcaggtagtcagggattgctgcgcccacgtgggagggagcccccttctgcagcgcgagttccggcgagagcacgtggagagaatcgtggctgcgggaggctgctccgctgccgcgtggggccgccgggggccgtccgcgctcgcggaccgcgtgtaggagacgagcggttcccttctccttccccgcggccctgcgggggtgggctcgaggagaagctgacccgggaaggagtaggaaaggggcagaggaactccgcccgccgcgccccctccccggaactgtggcgcccggaactgaggctcggcgaggggcgtcccccattaacccccgcccctccaaatcagcctcgggaccgcccagcctcgtgtcctcaggatctgcctctgagtaaggggaggactttggttgttactttctggtttgccctaaaagttactcggagaggccaacgcgccgcgttcctggattacttgagattcttgagatttatgtccttccgaaaacgagcttttttttccttaagcctcgacctgtctgttcccacctggctccgcagctccctatggctgagcgctcaccgcggccgggtcatttacataagaaagagcctcaggccaagccgggaagctctcattccccgcctcggggtatgggggtggggatggggccggggccggggacgggcagggccaggggcgcgctcagaattgagtttctgaaatgcccgggattaggggattggctcctggcccgggcctgggctacgatttgaggtaggggacaagttgggaggggattagctggagggaggttgttttaagagctgtgaggcaacggagcgttgctcagttacatacttggaatttcaatatctgatgggaacacatttttgggaaaatgtcttgccattaccgttctgtgcgacaacctgctcatattcccattctggcggtcccgagggcataggaggcatattaatgtagtgatggcgcgtgaacctccaagaaaagcagaagttacccagcctcaagtctggaggagcgagcagaggcggttgatttacttgggttttactgtttgtaaatggctgttattctctaattcctgggatgtggctctgcaccttgattcagtttacttaaaaacgtgcctttgatttgagctggcaggatcttggtaacttctcaacttctaagaactcttggggaaggctatcatctcttggcaagtcctaaaatacacagtggagcgtcattaatctcagggagttctcctttgggtattaccccaggacatttgaatccttgcataaatttactcttcctcaatccagaggagggcaccagggttggaaccccgttggagttataccactctcaatcttggaatgggggtcatctctcttcccccagagtggaacgggaattaaccagggtatctggaaatgagttgtaatctctgtcttgtggtttattaaccatagcaccctgagcctctttggacagcccgtttctctttgtgaaatgcaataataacagtaggcttgtccactttatggagttgcgattattaagcgctgcagtgtgcaactgtcattcctgtaggttttctctacccttgcagccacctgtcagtttgagaagtgtccctgaagacccttgggtgtatttcctctaaactaccaataggggcagaattgaatcaggcctttaactcagtaattgtcagaacctgggatttgactcccagcttaggtgagcgaagctgtttgattccagtggcagttacatagaaagcagagactcagagtatcttggaaccatctttctgagctgccattggaaagaagaattaagagagaagaatgaaaatttagtataactttagagtcttttgaaaagaccttttgatttggacccttctgaaatccccttgtgataagataatcttacatattctgggttgtagtctgaggacgtggaaggcttgggttcacctgcccaacgaggtcacttgtcgtctcctgatggacaagcccagtgttttggggcattagagatgagaatcagggttatttcctcacttttgccaattggaactcaggagcgactgcagagcacctactgtgtacctggcactgttctaagctcttaggtatgtcagcttattaacattcaaatcagccccatgaggtgaagactgattgttattagcatccctgtttaactgaggcccaggggtaacttgcccaaggtctccagcttttctgtacgagctgggaatcgaagccatgcatttggctttagagcaccatgctcttgagcacatacttgcctgtctctggggaatgtgagcgggctcctggcccgggcctctgcccactcctggctgctggtagcacccccacccatcatgaccacagatggaactagctcttctgttggtttgatcagtggcaccagtaccctctggctactccagctgagagtcctggattcattttcatcaactctctaactctgtcaactggtctcttggttactttggaggcctgctaagggtgtccctaaaactctttctggagccagactggatcatttcaggagctctctacagctcttaattgcctcccgcttctaccccccagcttagcctcatcttcctctccatcctttcattcctctgtcctgcctgttcacactaggtccttttgcccttgtcttttttttttttttttttttttgagacacagtttcactctgtcaccaggctggagtgcagtggcgctatctctgcttagtgcaacctctgcctcccaggttcaagcgattctcctgcctcagcctcctgagtagttgggattacaggcgtgcgccaccatgcccagctattttttgtatttttagtagagacagggtttcaccatgttggccaggatggtctcgatctccttaccttgtgatccacctgcctcagcctcccgtagtgttgggattacaggcgtgagccaccgcacgaggcctgcccttgccatttttgtggccctgaactctgcttggcttctttccacttaaccccttccagctcaaatgcagtttactgtcttaattttctttctgcttccttctccccctcctgtgtgccaacattagtgtgtttgaaccttgcatgacatttgtttcattccaccatctgttagagttgatggttttcagtttgggttccttcctcagggcagggagaatcttggctgttaggtttgtcgctgcagttcctggccactggtgaggtgctcagtgagtacaagagtaaaggaggagacctttctggagaaagaagctaaaccagggctgcaggaagtggaggagctgggcagggccagctagtcttaggctaaagggatggtatatgggtggacacttggaggggtagttcgcagttatctcttcatccaaagcatgacctgaggccaaagcatgacctgaggccggtcctgaggagggagagagaaagggaggagagtttcctgtccttcagcaatcaagactgtgtgtcctgcctatggagagatggaagattctttctatttttttttttttttttttgagacggagtctcgctctgtcgcccaggctggagtgcagtggcgcaatctcagctcactgcaaactccacctcccgggttcacgccattctcctgcctcagcctcccgagtagctgggactacaggcgcctgccaccatgcccgggtatttttttgtatttttagtagagacgaggtttcaccgtgttatccaggatggtctcaatctcctgacctcgtgatctgcctgactccgcctcccaaagtggtgggattacaggagtgagccaccgcgcctggctgattctttctattgattgagataagttagtatacaagatgcaggattttgtcatttaagaatggagaatcagggttaaccatagagataaaatgaagtatatactcctttctctgaccattgaccaaattgttttaatacgcatagactggtgacatttgcactggaatcctgtaatagacatagctcatgtagattccttgttgtatgagcaaggggtgaccttcaatgctgggcttgagaggaatatcttggaagcgaaaagattgaacagagaccccaagagtcaagaaagccaagaattttaatgtttttttaagaacctacagtgagtgcaaggccctctgagtgtgatatgggagacagaaacccagatacttttcagttgtctagagagatatggctgctaggtcaaaagagtgaattaccatgggtggggctggagttagagcctcaaggaaccttggcacattttggacacctaccacgtgccattagtccgcacgtatgggattagagtatcaagagtaaattgctgattgaaaccttaataatattatttttgtctatgttaattttgattggacaaactgacattgacaggtacaattcactccatttgttcaatatgtaacatcttggtaacctaactctgtccctttctctgctcagaagacaactgatggtagttaggaatactttgtagcttttgttaaccatccgtttgttttatattgccaaacttacatttcagagagagctaagaagcactttttcctctacctttgaatgaattaactcccctgagctcagccaaagtcaatttttttttttttttgtgagacagagtttcgctctgtcaccaggctggagtgcagtggcacaatcttggctcactgcaacctccacctcctgggttcaagtgattctcctacctcagtctcccaagtagctgggactacaggtgcgcaccaccatgcccagctaatttttttttagtagagatggggtttcaccatgttgaccaggatggtctcgatctcttgacctcgtgatctgcccactttggcctcccaaagtgctgggattacaggcgtgagccactgcgcctggccttttttttttttttttttttttgagatggagtctcactctgtcgcccaggctggagtacagtggcgtgatctcagctcactgcaacctcggcctcctgggttcctgccgttcgcctgcctcagcctcccgagtagctgggactacaggcgcccaccaccatgtccggttaatttttttatatctttagtagagatggggtttttcactgtgttagccaggatggtcttatctcctgacctcatgatccacctgcctaggcctcccaaagtactgggattactttggcgtgagccaccgcgccaggcattttttttttttttttaaacatcacttttcaaagttgaacttttccagtactctggggagtttggggcaattggaggtccttttccaaggggggaatcagagcaacacaaaccacagttggcaatgggagtaaggagatctgatgaactgaaagaacttggagccccagaaaactggcttcctttgttcagatacttccggtttaaaagaccacatcttgataagacgttcctcattatcatcgttgagctttgaagtcagcaggtttggtttgttttccaacactgtacgtagtctgtctttgccttttcaaagctgtgggggttatgccgggcgcggtggctcacgcctgtaatcccagcactttgagaggccaaggcgggcggatcacgaggtcaggatatcaagaccatcctggctaacacggtgaaaccccgtctctactaaaaatacaaaaaaaaaaaaaaaaaattagccgggcgtggtggcaggcacctgtagtcccagctacttgggaggctgaggcaggagaatcagttgagcccgggaggtggagcttgcagtgagctgagatcgcaccaatgcactccagcctgggcgacagagcaagactctgtctcaaaaaaaaaaaaaaaaaaaaaaaaaagctgtgggggttgggatgtggcaaattaaatccccatagctcactggacacgtcttcatatcacactctgtggatcacacaccatgcttccttgtgctggagtggctctttctgcttatctttaaagcagttttctcagccttggtgctattgacattttgggacagatacgttttttgtgaggggctatcccagcctatcataaagagcaagaatttccaccttactcaaatttccagagacaaagcctatctttttaaaattcttcatttagagcagtagttttcaagtaggagtgattttataccccagtggactttggcaatgtctggagacatttttggttgtcacaaaggtttgggtgagtgtgtgttactgacatctagtaagcagaggcaggtttgggtgagtgtgtgttactgatatctagtaagcagaggctaggaatgttgctgaatattccaccatgcacaagatagctccccacaacaaaaaattacctggcccaaaatgtctacagtgtcaaatttgagaaactgctttagaagaacatggtccatccctgccacccccttcagttttcaggtgtattgctgatggtcatacagcaagttagtagccctagttgggatcagagccctgagttgtcaacagtgtgccatgtcttgtgaccgtcatggtgggaaatgggcttctacaaaagacgaacttaagatgaggtctacagttcacagcagtctgcagatgcccacagttccttgctggggggcaggtttccagggaacgggagctagttgctgtttctgtattctcaaccagagaaatgtgggcaatacaagtgctccagaaagccagcaagaggagtttagtcagttgcccttggaagatgctcaccctggtgctgctgtagtttccatggaggctgggcatgagccaggcttcccaacaagacaggcatgtgagctggtgtaatggaaattcagaaggcacttgagctggggagcagaggaggtaggccagtgacatccactgagggacagcctgacagttactgggagaggctgtttgatgagctggagtcaggctccctggggttgaactctggctttctgcataacacgcagtgtgagcttgggtcagttactctacctgtctaggcctcagtttcttttccctataaaatgcaaagattgtttggataacactttaattgagtagttgtaagaatgaaagagaaagagggttaacaggtgtcaagctctgagaactgtgcctgacatatagtcaatgctttatgtattaagtattggtacttaacaatggttcaacttgatttttttttgacttcacaatggcacaaaagtgatacgcattcagtagaacctgtactttcagtatttatataaccattatgttttgcactttcagtacagtattcaataaattacatgagatattcaacactttattgtaaaataggctttgtgttcgatggtaggttaggtgtacgaaatgcatttttgacttactaatcgggacataacctcattgtaagtcggagcatctgtacatagggagagacacagtcttagatgtcccactgcaccgtccgcctggacaggagcaaaaagaggccctgctttaccctggataactcccaagagcttcttttagagtaagtggtttcaggtccatttgtgtctctgtgtgacgttggattgaatcagaggacagagaagtcagaaggatggaaagttcctgaagccagggaagaaggatgcgtccaccgtgcttctaaaaccttctctttcctgggcgtaggagatccatccttaagctcttcctctaaattgcttttcttctggtcctctacagaggtggctcccccattcgaggtctctgggatgcctgggacattagtgcacttcaggttgaagcatccttgcgatgtcgcaggagacacagttgtgctgaatgatcacagggttagttccagctccttttccctaacctctgtctccccggtaactaacccagagaagagcagaggcttcagagggcattgtggaggctgcttacttgggatttcatattcttctgctgtggagtttgtcagttaaatacttgctcactcatcctcacatctctcccagacctggctttccacaggggaaatcatttgcagtgccctgtgctgaagagtcacaggacccgccatgataggtttggccccaccgacccctggaatttcacagaagggaatggccattctcacattctttcggcagattgggtgaggttccctgggcatcctgggatttggcagtcagctctttgcccctcatatacagaccctgggctgttgagtgtgttccttcctgctgagcccagggtgccctgggttcttcacgaagcccagggggattctgcatgtgcaacccataccctccatcccacctcttgaacagccgttgccttatccacgtcaggagtcaggagtcttggccctgttcctgtgaacagagaatctcatttcccctaaaatgctgccctcttttaggggtggtcactcattttgtttgcagatggatctctaagcatttcccggacattctttcctgccttggttaaatcttatctcagcgttaaccaggagagtgagtcaggctctgagaaactggctctggaagcccttggggcccacccacctcctgcccactcagccttcctgcctttccaccatttctgccctggatgcttggaggtggtccatgttcttaaaaggcctttttcccaatcccttccttctggcatctccatattgtctgaaggaataaagccagatgaaccatctgacagctttaattagggttaaatgagggcattcgaaactgccacttttccttctttcccatttgagggacttcctcttcctgcttcctgtttcctcccaaacttttctgtctcagtcccctccatgaagtcctgtagcctcttcccatcagctctgtgtgtagtaactcaggccaccctcaagctgccctccaggtaggtcctgttattatctattattcaaatgaagagaccaggcacaaaataggatagtaccttgccccagggcaagccagaatccagacccaggcaatgtgactccagagccagtgcccttaacccccagcacaaagctgctgggacaactatgtttcagtttcacttatgtttcagtttcatggggttatgagtcaggtatcagctgggaagggacctttgggaccatgtagtctaaacaaacccttcattttacagttaaggaaaccagatgttgtgtactaagggaccagcccaagctcacataggataagccccagatctggaacccagtttcttgatccccatcatgtttttttaaaacacagtttgtgcagcatgaactcttatcattttaggtgtcagtttcccaagatcaaaggcaggatttacttagctgtatctagggggatgccctaattgtccaaactgggccgcttttgaaaatggaggaaagcactatcagtagttatgccatgaccacaggtgtaaactgagattgtcttgggtaagcagggaagtgtgggtaccttgcctgtggtgggtgtgatcttggggtggatggggcagactgggacagacccagaggtatttgatccagcaagtggaccgctggcagcagacaggagtggggagttcagatgccactgtggggcaagaggctcagaggcagattctggtccctggcctggggctgtcgaggggtaggcagagtctgacttctagggacctagcatcctaggcagggcagacaggtggactgggaggaaaccatgctgctgcggggatcccatgcagtgtgggcgccagcctgaagagcaaggcccgacacagagcacctggtcagtcgggagtagccagctcttccccttcaccaagttacttgtcaacttttctctttggtgttcccatagccccttgtgtataactataacaaaggtttcttgagcacctattatatcctagtattgagatagctgctgctatgactgcagagaggccatttatgctgggctatggagggtcagtgggagtttgttagacaaggggaggggacattttgggcagtgaggccaacacatacacatttctaaccatttcaagacaaacactcctcagattcacattgatgtatgtgatttaagtgattgtaaatccatattttattaatgtaaaggaaactgcctactgttctgcccttcctgtcagtttgtaattacttgttaatgtatctgtcttctgccaatagactcagccccttcctggcagaggctggtgtctcctttatcccagtatcctcagtgcccagccctggcacactcaacttggcactcagtcaatatctgttggcaggtgaactgtgccagggtcacatgcatctgggacataatccccctttgctctgctgctccgcagtcagaacagaatgtctgaggacaggaggaccctgggccgggtgtcccaaatgcccatctcctggaccctggacaggtgctgctgcctaaggtctgtctggctgtaacttgatgcagctgagactgagaactggaagaacaggaagccctgtgactcacaaccgctgcaacaggatcctggaggagtggcccgtatgcctccctggtcagctctgcgcttacccgctgcctcgggtttgtgagtctgcagtgtgtcagagctggcattggcctgaggtggcatggctgccctggcgaggacaagttccttgtcccatctgaagaagtggcataggagatctgagtttcggttcatgggctttcagaggacaggagacttacagaatccatgttctgctgtgtgtcttccccccggctcatctttttttcttttatcagaaacatctggccctgccctggcaactttgtagaataaacttgctgctctttgtacagcctcagccttcccaggaggagtctgtgagggcattattattaatgaggtcactgacagcagttgcttggctttcccagggtgggcacacctgtgccctaggttagggcactcggctggtcactggatgctatgggtcttcagggactaggcctgtgatttggggaggcttctccaagtcttggtttccttgtcagagagttgtggtaaaacactggcaaaggaataatgcaaaaatatgaaattcttttgaaattaagttgcaagcatgtgtcagcacagagtcactggaagtctttgtgtggccagatttaaatgatggatctctctttgtttggcctcttttgacctctttaatcttctttggctctttgactgtgtatagtgggtaaacttgggccaagtcagtgcaacctgccttttttttccagcgtcttttgaattgaagtataatgcacatgggaaactgaaagcagcaggtaaccaccatccagatccagtaacagatcattacctgaaccagccccgtgttctcctacccaccaccaccatcaagtgtaatcactgtcctgactaacagcataggtctgtttttgtacttaatataaatagactcatacaggatataaaagatgccatttgtgtctggcatttttcagccagtgttttactgtattttgagattcatctatgtggttgcatgtagtggtaggtggtgcattcttgttgctgtatactatctcttgcaccactctggcttgtttttgtttttaagagacagggtcttgcactgttgcccaggctgagtgcagcagcgtgatcatggctcactacagccttgacctcctggcttcaaatgatcctcctcagccaaagtattaggattactggtgtgagccactgtgcccatcccaccaccctgttttgactgtggttgatttaaagcagacgaaagtagtcataataaggcccctgacttccagaaggtatggtcctttctaagtttctgtcaaaggggccaaataggagtgttgacctaatatatagatgacccgattgtatcttcaggacaagaacatgcatgttaagaaaggtgaagttcaatcagttggtcttctagggtctagaaactaaaaggtaggatttttagctgtggtcatctagggcacctggagagacggttctagataatcaattagaaatatcccaagactggggagacaaagttcagctgtgccacaggcatcctgcatcctttgctttgatgcttctatgcttgtggagtaactttcttatcctatgtgatcacttgaattcagccctctaccaggagggtgtgccctgcagacacaagtgatgaacatttgcttattcatgtattatgtattttctgcttgcttactaaaaggatttagtgatttggttcagctttcagtaaaaagatttctagaacgagagtcatcaaactggcgagatgattactgaaaaacttgacaggccaggtgtggtggctcatgcttgtaatcccagcactttgggaggccaagatggaaggattgcttaaggccaggagtttgagaccagtctggacaacgcagtgagactctgtctctacagaaaaaataaaattaaaaaaatcagctgggtacgagggtgcatacctatagtcttagctacttgggaggctgcagtggaaggatcatgagcccaggagtttaaggctgcagcctaggagtttgaggctgcagtgaaccatgattgcgtcattgcactccagcctgggcagccgagcaagactctgtctctaaagttaaacaaacttgacgaagctccaagcttcctgacagtcaaggcaaaaaggatagttagttctctttgagtcagtcgttttcatcccatcggcctataacaggtagcacagtgtgtctgggcagccagactttctcctgacactaacccttactggggactgaatggctagggaagcattagtgaaagacacagcagctttacctggtgcagtggtctttatagtctttcctgtgagcccttgattaaaagtgatagaactaaacctatgaagcatttcatggggagctaatgtaatgttgtgaaggtgaggagctttctgttcctggaattggtaatttcccagggtcttaggggcttgcccatgcctcctgagccttttcacactgctgtctctaggtaagcatttatctgctaaggtggctgagctccaaaagtatcccctttgattgccagtctctcaggccacttaaatctgtgacacttcccatgggctgccttgtattgtgcccgacattcttattagacaagactcatctctccacgcattctagagacactcattgatctataatatgagccagcttctttgatataaagtcctagagagcagggctgttgatttcttaaaatttttaagaattgtaataaaatattaatcacaaaatttaccattttaaccattttaagtgtacaatttagtggcattaagtgtgttattcacattgctgtgcaactaccaccactattcatttccagaattaatttcttgtaaaattatgtttctgtacactagtgctttgtatttaatagctgttccataaatgccataacatggaagatgctggggttgcaacagtagtcaggattcagggattgaatgatacggatcttacagacttagacattgaaatttaaggtttcgtttcgtctacacttcccttttaaaacccttgagtaccttactcaaggtaggatctgtagtacttcatataaaaactgtcaaaattggaatattgctgtcttctggatgtaaataatttgatcaaggccaggttcccacagggaccagatggggtgggctcaggatccaggcagtggcaccagtctttcagttgcattgggcctgcagaatgagatgggcgcttctgggccagaagggttgacattcatccaggtgatccagattctagtttcaactgtgtgacctgggtcgaggctgctccccgatgggcctggtttctctgagatccctttcttgcagtcacctccaggcctttccttcctgggcttccccatacctggccaggactgtgtatggcccaccctgcacactgcatacttcgaagtggagcctccatgaatgtccccttttgttctctccatttgttgctttgtgacagtgacacaatttcctctccttttttaagtgctggtctggaggaaaatgcaggtacttaaggggatgggtgttaatggcttcccattttgggtattatcttatttcctagagagtatggggttaatttgtctttagggcttcccctgacaccaaccccaattctgtagaggaagtgggcatgtcagactggtatgttatgggaaaaactgaaactgaccaaaattacccaatgaggaagctctgatctaacccttgctgaagaaatatcaactaacagtgctatctctgtctaacacgccctcgcttcctgggctggcagcttggcaggcagacgggaaggtaacccgttcttcagccaggctttgctctggcctgcctccgattccccagcctggaatgccccctcctcctttcctcctctcccagatagagatttaaagagaagcagccttgtccatgcccatcacagaaagagaaggaatagtttggggaaacagcctctgctttgtgactaaggagggttgagaaatgtctgtgattgcctgaaggtgaccctgggtggagagaagctttagaagaaagaaggggtggaaggaaagggggggtgatagagaactcttttgtccccacagttatgctaatgactctgtcatgtggggctattcatcctgttttgtggcaaggaagctggggttcagatgaagagtcctctaatgtcgcacacctgtacgaacgctaccactaggatttgcatactggtgtttctgatgccagagcactcctttcaccaccaccagctacaaatcaagggttgacctgaatgagtctgctttgatagtatccagaaacttacatctcttaaaaacaaatgcagagtttgtcttcccaactcccagcaggctggatcaacacaggattacttcacagggtcacacctggcctaatatcttaaccaccgactctcaaagattccaggcagaaaagtgatatgcagtgttgatcagaacagggccaaccacgatcacgttattggcatattggaaacctcccagaggagaggggaaggtgtttgagccccagccttagaggtgtcatttggttagtctggaatggatccttggaattcttactgttttctttaaaagctcctcatgtgattctgatgtgcagcaagtttggaaactcttatcacaagtgacagaatggagattaggcagaagtatcagaaagcagatttatctttgattgaggaaactctttgaaacaagtagagctgttcaaaaatggaatttagagaaatagcgagcctctcaggcttggaagtattcaaacctaggccacatgactatcaattgggtggagagagacaaactagataaattcgaatactatgtttagtgggattttcgaactagttaccctaagggcctttcctttctatggatgaatacttttcagctgcagtcccactgctgtgtgtacatctgctatcacctgcttggctttctcctttgactttgggcctggtgctccctcccactgatggcactgtgggtgaaagttggcaagattctgaaaattgcattcatctccttctcaatccaggaaaatcatctttgtatggtggctgcttcttgtttctgacttctgcttcccttggctaccaacacagcagtgcctaccagggctgggtgggctccactggtgtgtttaggaaactgtggcattaagtgattattaattatcccttcctgagtggccctaataagctgagtggacacatcatcatgccctggtgccatctgttctcaagttttgagagttcaaagagctctgatgtgaaagaggggaagtttgggccaagctactggcctggacatttttcactgtttcatatccacagctgtttcatatcttctctcttagtctcctcatgtgatggagaggaaaataaggtcccagggtcatccaagaaaccacagggcaggctgggagtgcccatccacactaagaggggcccacaggacaggcgagggtggctgtcctgacggcctggcagtggggccagacagacctctgtggaatcccatctctgcccctcattacccaagtgatctataaaacggaggtgcagaagttttacgaagacaatggagaacaggtcaggaaagccggaagtgcctgacaggtgagaaatgcttgaggaatgcttagccgctgtaaccatcaccccattactgttttcatctgtcattgaacatgtggaagatggttatctatggggcaaaaggcaacgtggataaagggtgactgtttaactcgattcttcaagggttgaggatgagaagtgtctgactggatttccaacatgtcttgaaacagtttaaacatcgaagataaactaagattggctgtcgtagaatttgcttttttgtgtgcataacctcatgcttctggacatgatgataggaccatttaatgaggtggaacaggctcagctcctcagtgcaggaactcctgtgccctttgcaaacacctgaagccttccatagagggtggaggtggggcgggggcaccaagaagcttctgggcctctcttctctttgggaaagtagtgaggtgagagtgtctttgtcaggtgtcaccctcatgacaatgttcagagacatgtctgctgccccagacctgctcagtcacctctgtgtgcctcactctccactgcgtgctgttcatgtctgcattgggaggtgactggaatagaagatggccttttaatggatatggacagcctgcattccctgcaatgctgtttgacctgtatagaccctgctgtatccaggcaggcagggggcagtcatctagcagagtggacaagagcacagaccagccaaacttctctatcaagccaaacgtggcccctcgtgtctgtgtgacttcccctctctgtagaatagagatgctggcacttcctacctcagagggctgttctaaggatgaaatgaactaatgggagcaaacccggagaataggatctggcacaaagcaggagccacgtgagggcttgccattattacagttgcccatgaggacatctcaggcttttcctggatgtggcctcgcattggcttctggtctgggtagccccagactttgcacattagccctgagatgtgaaagttgtaatgtagcattcctgggccagtcagtgtctcattggatctggagtgggaagcctccagggtggtcagagttacccttgaactagggtcactggagatggctagagatttgtctgacacttcactgaaaagaaaggggccttgtctagtgtcaggctgaagctgcaccctttttcctcctggggagcctcaaatgtccttgttggggaggcccaggcctcctcaggagcaccttggttcccagatattgtaggaaccagagatcagagacccagcttgtgggatggagggtggggggctagtgccccacagccctggaggttgtggtagattccaggagttggaaacaagctgggcaatatagcaagaccctgtctcaaaaataacaattaaaagattaaaaaaaaaaaacaacaaaaaacgagtgagagttatctgatgcttctcattctcctggtattaaatctgggaaaagttcatgtgaatttatgtgggaaacaggatcagtgaaagaactagggagagttgcctccgcatgagcacagaggctgcattatcatttacatagagcctctccattgtgccaggcaccgtgccagcctccaggtatgcaaaggtgaacaagcagacattgttctagcctttggtacttatgatttggaccctaataaatatttagttccaaattgtggatagtgttgcgaagggaaaagctcaagttcttagaataacagggaggcctggctgttgtgatctggaggatgagaagaggcctctacagagagaggcctgaaggagtggtagcagatcgtcagggcatgtacctggagggcctgtgtgtgtgagctccaaggcagggatgggcaagttggggaagttggggaactgaaccagggagagaatctacacaaagagtccagaccttaccataagattaggaggtggggccgggtgtggtggctcgctcctttaatcccagcactttgggaggccgaggcaggtggatagcttgagtccaggagtttgagaccagcctagacaacatggtgaaaccctgtctctgctaaaaatacaaaaattagctgggtgtggtggtgcaccgctgtaatcccagctactcgggaggctgaggcactagaattgcttgaacccgggaggcagaggttgcagtgagtcgagattgcgccactctactccagcctgggtgacagggtgagactcagcctcaaaacaacaacaacaacaacaacaacaacaacaacaacaacaacaacaaaattagccagacatggtggcacgtgcctgaaagtcccagctgctcaggaggctgaggtgggaggatcacctgaggctggctgagatctcatcactgcactccagcctggacaactggagcgataccctgtcaaaaaaaaaaaagataaaaagattaggaggtggctagaggcccgatcatgtggggccctgaaaggattttgagctttgttccaatggaaagccctgaaagccggggatcagcggagtctggctgggtgtggaaagtggatggaagaggtaaaagcggaactggggattgtaggcgtccgggaaaaaggtgatggctacctggcctagggtgaggggcaatgggattgctgtgactggccatgtcaggtgctgggggaacaagagatgagggtaatgaaccctggctccagtgatgttgtcacaggccttccgactcaaccattctgaaaagaactctcctctgtcctaataggcctttcctcaggtatgcaccagttctccaaaaattaggtctatttttataattttaattttttggttttttttttttaagacaaagtcctgtcaaatcggttcctactaatggtctttaataataactttctgtacataacagattttgttcttttgaagagctgagtggtgttccatgacgtacacctatgccataatttatttaaccagtggtttctgctcttgtcttcctcctttttcaggttgaccagtatctctaccacatgcgcctctctgatgagaccctcttggagatctctaagcggttccgcaaggagatggagaaagggcttggagccaccactcaccctactgcagcagtgaagatgctgcccacctttgtgaggtccactccagatgggacaggtactgcatctgggggatggctctagctgctgcgttactcaggggtgatttagttggctttgctcagggacccaaataactcaaaagcctcagaaaccaaccctggctaagggaagcatccagggaattgaatggaaggctgtgtgacggatggacaggaagcttgggaaaagctggcagtcctggcagttaagggagggcacctttgtcagccctactgtggcatcactgttggccatttgttttctacctgtgtgctgagaaaggctgcttggctcagtttggcattttatggtcccactgagattgcacgcagtgatggtgatgaactacaacaaacgtacctcacgtggccacaactgtaggccgtgggagccgctctgtggctcacctgtgcatgctctaactgggacgccggacgccgtgtaggcatgtgggagggacagtgtagtgcagattgacctagatttttttcttgagccccatgtaaaaagtactagaaatccaaatagacttggacaaagtatggagcgtcacagtgcatatatatatatttttttgagacagtttcactcttgttgcccaggctggcgtgcaatgatgcgatctcggctcaccgcaacctccgcctcctgggttcaagtgattctcctgcctcaccctctggagtagctgggattacaggcatgtgccaccaagcccggctaattttgtatttttagtagagatggggtttctcatgttggtcaggttggtctcgaactcctgacctcaggtgatccgcccgcttcagcctcccaaagtgctaggattacagctaccgcgcccgctgccacagtgcatattaaggaattaaaggctcagaagtcctgcaatacaaacctattaagctttgtttaatcatcttatttggatacagagtacttttttttgagatggagtctcgctctgtcacccaggctagagcgcagtggcgtgatctccattagccagaatggtctatatcttttgacctcgtacccgcccacctcggcctcccaaagtgctgggattacaggcgtggctaccgcacccagcccagaatccttattttatggtacaccacccagcaagtgatttaatcaggcaggggaaaaaggatcacggtggagattcaagttggaaaggtccagtggattagggctaggtcactgaaggccttgaatgcaagcctaaaacatttaatctctgcagtagcattggggagtaaatgcaaggttttgaggggtgtcttggtaatgttacatcattggcagtataggtagagtggagggggagcgaggcccagctggtagagcacaagacatggctctggtgggtgggcaaaaagagtattcaagggtggggcccggctgttgagcccagctgcctgggaatggcaacatcccagagaaggggaccgaacaaagttgtgtcagagcttttatttaatcctcataataggtgcctccattttagagatgaggtgcttgtgaggcccatgacgggtggtgggtggggggtaggtactcacatctagaggacaggagagagaacccaaggggcagctgccagggcagaggaagaaccaggaggcacagtgtccaagaatctaagggggacgagatctccaggaagctggcaggtcgctggtgaggcatctacaggggcgttgttgggaggggagtaggggcagggcgtgggtcagggcttgttaatgccacgcgcctgtgctgtttccagcacatgtgtgtccttgaggctcatctccctaagtgcctctagggacctggttcgtctgagactgtatcgttcccaaaataagtaagtgtttgctgaagccttgggacccagcctggacccagtgctgagggtatgaccttgcttaggattgtttcctgagtgtgtttcttggcccttcaaagagcccctcgaggtgaggggcctcttatctcttccatgtcctctagattggcatgtttacctaccactccctctgactggaaaccacacccacttctgagatttttatttgacattcagataaatgtacacactccggaaggccagggccttgtctttatttcacccagcactaacactaagtaagtaccctaaatcttttctaaatacatatgggctaaggactcttttgggcacctcaatgtattaactcatttacttttcaaaaacctttatggtaagtacaaattttatccacaatttttagatgaggaatttgaggttcaaatgtcaaacaagttgtccaaaatcctacagccagtgggaggccgagttaggaatcaagcttgtgtaagccaaagttcaggcatcggtactgcacgtgatgtgttatatgtgttcatgtatgtgttagcctgtgcacttggcgctggagcacactgcaaatgctcaactaaaatttttttggaacggagttgggactgattgtttggactgtattataggcaggtgaattaagtttgttggggagaactaattatggggcaagctttcaaaattctcattgctttcctgaagctggaggctccaagacctcccatgcaccttgaagcttgcactgtttgcagcacatactggaatgtcttactcactgaaacaaaggaagtggcccctggaataatggagaccagattgcaggaaacccacacctaatccctccctccgcatttgcagggggtccataggttagctcctcacctccatactctctgggactcagcctttgcttttgtaaagtaaagaggttggacctagcagttctagtctgttctgcacatctactagaactattgtgctagtctattcacacaaacacttctgagatcctgtaatgggagataaacccttggtgttcattggatggtgtcttagttcatttttgtgttgctgtaaagtgggacatatgtatatatgacaactcagcaattccacttccaactatatgccctgaacagactcctgtatgaatccaaggagacatggctgaataatgttcattacagtgttgcttaatcgcacctataatcccagctactcaggaggccgaggcagagagaatcaatcacctgaacctgggagatggaggttgcagtgagccgaagttgcgccactgcactccagcctgggtgacagcatgagactctgtctcaaaaaacaaacaaaaatagataaatttaaaaaaaataaagtggtcagcatcagggctctcaagttttgctttgtcagttgggggtatgagttatggaatatggcagtgaaaataggtgactcctaagttgatacagactatcaaaaatgaaaattctctattgtcagcaccccagtgaagtgctgcgaggaaaggccgaggtgaagttgtgttagcgattccccccatgtggtcgcacacagcctgggtgcctgccgctgctgctgggggtgaagctgcatccctctcccacagaaggctcgaggccttttctccaggggcacctgttcagtgccacctttctcagaacattcgtttctcagcccgttcatggctagtattcttttcaaacctgagaaaccaaaccccagatctagagggagccaatttttaaatccatagctttctaacttttctgggctatatcttcacagcaagaaacacatgcatataaatatttatatgaaaggaaataaatttggggaccagaatttattcttaaacatgatgaagttgggtttgtcttctattctttaagaaagttgctagtcagaacctgctaaatgtttttcactttgcagtttgaaagccactgccttaaatgatccttggcccagtttgattctagatgagcatttcctttcttgctggcacgaaatatgtagtttcaggacagtgtggggtgagaggtgagaatcagaattataggttcaaatgggtttgaattcaagctgtgtgcttcagagcgatttatgatgtgatcctctatttcctcatttgtgaaaaggggaaacttcagggggatcggttttctgagaattaagggagaatcagatatgtgactttctcacatgtgttacaaacactcctgcagccacaaaccaccactgcaaaaggcactctcattgccaaatttactaagaaaaggtgtgtaagactcccaggttttaattttggaagattggcatcaagggagcaggtgtgagggttcatccccatcaccaggggccctgcattttggagtgaagaccaggccccagctcttataccagctccaattatctaattgtaatcaaagtcctattagaaaatgtggagaaaccagaaagtttcaggccatttatttgtggtggaggcctccccatcacggcttatgggctcttgtgtgagaaggcagggaatgtcagtagccactgaaccccgtaggggtgaaatgttcaaggtaaatcgtgaagtacctgtgcttcataggttgtgtggcctacacagtgtgaagaaacacagttggcataattaaaagtgcaatagacataaacggtccaggaatgtcttactcaatgactgaatttggtgtcagccagaatacattaaaaatggtctctatttgtcgttttgcttctttcccaaacagttttaagaagttgaaagaattctatagtggtcatctatattttacttggtttgctttatcaaccccccaatccttctatccatcagtccagcttgttataattgatgcattacaaaacataaattgctgagaaagtatagtaaatactaatactgaactctagttactatgtatgctgaagttttagggttcagacgtatacttacatagtaactagagttcaatatttgctgtattttcttgtgatgtaagatctagatgaagtgaaataaatcttaagagtattatctgataaaaaaataaatagaaggccgggcatggtgtctcatgcctgcaatcccagcactttgggaggctgaggcgggcagatcacaaggtcaggagatcgagatcatcctggctaacacggtgaaaccctgtctctactaaaaatacaaaaaattagccaggcgtggtggcaggcggctgaagcaggaagaatggtgtgaacccgggaggcagagcattccagcctgggccacagagcgagactccatctcaaaaaaaaagagtattatctgatgaattgacaaatacacctgtttaatacaacctccatcagaaaagggaatgcttatacactgttggtgggaatgtaaataagtacatcctctatggaaaacagtatggagatttctcaaagaactaaaaatagaactgccattccatccagcaatctcactattgagtatctacccaaaggaaaagaaatcataccaaaaagatgcctgcacttgtatgtttatcacagcaccattcacaatagcaaagatgtggagtcgatgcccatcaatggacagatgattggataaagaaactgtggtatatatacataatagaatactgttcagtcttaaaatagaatgaaataatgtattttgcagcatcatggatggaactggaggctgttattttaagtgaaacagctccaaaacagacaaataccgcacgttttcacttataagtgggagctaaacagtgtgtccacatggacatagaaagtggaatgatagaccatggagacttggaagggtgagggtaggagggtggggggcatgagggtaggagggtggggggtggtgtggatgatgagaaattacttaacggatgtagtgggtgttggatacactaaaagccctcacttcaccattgtgcagtatatccatgtaacaaaattatgtttgcacctcataaatttaaacaactaaaaaaaacctccatcaagatacagaacattaccatcaccccagaaagttaccttgagccccttcccagtcaatccctgtacctgatccccccagaggcaatcacattctactattttccacatatgtgagttttgcctgttccagaacttcacatataaatcgactcacacagtatttgttttttatgcaagtctttttttatttgtcataatgtgggatttatctgtgttgtgtctatcagtgtctcgttccttttggctgctgattccatggtatgattagaatctgatatgaatattgatggacacccgggcagtttccagtttttggctatttgagtaaagctgctatgaacattattgcacaagcccttttgtggacacgtttttagttccttgtataaacaactaggagtggaattactgggtcattcatagaatttggtatatgtttaatttttagaaactgccagacatttcccccaaattgttgaaccatttatactcccactaataatgtatgagagctctgcctgctccatatcctcaatagcatttgttgtctgtatgtccttgtttctttttttcagtggagagttaattaaagaaagcattcatttgcgtttgctaggaaacacaccatcttgacctctctgtaggcagccctaatctgtgccacaaccctgcgtgtgactgtggtaccagccctaacgcagttctgtcaggggccccaccacacacataggggccacacataggggcctggctttcagaggacagttccattttaaaagggaatgcaggggtcgggcacggtggcttacgcctgtaatcctaacactttgggaggccaaggtgggtggatcacttgaggtcaggaccagcctggccaacatgttgaaaccccatctctactaaaaatataaaaaattagccggttgtggtggcatggacctgtaatcccagctactggggggctgagacacgagaatcgcttgaatctgggaggcagaggttgcagtgagctgagatcatgctgctgcactccagcctgggcgacagagtgagactccgaaaaaaaaaaaaagggaatgcaggaagaattgatagcatttaatgagcacccatggtgtctgtactaggccatttacataaatctgttttactctccacaaaaactttacaagagagtcattctcactttaaaaatgaggcaaccaaggctaaaaaaggattgatggctgccaaggtcacctgtgggcagatggtgacagttgggatgtaagcatagatagtcctgactccacggccataagattcacagtttacattggcttgtactgctgaaccaaagtttctagggaaaatcagatgattatctttttaaatggatcctaaatacgagttggctttgtatcattccaataagaagctcaagtacaacccaactgaaaatgtgccagccgcatgttctaacttagaaatgaagtaactgtggtgcctttatcacccttgtcttggcaagatcgtttggttataactatgccttatgagacagagtgagggtaaggcagtgtcagatcgatcatttgactcttcttcacctcggaattgtgaattatgttcacaggtaagtatacctccatcctctagccagacttaaaccctctagagagcagggaaccatgatgctgatggtgacggtgatgatgatgatgataaaaattgtagacatcgttagtgccaggtactgtgctgaacgctgtgtttgagctatctcatcatttcttacagtcatccagtggtaggtacgctgaacttcactttacagaaaaaggcaatagatttggagcaattaggcaacttgcccaaagtcacagtgagcaagtggcagcattgggattggaacttggccagccaaattgctaatgcctgggcttttaagcacaccaccagtggcacattggtgctgtgctgctagcacaatgtgtggattcttctcttactaacctaggcctagctgttcagctcattcaacagtcctctccgaggcttggtcctctgtgcagcagcagtgtgctaagctgcctcgtgccctttaaagagtgaaagttgtgctggggagataaggcccatgtagacaaaacaattagagatatcgggccatataatgcaagcacatgatgtgataaagggagaccgggctggtgatacgttgcatggaagctggttaaacctgaaggaagcccttatcttggttgctctgcattatattaacaactgtacagcggagacatacatccagagctagcacacagcaagttaattggggtacttacgtagtccaggcgatataaattgaagattgtactgatagatagcctcagtacagcagatggcacttacattgtcaggcgttgtgccaaacgccttacacttccttgcactgaatcttgacaaggtgcgtgtgtgtatgtgtgcgtgtatatgtgtgtgttttcctgtgttcttgttctgggttgtggagggaggtgctgactagaaggaggttatcgttacccttttaaaacagatgatgaaatctgagtgtcagatttctaataaattgcccaaagccacatggctaatgcatgttagagtgggatttgaacccaggtctgcctgcctaaaaagctgaacatgctcagagcttacacaatattgaaacataatcatgttttaaccctttgaagagtggtttcacatctgtggggctaattacacctctctgtgactggcacgtattttgagcttaagaaacacttcctgggtaaaaagagcaccagagtggtgcattccaagaggtgtcctaggagctttagggtgccagtcatgtgttttacgtgttccacacccctcccttcagttggagcagctctgtttttctctattttacgttgtggcatttggcccaccaattttatttggaaataagcattctgttgcttaaaatggtttgaaaacaaatgatgtagaagatcagatcactccattcctagtctgtaccagacaccagcgttaactgtgattcagtgcctttaatgacacggagtattgaatacttctgtatggctgagctcttgaatggtggccggcattgcattgtaatggagtaattggaatcctggggtttaaaaagaggctgccaggtgtggtagtgatcatggcgattccgggtacatggaaaatacgtgccttgagacctgtgtcttgctacattacctgcttaggacttggagatgtatcttttcggtcctcgtttcatttggagtatatgccatacattctcagagcagtccactgttgtgtgctagcaggtgcttgaaaactaaaggaaaaaaacaagatcccctcaacccagagtcaccccatagaggatgattggaatgttcagtgcagttacctggggccactggaaatgatattgtagggcagaaagggcaggtccctttaggggcattaagttataaatatagggctggttcaggaactgaatgtgaaagtatgcgtttgtgactttgacccacctccaagtttacggctgcatgcctcaggcattgagtgacaaggaagagccagaggctctaaggttggatcaaatacagtccagtgttctgatttgcctgagcctctcccagttttggcattgaaagtcccatgtcataggaaacccctccatcctgggcaaactgggatggttggccaccctacatggccctggagctcatgccctcactgctgctcagctcaactgtggcagcagcccttgagctgcttccttgtgctatcccagccctccacagtgccactagagccactagagcccttttggaaacagatctgaccttcttaagaacgaaagaaagtccttggcaatggtatttgctgtgcgtttatagccatgtcacgtgagccctatgttgtagctactctggacatgccattttttggcacccacaaattaatgccaacttatagttataccaaacctctgtcctgccttactggacaccagagcatgccacaaacctccatggccttgacagggagaaagggaacaagtaccttgataggatctattaacggaggaataatttactgtgtttcttctttgttgttgttgtcatttgtttgttttttttttgagacagagtctggctctattgcccaggctggggtacagtggcgagatctcagttcactgcaacctccacttcctgggttctagtgattctcttgcctcagcctcccaagtaactgggattacagggctacgccaccatgcccggcaaatttttgtattattagtagagacagggtttcaccatgttgaccaggctggtctcaaactccagacctcaagtaatctgcccgccttggcctcccaaagtgctgggaatacaagcatgagccaccacacccagcctgtgtgtttctatatgttcacatacaacatagtccatgtttcacgtaagcatcacaaccgctgggagatgtcagcattatgaatcctgttctacaggtgaggtgacatgctcagagagccctgtgatgtgcccacaccacacaggtagtgaagctgctgagctggaattcaaaatgaggcctgcctacctgtctaaggtccagtgcctaaccactgctctggcatgggcacgtaaccatgcgtgggcgttacgagagggcccgtctcaggattgccgagtcacagtgctaggcctgcctcagattccggacttggaaggaatgcagtcattggctatggtggttgtggcttcctatgtgtgtggaggagggctgcagggaggaggggtgtcagggaatgtgtgttccagaggagtcctgtaagcaaagcaagagaggacctccttcctgggaacaggttcatcagcaatactttattatttgtgttttcccttcagtccatcagaaaatcctgcacaccacccgttcttggtggagctgtggcctctgagtccagctgggctggcctcggatgatgacccaccaggggcagcc

SEQ ID NO: 610 - DNA, 16196 bp, Homo sapiens; identical to SEQ ID NO: 497
  source 1..16196: mol_type = other DNA

SEQ ID NO: 611 - DNA, 32744 bp, Homo sapiens
  source 1..32744: mol_type = other DNA
agatactgacagggcagataccgtcctcacaatacctgcccagaaagacgagaaagaggaggaagaattcctccttccaccaggaattctgtgggaagcacataagatttcatgctactagtttattcccaagagaagctaccaaagcctggtaactctaccaactctaacttttgtgcctgtaagttctcttctcctgggattacaactaattgaaacaggaattcaaaggagtctcggaggactgtaagaagaatgcttcgaggccgatccctctctgtaacatccctgggtgggcttccccagtgggaagtcgaagaacttcctgtggaggagttactgctctttgaagttgcttgggaagtgaccaataaaggtttgtactgctcctgaaggtggatcagtacaccttcactaggtgactgaggaatgtagagtaagatttcacagataactctctagtgataaccaattgctagtgagtgaggaaagcatttaaacggaatatatatttaggctacatttaaccttgtctattacaacaggctatgaatacagacttgtgtatgtgttgaagagggagaaagttgaaaatattagccattgccatggaatgtgcatttaaattaaaatttaaaatccatattatgacaacatagaaataaaaagttaatatttacattttttgttttaaaatttttctcagcaaaatagtataattaaacattttattttaggaagatgtatatgtgattagaaccagttggaaacctcaactctacattctgttagtaattatatgaaatgcttaagaatgtttcatattcacaattagcttggaattaatgttttaattcaggagcttctcaaaaggcaaaatactgtgctcctttcagaatgaaagtaatttttttcttcaatgctatgcttatgtaggaattataaaataaagaaaatcaaattgataaaacaatttgcgagtgaggtataacctcatctgtgctgggtaagagaaggcaaggtagagaaccacaatgtaaatgattttgaaaataaagacatctgtaaaattataaaacaattccttgtgggtttatactctctagtttaaaagtgtcaagactattgaaggaacattagcaaagaaaaagtcatggttttgaaggctgagttcctcaagatcttgaagaatcaagccaactgattgctgggtaaatggcagtgatgacttgtgtgatttaaacgatctgaaattatgtcatgtgttgtgatatataacacatttatttttcattttgtgtttactatttcatgtctattacagtaatctaaaggatctgaaataataaccagaatgtgatatattacttccttcttttggctaatcagagccagcataatctcaaaattaaatgcattatatatggcatgcattctgaaaaatcagaattcaccttatactaactgttcaaagttctcgtgtgtatgcattcataaaatcaaaattaaaagtcaattttgcctatgtagaagtggacagaatgcatataagagaacaaagcacggtcttattctctgtagtttagtgagaaagaatctaggaggacagaaaccttattacagagaagtgaagtattttatgtgtacctgtttctgttgtttctttttaaattattttgtattcttttcctcagagatctttatcctgaaatgagcatgtgtttttaatgtcctttttctagtcacaaatttttccagtccagtttttaaatatgcccaaagttcctgggaacagaaccatctctatcacatgtgaatcccggagtatgccttgaaataaaagttttctctagagagtgggcaggagctcaaggacatagcttattggtggataaaactggaagggacttgttagcactgggaatcagtccagaagatctctgcacaagttcctgcacctgagcagagccccttctgctttcctcttttctcatcatttaacaaacattaatggagcactgttacctgggcactgggaacacgccagtgaaactaagttattttatggatcttataatcagtagcatgtgtgttgatctcagggtctagaacagtgcctggtacatagaaaatgctcaatggatttttttttgaaaaaatttgtttttcaacccctaagctgcctttaatacttattttctatcatttccctttcaaggggaagggaagtgtttttgtggagaggtccccacaatgtgatttacacaagttgatatcatcttcaatgtatctttattttaatattatcatagcctggtatggtttgagattttcatatagatggataattattgtgtttattcctaataatacattgccactatagtttctttaaatttaatgatttgaatttttacttccctgcatttcatagtagtgatatgaggtatcttagagatcatgaatcccactcctccagttcatagagcaaattgattcgtagaggtatttaatgatcaagcaaatggcagagttaggaccaggatttaggtcttttccaaggccaattcacttttttactattatgtaagaattaaatattaaaacctcagttttcaaaggaaatgtcctatagatgaaagaacacagtacttgcagtcaaaggtcttggatttctgaaactttctgaaaaagaaccccttaaactgaataacagtttcttcatgaataaaatgaatgttatactctccagttatcttaccatgttttctggcaaacaaggaaatgtattcacatccaagaaaacaaaaggtttcttaggagaagaatcccttgctgccagaattttgcccatgaacaatggaaacgtgaaaaacataacagatgagagagtcacagttagttttgggtactaattctcagacttcaaaataacctttttaatttattaatattaaccttgaaatttattgcttttattcattaatccattttattattcagtaaggattcatcaagtgtctattaggtatcaggcactgagaggcgagggagatagagttaagaatacagaactgattcttaatcttcaagaattgacaaatttgtagaaggtagacattgaacatacaatacagtcaaatgtgatgagtgtgagactaagggaaccaggtgtcctaagactatacagtgtaccgtggaatggggagtggtttctaacctagttacctagaggtttgggaaaaacctctctaatgatgagatgtttgagctgacacttgaaggataaatagctaaaggggagaaagcgttctatgtgagagaactatatatgccaagatgcagaagtgttctctgttcgaagatctgagcggggctcagagagggaaaaggagaggagtatgagagaagatgggagagacctgcagggactagattgtgaagctcagggggagttaatagccttaaggagttttgtctccagggtatgaacaatgaatgaggagtcactgaaattctatccacagtagtgggaagtactaagtagtcaggtatgttttggaagaagcactgttaccagttgagggagaggagaggagggaaattagactgtggtgtgacccaggatggaaagttttgcccaaatgtgggggaaaaatgtttactctctcctttgcccaggtcttactacaatcatttcttctgcacacacttgctcagaacattacaaactctggagaaattaacatgttaaggatatttaggatcattaaaaaagtttaataaatgttgtcacacataatgaaagttaatttaagaattgtaaagacttgagcgatgtagtccctaaataaatgcttccctcttaaaatggactagaaacaatttgtttttgcctaagccaacgtattgctggacataatttacctgcttcctcctcagtcttgacactacacctctgaattacatggtacaagtggcacagggaagaattcagaaaactagagtcaaagtggttatggaagaaattataataatgagtccactcttctaggacaggagttctaaaggtgaggactttgatataagtgaactcaaggagtttctaaaccttcagaaattatatctaaaaattaggtgcacgtatatagaagtacttttctctgagaagaggacttcacacttccatcagcttcctgaaggcccctgtaattgccgtaaagaacaactgctctaaagtttaatactaggctactcggctgttttttgttaacacagaagttttccaaatggcttttctctagagcaaaatgaaaaggatcccatccttcccgagacctaacgatgtttatctttcgtgatactgtttttgttcttcctctttttctcctaccccccaccacttttaaagatccatcaaggcccagcatggtgattcacacctgtaatctcaacacttttcaaggctgaggtgggagaattgtttgagaccaagagttggataccagcctggggaacatagggagaccctgtttctacagaaatttaaaaaatttctctagctggccatggaggctcacacctgtagtcctagctacctgagaggctaaagcaggaggatcaattgaatccaggcgttctagtgaggcttcagtgagcaagattgcaccattgcactccagccggggtgacagagtgagaccctgtttcaaacaaacaagcaaaagcaaaaagatccatcaatttgttgctccattcctttacttactatcttgctgtctacagctaaagtcagactgcatgatttggaattccaactccaccatcacctgggtaatgttgagatttattacatagcatctctgtgcctcagtttctccatatataaaatctacctgtaataatgttgtgaaaattaaaagaaataccagttgtaaatcactcagaactgtgcctagcatttaataaacactctgtaggtattagcttatttctttataaaatttattcataaaatgaggaagttagctcatgtattgtcataccagctttcactttgaatgagtccataattgcatttttaaacacaaaaagagaaataataggaaaaaatatgtatacatcaatgttacttcaatcacgggatgcatagtaattaggatttctttgccctaattactgatgtggataagccggtgggccatgtcaatggcatctcaagctgttatcacaccatgtgaaacacacgatctatgtaaaaactatgcttggttgcacagcttcaaggaaagcactagtctactcacttccttttcattcagcatgctatgtctaggcccctttcatataaaatatttggagctgccattgtaggtagtgcaggtggtcttgttcaaagtgtgagtatcacctcccactgccaagactgcagctgctttgattttaactgaggatctagaaaagtgctgggaacacaaatatttgctgacctttgtcacaagtagcacctaatctccttcctaccagacctgctgccttataaaatgatgttctaagtgtataatgacttcctctgcttctgcaactgtgttttggaacaggagggtgagattagtagccacacacactgaaatagtcatatgacttccaaagtctgtaatttttaagcatatacaaaatagtgaaatttctccatatgtgtataatatgtatatatgtgtgtatacatatatatagagagagagacagagagagatgggggagagagagagagagagcgagagagaggcagagaaagagatccttattttggctgatatctattctatacttctttgaaatagtgatttttagtaaattggcagtgttgccagatgacgacttagagttttaaccacctcattgttatatgtaccatggtagctcatcttttctttcaggtgaaagttgtgatactttgtcctcacgctaaacatagcccccatgttgttccaggaaaatagagatcaataaaatacaaagtacttgtttgaaagtgaaggttaagttcaaattcaatgacctacgctgtggtaaaacgatcattcattaatgatattaagtattttcttttttaatgtcagaataaaaccatttatttgcagatttaaaaatatatatgtgtatgtaaatctccttggtttatacctcaaatatgaaaataggaatgaccctgtctctatgctcttgcattcacttatattctagcttgttaagagagaagtttggggcaaaatgtgctttataaatagtaaaaactgaggtaaactatagcacaaagtgtgctatataaacagtaaaaaccgaggtaaaaatatggggaggacaaaaaagggctaaaatggtgttggaatataagaaatagcagtaaaagaagctcctcacagcaagacagtacagggaaatgtctggagggacaaagatttacttacaatcaggcctcaaccaatatgagatcgactttcttttattgatatatgacgtgtttatatgtatcaggtacatgtgacattttgttacatgcatataatgtataatgatcaagtcaggtatttggggtattcatcacctcaagtatttatcgtttctatgtgttaggaacatttcaagacctttcttctactattttgaaatatacaatatattgtttttaactataatcaccctactttgctattgaacatcagaacatattccttctatctaactgcctgtttccattaaccaacttctcttcgtctcccttcctcccataacgtacacacctttctctacctctggtttctgtcattctactctctacctacatgatattaacttttttagctcccacatatcagtgagaacatgcaaaatttgtctttctatgcctggcttatttcgtttaacataatgacttccagtttcatccatgttgctgcaaatgaaatgattttatatttgtatggttgaataatattcaattgtgtgtatacaccacattttcttcattcatccattgatggacacttaggttgattccatatctttgctaatgtgaatcgtgctgcaataaacagtgtggtaccagtatctgtttattattctgaattcttttcctttggataaatacccagtaataagattgctggatcttatgatagttcaatttttagctttttggtaaatctacatattgttttccatagtggctatactaatttgcatgcttaccaatagtgcctacgagtgccttttccttcacatccttgccagcatgtgttatttatttattaatttatttaaatcatgatgattctaactggcataagatgatatctcattgtggttttgatttgcatttctctgatgattagtaatgttgagcaatttccccatacccattgtgcatttgtatgtcttcttttgaaaaatatcctttgccaattttttaatgagattatttgtttttccactgttgagttgtttgagtttcttatatattctggagattaattccttgtcaaatgtatgcaaatattttctcgcattcaacagcttgtctcttcactgtgttgattgtttcctttactgtgcagatgtattttagcttaatatagtcccatttgtctatttttgcttttgttgcctgtgcttttgaggtcttggccataaaatctttgcccaaagccatgtcttgaagtgtctcccttatgttttcttttagtagttttatagttttaagttttatatttaagtctttaatccatcttgagagtacgttttatatggcaataaataggggttgtattaggccatttttgcatctattgtacaaggggttgagttcttgatttgattctccatttggttgctgttggtgtatagaagagttactgatttgtgtgcattcatcttgtatctggaaactttgctgaattattttatcagttctaggagctttctggaggagtctttagggttttaaaggtaaatgatcatatcatcagcaaacagtgacagtttgacttcctctttactgatttgaatgccctttatttctttgttttgtctgattgccctggctaggacttccagtactatgttgaagaggagtggtgagagtgggcatccttgtcttgttccagttctcagagggaatgctttcaacttttccccattcaatattatgttggctgtgggtttgtcacagatggcttttattacactgaggtatgtctcttgtatgctgattttgctgagcattttaatcataaatgtatgctggattttgttgaatgctttttctgcatctattgagatgatcatgtaatttttgtttttaaatctgtttatgtggtgtatcacacttattgacttgcagatgtcaaaccaaccctgcatccctggcatggaacctgcttgatcatggtggattatctttttgttatgttgttgaatttggttatctagtattttgttaaggattttagcatctatgttcatcaaggctatcagtctgtagttttcttttttggttatgtccttccctggttttggtgtgatgctggcttcatagaatgaattagggcaggttccttctttatctgtcttgtagaatagtgtcaaaaagatggggaccaattcctctttgaatgtctagtagaattctgttgtgaatccatctggtcctgaacttttttttggttggtaattttttaattaccaattaaatctcactgcttgttattggtctgttagtaaatttattgaggctcatttcatggcctatcatatggtctaccttggagaaatttccacgcgctgttgaatagaatgtgtgttctgtggttattggatgaaatgttctgtatataactgttaagtccatttgttctaaggtataatttaaatccattatttttttgttgactttctgtcttgatgaactgtctagtgctgtcaatgaagtattgaagtcccccactattattgtgttgctgtctatctcatttcttaggtctattagtaattgttctataaatttgggagctccagtgttaggtgcatatatgtttaagattgtgatattttcctgttggacaaggccttttaccattatataatgtccctctttgtctcttttaactgctgttgctttaaagtttgttttgcctactcacttttggtggccatttgcatgaaatacctttttcacccttttaagtggagcatttaggccatttacattcaatgttagtaatgtaaatgcctggctatgccaggcaggaatggcctgctcagggacccagtgagctcccagggcctttctcactgcttcctctacacctgtattttgctcagctctctaagttaactcaactccaggtaaggtcagaaacttctcccacaaacagaccttcagtttctccagtgggagtgtgtgtttaggagaggaggatctccctttcccacttccgcagttggggcactcacagtatttggggtgtctcctgggtcctgcaggagcaatctacttccttcagagggtctgtgggtcctctcaggattgctggtttgttcttgcagtctatctgcagctaaaattcacaatgcgagcctccacatgctgctctgtccatctgagttggagctgcaatctaggcctacctcccatccgccaagatcctgagaagttggggattatatttcaacatgagatttggagggaacaaacatccaaaccatatcagcagtccagttttattcttttgcacatggatatccaatggatatccaattttttcagcaccatttcttgaacactgtgtcctttcctcaatgtatattcttgtcacctttgttgaaaatctgttggctataaatatgtggatgcatttctaggttctctattctcttccattggtctaagtgtctgttctaatgtcagtatcatgctgtttaggttcctatacttttgtaatatactttgaaatcaggtagtatgatacctctagcattgttcttttttcacaggatgactttggctactggagctattttttaatttcatacaaattttagattggtttttccatttctgtgaaaaatgacattgctattttgatagcggtcatatagaatctgtagattgctttgggtagtatggccattttaacaatattaatttttctgatccatgaacataggatatctctccatttgtttctgtccttttcaattcttttatcagtgttttgtagttttccgaatagaggtttttcggttccttggttaaatttatccctaaatattttattttttagctattgtaaatgggattgccttcttaatttccttctcagctagtttattattggtgtgtagaaacattgcttgtttcatatgctgattttgtctcctgtaactttactgaatttatttttcagcgctaagagtgctttggtggagtcttggtttttctaggtataaaatcatgtcatctggaaagatggacagtttgacttcatcttttcctatttgcatgccttttctttctttctttctctgacctgaaagctgtggctaggacttccagtattatattgaataggagtgatggaagtgggcatccttattttgtttcagttcttagaggaaaggcttccagcttttcccaattcagtatgatgttagctgtgggtttgtcatatatgacttttattatattgagatatgttccttctatgattggctgcagatagtttttatcatgaaggaatgttaaattttatcaaatactttttctgtatctattgagatgatcatatggtttttgttctttttgttgatgtgatgtatcacatttattgatttgaactgttcttgcaaccctagtataaatcccacttgatcatggtgtattatcttttggatgtactgttggattcagtttgctagtattttgttgaggattttcacacctatgttccatcagggatattgacctgcagttttatttttacttgcatccttgtctggttatggaatcaggataatactggcctcagagaatgagttagggagaattccttcctgtttaatttttaaaagaatttaaggagacttgttagttttctttgaaagtttggtaaaatttgacagtaaagccatctggtcttgaaattttcttttttgggagactttttactactgattcaatttcattattcattactggtctgttcaggttttctattctttcttaattcaatcttggtaggtggtatgtgtccagaaatttattaatttcctctagatttttcagttttttagtgtatggttgttcataatagtctctgataatcttttctatttctgtggtatcggttgtaatatattttcttttttatttctgattttctttatttcagtctcttctctttttcttggttagtctagctagagctatatccattttatcttttttaaataacaacttttcattttgctaatcccttgttgttgtttttctctatttcattaagttcttctgttcttcattttttctttccttctgctagttttgggttttgttcttgcttttctagcttgttgaggtacatgattagattatatatttgaaatctttctatgtttttaatttaagtgtttattgataagcttctctcttagcactgcttttgctgtatcccatggcttttcctatgttgtatttcaattttcatttgtttcaaaaaatttttgatttccttcttaattttcttcttgacataacgttcattcaggagcatgttgtttaatttccatgtatttgtataggttttaaagtttttcttgttattgatttctagttttattccattgtggtctgagaagatgcttaatatgatttcaaatatttcaaattagttgagacttcttttgtgttctaacatatggtgtatcctggggaatgcgtcatgtgctgatgagataaatatattctgtagctgttggatgaaatattgtgtaaatgttagatccatttggtctaaagtcaagtttaaatccaatgtttctttgttaattttctgtctagatgatctatctgatgctgagattagaatgttgaaatccccaactattattgtattggattctatttcaccctttatatctaataacatttgctttacatatctggatgctctggtgttgagtgtgaatgtttagaattgttatatactcttgctgaattgttccttttatcattatgtaatgacttttgtctcttagtgttttttatttaaagtcaattttatctgttataggtataactacttttgctcatttttggtttctctttgtatggaagatctttcatctttttactttcagtctatatttatctttacaagtgagataagtttcttataggcagcttacaactgggtcatatttttgttttaaatctatttagccagtctatatctttcaagtaacaatttaatccatttacatgcaaggctattattgacatgtgagagcttattcctgccattttgttaattgattcctggttgttttgttttttttttagtttgtttgttttgtgtttttttcttccttccttccttttctttctttcattctctctctctctctctttctttctttctttctttcttattatttatgattgtggtttggtgattttctgtagtggtaacgtttgagttctttctcttctttatttgtgttttgctctaccagttagttgtatacctttgtgtgtcttcataatggcagtgtcctgtcactttcatgtgtaggactcccttaaatatttcttgtaaagccagtctagtgatagtgaattccttcaaatttttcttgcccagaaaagattttatttatccttcatttttgaagaacaatgttgctgggtataacatccttggtgtcatttttttctttcactattttgaatatatcatcccatcttctcctggcctgtgaggtttctgctgagaaatctgctgttaatctgttaatcttgtggaagttcccttataagtgactagacattttgcttgctgttttagagttcttactctttggcttttgacagtttgactataatgtgctgtggagaagagctttttgcattatattatttgggaatttctgattttcatttgtctggatgtctacatttcttgctagacttgacaagttttcagctattgtgttgttacgtaggtttcctacacctttcatgttctctttaccttctgggaaactgcaaatttgaatatttgttcactttatagtgcctcatatgtcacatacactttgttcattctttttttttcctttctatcatttgaccagctaattttaaaagacctgtcttcaagttctgaaatttttcttctgcttgatctgatctattgttgaagtttttgaatgtattttgtatttctttcaataaactcttcagttacagaatttctgtttggttcattcttgttgtatctatctcttgggtaaatttctcattcatatcctgaattgtttttctgatttctttttattgtttatctgagttctcttgtgtctcactgagcttccttaatatcaacattttggattcttttttccagaattttataaatgtcttttttttccactggcttatgttgctgaagaattattaaattcctttggaagtgtcatatttcttcacctttttatgtttattttgttcttgcattgatatctctgcatctggtgtaatgattgctgcttccagttttgtaaatttgtttttgtaggggaagacttttttctgaagatgtatcttggtgttgattgagtagggcactttgattttgatttctaggtgcatacagcagcatagtcttcatattattttttttcagctgccaacagtatcatcagtgtctgtgattttttcagtggcttagggtgcatttgttagtgaaggtggtgatgaggttgtgctggagacaagaatatcaagtgggccagtccttggccccagtggtggtggtgggcctagcattcctgtccttgggccccatggctgtgtacattggcactgatggtaatgagtctagttgggttgattctttggccttcaggcagtttgcttgggtgtcagtagtggccatagtagactgggctggtgtgtgggtcctcaggcttctggacagtgggtgtggtgtgggtgatggctgtagcaactgcaggacaaccctctggctcccaagcagtctgcactggtgttggtggtggctgcaagggctgaatgagccagtcttcagacccacaggtggcacatgcaggaggtgccagttgtgatggcagtggcagattgggtaggcccatcatcaggcttctgggagggttgcttaggtaccagtcatggtggatggcacaaggctgtctctgggttcccagacaacttgcttaggcattgaggaaggcaaagccaggctgggtgttcctgacctcaggccactcagtggtgtgtgtggacaccggctatcataggctggagtggagtgatcctcaggcccccagcagaatgcctgagtgaattagcagctactgcattgttgccctgctcttgaaggggtgcggggtgtgttgctttcagtggcagcagctataaatgggttgctggtgggcatgtgtttcagccccagatggtggctgcaagtggggtagcattttcttagggagcttataaatgtgtagcagccctgctactgggggtgggggagtccacttctaatgacacactttatccctggtgacagcagccagcagtagcactcagctgtgggtgggggatgtcagcagagcttcagggatgtagagatgcagatgatgttggggtctgaggaacgatgtcatctggtgggtgttgggctctcaaaatggcaccttgctgctcagtaatggggatggcaggggtgggacccagtgagagctccttctctggagcaatgcctttgtgcgattgctgggcagttccttatgatagtctcaaggcctgcatggtcaagggactctcctgtggctaggattcctggagtccataatgcagatgtggaccactgggagtcagtcacttaactttcgatgcactggggagcctctctggcctcacagaggatccctactgggtaggcttccttgcttccctccccttcattgccttagatgcttcctgtcacttctctgttgaattccagaattctctcttatgtgggattttctacttactattttggttctttgtggaggaggtgagtgtcagctgcccttagtcagtaatcttcaagccccttcccttgaaattttttaagctttatgtttttatttctaatagactgaaagagcataatcatattttaaacactctaaggctatatgggggactatctgaaggcctcagatgagtaaaagaagtagcgaattagttaactatgtttttcttttcatttcatttcccaaatcaaatcatttgtttcttcaaataaagaatctctatttcccccttatgttcttcagcaaataaaaatgtttgcatctaccaaagtgtatatgaatttgaaatacgtaatctaacaaacaaggatgttttaagatctctgagtaagatgcatagttgcaaataaaaggagttttcaaggataaaaaatgtaaataaaacatctaataaatgtgtaccatcagaaacttatggtatattctcctggaaaagatgaagatgaagaaaataagtctacagaagaggagaaattctttggaaattttgcatttttgtggatagtggttttgaagaaagcttagatatatttaaatatgttgctaagatgtgactcccacactttaaagaaaagttcttcattttagttgcccttgcaaattggctaagtttatttttcctcaacaaataattttgatggtttctaaaattgtccagaatttgaggaaatacttagatgtagtagatgacatcaatttatgttaacttagatttattgttggatggttaagttaatcatgtctgttcttgtccagtctagaagtttctgcttcctcctcatgtgttctattctgtcctcatcacataacatctgaactgtgatttgacagtgtccttattatcagactctgctcaatgacagtttaaacttctttttgatacagtaaaaaacttttccttaaagatgaaattcttaaggacaattagcttgtgtagactcatatgaaaattgcttgcattttggagttacattagctcttctcctttataaattaatgaatcctattggtaccatataatagcatcaacatttgccttttgtgtctcgcctttcaaagggcaattttccaaaaagtatattttgcatggctcaggctaaaagtaatgtctccagatgaagttctactttgtgaccattgattgtgactattgataagatttactatgtaaagtataagttactggaataatacatttaagaaatatagtagctattaaaacctgtagtctgatgaaatggaatatgttttgaaagacagcagtgaaaaatgagaagtaatatataagtaataaaattgctttttgcaattgagttgaagattgatgccaggatcttattacctccaggatttcacaaaggatttcttgagtcatccccttgctctagctcatgaacaaagtattgctcaagtaatcgacagattatttgtgtattctcacatgtgattattatttagtgctgtcacgggaaatatcctgcctaagtttactggaggtcttcctccccttacccctccctatgtcctcctacctggttatccttttcaatcctattactctttccttgcacactctactccagcttagggcctgggctctgaccattacctctgcctaaaaattcctcctcatgacatccatttgcccaatttcttcacccttttaattaccccattaagtgatattttgcttgctcaatttttgccttttcaatcagatctaatttattttatatttttaaaatttatttatatatatttagaaggtatgtactagttcgttatcatgctgcttataaagacatacctgagactgggtaatttataaggaaaaaacgtttaattgtctcacagttccacagggctggggaggcctcgggaaacttacaatcatggcagaagaagaaacaaacatgtccttcttcacatggcagcagcaagtagaagtgccaagcaaaagggggaaaagccgcttataaaaccatcagatcttgtaagaactcactatcacgagaagagcatgagagtaacctcctctatgattcaattacctccctccaaatccctcccacaacacgtgaggattatgggaactacaattcaagatgagatttgggtggggacacagtcaagctgtatcagggtacaagctcgggttccttacatatgtatgttgcatagtggtgaagtctgagcttttagtggaccatcacctgaaaagtgaatgttgtatccaatccgtagtttttcagtcctcaccatactcctatcctcccacctttctctagtctcaagtgtctattatttcattctatatgtctatgcttactcatcgtttagctcccacttggctctcactaaatgagaacatactgtgtttgactttctgtttctgagttatttcactgaggataatgtcctccagttctaaccatgtttctagagaagacatgatttcattcttttttatggctgagtaatatatatgtatataaatatatatacaccacattttctttatccaatcgtccattggtagacatttaggttgattccatatctttgctattgggaacagtgctactttgaacatactaatgcagatatcttttttaatatgatctctttcactttgggtccatacccagtagtgggattgcaggattgaatggtagttctgtttctagttctttaagaaatcttcatgctgtcttccataaagtttgtactaatttacattcttaccaacagtgtataagcattttcttgtctccacatcctcaccaacatctgctgtttttgaactttataatgatagccattctgactggcataaggaggtatcatatggtggttttaatttgcattctctgattattagtgatgttgaacttttttttgacgtttattggccacttgtatgtcttcttttggaaaatgtctgctcaggacctgagctcactgtatttgtcagggttccctagagagacagaactaataggagatagatagatagatagatagatagatagatagatagatagatatagatttagatataaaagggagtttattaagtagtgttaacttacacaatcacaaggtcccacaataggccatctgcaagcagaggagcaaggaagccagtccaagtcccaaagctgaaggacttggagtccaatgtttgagggcaggaagcatccagcatgggagaaagatgtaggcttggaggctaagccagtccaggattttcacatgttttttttctgcctgctttatatcctggccacactggcaactgattagatggtgcccacccagattaagggtgggtctgcctttcccagcccactgactaaaatgttaatctcctttggcaataccctcacagacacactcaggatcaatactttgcacacttcaatccaatcaagttgacactcagtattaaccatcacaagtccatcgcttgtcaacttgagcctatacacatcccctgaggtcatacattatcttcaaataaagacaacaataagtcataattatgcctaacatactaaaactatccttcgtgcaattgaaaatgcaccaatccccattgcaaatgctattacataaacttaacaatacttaaatgctgatatgaagtcaataaatcttatgtcacatgataaaggaaaaaggaagtaaaatgtatatattttcttagtacaagtgtatacagacacgaaggtgtttttaacaaaagaaggaggaaatactcatgacaattacagtccttgtatctgcaattggtcacgtgatcgtagctggtattgatgactaccttcttctgctacatattctgtattccctttgccctcagcaagcacctcagcaggtcttgtcttttttttttttttttttcctggtggagtgacccaaacctttatttgtagtcctgcctggaatggcctgtagtagtttcccactgaccttaattccaggacatggtaaaactaagagacaccctaatggatctcctatattccatgcatacgcttccttacctccattgtggagttgtagactgatttcatcttgatagtctgggttaatcaccgcagccaacactgtaactctcttcttagcctgttgacttaaaggtgggaggagcccaaagtgtccaggtggcaatcttaatttgcagtttaatggaatcattattgtgtcacctggcggcagtgttcctccctctggaactaagacctctaagccagcagaacataatgccatgggaacaggaagcaaaaattttgctagtggaacactaggggtgatggtgagtggtgccacttccacttccacttccaccctttgattcctggacccgtgaatcctgtctatgggagaaacagtaccatatattggacactgattcagagcatacacagccttctggagaactttgccccaggcctgcaaagtattgtcacctagttggcattgtaatcgtgacttcaaaaggccattcaaaagctgcttcaggatgatagggatcatggtaagaccagtaaattccatgagcatgagcccactgtcacacttctttagccataaagtgagtggcttggtcagaagcaatgctgtgtggaataccatgacagtggatacggcattctgtgattccatggatggtagtcttggcataagcattgagttcaggattgggaaacccatatccagagtaagtgtctattccagtgaggacaagcctctgccctttccatgatggaagaggtccaatataatcaacctgccaccaggtagctggctgatcaccccgaggaatggtgccatatcaagggcttagtgttggtctctgatgctggcaagcagtggctgtggccaggtcagctttggtgagtggaagtccatgttgctgagcccaagcataacttccatccctgcaactgtggccactttgttcatgggtccattggacgatgacatgagtggcctgggaaaaggctgagtggtgtccacagaattgatcatcctatccacttgattattaaaatcctcttctgctgaggtcacccattggtgagcactcacatgggatgaaaatatctttgtagtttttgactaatcatagaggtccatccacatacctcttccccaaatttctttgtcatcaattttccagtcatgctttttccaagtccctgaccatctagccaaacctttggctacagcccatgaataagtatataatcgcaaatctggccatttctccttctgtgcaaagtgcacaaccaggcacactgctcaaagttctgccaactaggaagatttcccttcaccgttgtccttcagggatgtcctagaaaggggctgtagtgctgcggctgtccacttttgggtggtgcctgcatatcgtgcagaactatctgtgaaccaggacctagtcttctcttcctctgtcagctgatcatagggaactccccatgagaccatcggtgcagtctcagggagagaaagcagtgtgtcaggagtggagaccatgggcatttgagcccctttctcatgtaacttactagtgccttcaggatctgctcaagcccaatcgcatatataccacttccatttgctgatgcaatgctgctgtgcacagcccactttatggctagatggatcagaaagcacccagttcatgataggcagttcaggtcacatggtgacttgatgactcatagtcaaatatttcgtttccaccaaagcccagtaacaggccaagagctttctccctaaaagagagtagttatctgcagaagatggcagggccttgctccaaaatcctagaggcctccgctgtgattcagcctgccaaatgctccaaacagcatccctatctggcactgacacctcaagcatcattggatctgctaggtcatatggcccaagtggcatagcagcttgcacagcagcctggacctgtggcagagccttctgttctggactccactcaaaactggcagccttttggatcactcgataaatgggccagagtaacacacccaaatcaggaatatgttgcctccaaaatccaaataggcccactaggcgttgtgcctatttcttggttgtaagagtggccaaatgcagcaaattatccttcactttagaaggaatatctcaaagagccccaaaccattggacccctataaattttactgaggtagaaggtccctgaatttaatcagatttatttcccatcctctgtcccacaaatgtctcatcaataaatccagtgtgtttgctacttcttgctcactagttccagtcagcatgtcatcaatgtaatggaccactgtgatatcttgtggaagtgaaaggtgagcaagttctctccaaataagattatggcacaaagctggagagttgatatactcctgagttcatcattttctttcatcactttgtccagcgaacttacaagcaaccaaccaacttcactatgttccttgattctccacatatagtcaaaagtattatgtatacagtagctaaattccttgcctctcacaagcgttgaatcaagagtgtcaaatgcatttattttgcataactctctaaacaattgatgccaaggattatcagtgttctccataccattagaagaagagtccttagcatatttgggtctaatcatattaagcagccaactccagaaaccccaaaaccaatgaaagaactccatccttaatattctgttcctctagaaccactcctggtaccaaaatctgtattagggttctacagagaaacagaattaataggagatatatatctatatctatatctatatctatatctatatctatatctatctctatatctatctctatatctatatctatatgagagtttattatgtagtattgactcacatgttcacaaggtcccaaaacaggccatctgccagctgaggaacaaggaagctagtcggagtcccaaagctgaagaacctggagttcaatgttccagggcaggaagaatccagcatgggagaaaaatgtaggctgggatgccaagccaatctagccttttcacatttttctgcctgctttatatcctggctgtgctggcaactgattagatggtgcccacccagattaagggtgggtctgccttccccagcccactgactgaaatattaatctcctttggtaacaccctcacagacacacccaagatcattactttgcatccttcagtccaatcaagttgacactcagtattaaccatcacagtcactttctaatgaggttggtttttttgttgttgagttccttgtagattctgtatattagccttttgttgcattcatagtttgcaatttttttttctcattctgtaggttatccgtttactctgttgattcggtcttttgcggtgcagaagcattttagtttaattaagtcccatttgtctgtttttgtttttgttgtgtttagttttgaggacttggtcataaattctttgcctaggccacatctaatttttaatcctcttttagagcctgtctttccctccaaactaaatattattttacccccatttgacacatgagctaattgagccttctgtctgttaagtaagttgactagttcagtgtaagttgtttctaattttttgccatcataatgctttagtaaacatccttttcatactctccttaattttcccccaggatggttttctagatgtggacttgctggatccaaagtgtgcatattttccaaatgtatccatatattgtggctttgtgttttaatagaggtagcagcaatattagaggagagaattaaggaacgattctagtgtagcaggacaagctgcatacaaaacccctcagacaccgagttaaagaaggaagggctttattcggctgggagcttgggcaagactcacatctccaacaaccaagctctcagagtgagcaattcctgtcccttttaagggcttacaactctaagggggtacatgactgggggctgcatgcactggtcatcagaatggaacagaacaggacagggattttcacactgcttttccatacagtgtctggaatctatagataacataactggccaggtcaggggtctatctttaaccaggcccaggatgtggtctcaggctgtttgcctgtggatttcatttctgccttttagtttttacttcttctttctttggaggcagaaattgggcataaaacaatatgaagggtggtctcctcccttactaggaagagagaaataccatgtgagaatgaaatacgtatttgtgttattggatttgacatcggggttggaccaagcatcttctatgaacatctataagcacgttctccttatcaaaaggtactttgcttggtgctttaaaagataaatgactatgtagcttaggagatttcttcataattgaaaaccacagcagctgttatttgaacatacctgagccccttctggaccactgtaggagaaggaggaagagaggtgaaagtgatttctgctgctgagggcatgtatgatgacaatgggtatttgtcctaactttgacactacaaagtgactggagctttaggcaagtagttactccaattgtcttttcagactctttctttttgaggtatttgacctctttgcggcatcagcctgctgctatttcacatgcacctagaagggactttaaaacatgcacagaattgaacaaagcagtaaccattcgttggtgtcccttaacaatatgtcaaatactattatttttgaaaggtaaataaatccttgggcttagtggatcctaaatgctaatttaaaaatctgaactcatttccatcccttattactttaaacaaattgctaacctgaatgataatagaaacttttttccttttaacagttggaggcatctatactgtgattcagacaaaggccaaaacaacagcagatgaatggggagagaactattttctgataggtccatattttgagcataatatgaagactcaggtggaacagtgtgaacctgtaaatgatgctgtcagaagagcagtggacgcaatgaataagcatggctgccaggtaaaggaactgacacttcacttggcaattctcagtaaacttatgggaaaaaagactgtaactaacatgaactcacaagagaagaccattcacttacttaaggaaaactttcaggtttgtgagaaagatgatgaacttgcttttaaatggattgaatttgagacaccttgtgaaaaccgaggaggaaggataattggtttggagttcagcagaagatacagagtaaacatgtttttgaggaagtcatttgtacataaactgaagtcatgagtgttgttaaaaattattcagtggaaatgtttagacttggagtaaaggttttcaaccaaaccttgtggaatgtcagcatgttagggcatctacattaaaagaagctagagattgcaaatgtagaagcaaagctaatgatgtacaaccaaggatgttcaagtcttaatcctcagaagctgtgaatatgctaccttttatagcaaatggaatatggcagatgtgattaagttaaagattttgagaaggggagataatcctgagttatctaggtgggtcctcctaagagggaggccatagaattagaatcaggcaggagatgtgccaatgaaagcagaggttgaagggagctactttgcagatggaggaagaggccacaaggaatataggtggcctatagaagtaagaaaaagcggccaggcatggtggctcatgcctataatcccagcactttgggaggccaagatggatggatcacctgaggtcagaagttcaagaccagcctggtcaacgtggtgaaacccctgtctctactagatatacaaaaattagccaggtgtggttttgcaggcaggcacctgtagtcccagctactcaggaggctgaggcaggagaatcacttgaacccaggaggcagaggttgcaatgagctgagatcgtgccattgctcgcctgcttgggcaacaaaagtgaaacttcatctcaaaaaaaaaaaaaaaaaaaaagaagaagtaagaaaataaattcttccctggaaactacacatggaatgtggctctgtcaacacactgattttagtctattttggactactgacttcaatatctgtaagataataaatttgttttaagccactaggctattggtaatttgttacagctccaacaggaatcgtgatgtcaagtcaagggaggagagaattttaagtatgaagaagggattaagtcagcaaaggactgatccagggtctgttgggtttggtaatatttgggccattggtaacatggataagtacagtttcagaggagaaaggaaggttaaatctcatttcagtgggttaaggaataaatacgtggtaagaaaaaagacacagaagttgtgattatgagatttttctatgaatataaaatataataatgtagttgcagaatgacatggttttgagaattggtgtgttattaaatatgggtaagacctgagcatgtttatttgcaaaaaggaaatacctagcagacagggaaaagctaaaagctcagaataaatggaggattgaagagaataaagtcgctgagaatggggaaggggacaagatccaaagcaatactgaaagaatcatttttcgcttgtctcactcaaaaaaggaaaaaaagataaatgcaaatactagatacaagttaatgaagaattcaggacaatcttacccaatgtttttgatgatctcactgaagcaggtattaaaggtcattttatgacaattaaaaggcaagtgtagaaactagggaagttcaagaaagaagttctgaaaaagtgttcaaggaatttttggacatgtttgagatgtagtcatgactttatagtggcacaaatacacacggctgtgactttgtccaggagcagtctgcagtctgagtgatggtgcaggaagttgaatagatgaagatccagtgttgtttaatttgaccattcatgcaatgggtcaaggtggcccaagaattgaaggtaattgtaaaagtgattgaattaatagtttaattcatgggccattgcattggaatagatagaaaaggaaggaattaaataaggaatagacaggaaagaaagtaagcaaagccagaaagaagatgataatgtaggacaaaatggagggttataggaactggaggtcttaaaggggagaaagaaagaatatatacactggcagaaacacagtgacagaaatggaagtacaagagttgtaactgggtaacagaatgccgaagtggaatattttagagaagaaatcatttgggatttgacaaggaaagaatgcagtcatgatcctgagtagctgaaatcaggtggacatgaaagtcttttaagtccataaggtcaagtaaccatgaggttaagtgtgcaggataaaaaatctggactttgaagttgcttaggataaggtcaaaaagtaaccttatctttgctgagcaaggaaaggtaatatttttggatagcaaacatttcaaaggtgttttatatgtaaataaagaataaggctttaaaagcttcagtagaattttaaaaatcagtaactttccttcctactcatcccaggaatatagtttctgggggtgaaaaaatgcaaagtcttcacttgagatgctgtgtgggtagtggtgtctaggaggtgcatgcaaggtttaaagagtggaatgcataatttacaagggaaattgagatcccaaagagtaccggaaaacatttcttagtgaaggcagcatagagaatgttagaaatgtgatagaacaatgcctattgtactatcaggatgcaaataaatgaaatgttagaaagggcttgcatttgaagttctggtgaaggaagagttagatgagaaacacaatggaactgactggtctcaagacttcatggctttctagtgtagggatattttcacgttgcagccaagaactgactggaggtcaatgccaattggcttacattctctatttgtgtaataggttcagctcttctttatgatcttagcttatgtatcatgtggcacatattaggcagtcagtaaatattatatagtaatattacatgttattcacagtgtataaatacatgaagcaatgaatttcccaaggagaaaaactattgaaaagtggtttggggctcaggaaaatttcatcttaaaaggaaacagtggcatgataaacactaaattataatggaaacaactgaaacataatgagggtctttcaaggttgaccaaggaacagatgggtgagaagcatccccacacatgcctgggtcccctggtaggaaatgatcaaattgggctttgaagtcctgcaaaattcagccataggtggagtcataagtgtcaatatgtaagcaatattaatatattttattttctagagaagcctggatccacattgagaaagactcgtagcctctgctgagttccagaaagggtttgaagtggtttatgaggttgtatatcatgtaaaaggagaataaacataaaatgaaaattaagacaaaagaacaagtaaattactatagaaatatggagacaaaaaaggaagttaaaacttggatatgcaagtgatgatatacatacaactggaaaaaaatgagagagctaattcattaaaacttgcagaagataaaacatttaggaatcaacgtcaatttgaagaatgtaatagaattatactttgagttactagattaaagagataatgtatctagggcaatgtgtttagttaaacctctggcagcaaccatactgggaaacattttgcatcacttcttttgataggaatagtaagataaatcatacatattggactacagaaatagctttttcttctagcaggaaatattgttagtcctgttccataaaagaaaataagcgacactggagccattatatccaactacccaggttttcagagatacaaagcatttcatggctctgtcataaaagcagacactataatattaatcactgtgagttcatggtcacaagagagtaactagagacagatgaacagagattacatgatttagatacattgtttttaaatttaatgaagagcaagaatttggaggttctagatgaatggatttatgcccattccagcttgaggctcaaacagcagaggctatatgttatcaatattcttttctaagtagcttgtttaatttgctattgagtactacataaagtttatatcctcagagtgcaaatacattgtcctgtcttgcatgacttaatatcactacatggctgtgttctttatatgacaggtgcattttggaagatggctgatagaaggaagtccttatgtggtactttttgacataggctattcagcttggaatctggacaggtggaagggtgacctctgggaagcatgcagtgtcggcattccttatcatgaccgagaagccaatgatatgctgatatttggatctttaactgcctggttcttaaaagaggtatggtttattatatagtgatacaacggaggagcagcacaactgctttcagtgcccaagaatgatcccatgatctttaaatgaggcagattttgagatgatgccattatggcttgtcctaatacaattgaaagaaatctgaggaaatgttgagcattctgcaaattaaatggaatagcgtaataatgatacttattactatttacctcatgtcaaatttaaatggcatgatgtgtatcaaacacccaattatattgccccatatatagatgatacttaatatatatatataagaaaaacatgaagtatagaatcttaagagtagcaaatagcttaataagctatttgtttaataagctttccaggtgatcctgatgtacactacatgtgataaccactgttttaagtttactctccaaatttcccaattctctgctcagccttcttcaatgacagtgttttgctattgtctctattaaggaaatgaactctcattgtggagtcagtgtgaatgttaatattttgtaagggcaaacaaaataagttgtctctttgtaaggcaaagatacggatgcccacctgatttggaactagaccctggggtggaattagaccccgatcttcagtgtgttacaaagctgctatttgattctaggcatgttttttattagcctctttctctctaattccatattcttaataatatatcagttaaattttgttggcttcaagaaaaagaaaacccaaataagataaatttaaaacatggaatcatttattatttattataaaatgatgtaacggcattttatctttgtttctcaaaatcaaatatgcaaatatatacatgaaaatcattgtatgcttttagagttttcaagtcattgaaaatccaagtaattatctattagaaaaaaatgatattgtaaaagtcactttttcttcatatgcatttttttttcattatgattgttaaatagttttaggcaacatttgcttctccataattgggacactacaaatatacaaggcattttcaagtctcttcctggccatttctttagtaaatatcaaaatatatactataaataaacacaagtctagtcaattaaaaaaaatttaagtagttttttaaaaataagcttataagtaagtggtcccaattgattcagctgttcagtgatatctttaagaatttatttattcttaaataaatattttttgagtgcctactttgcatttattccatttatttattaatattcattacctgttattaatattagtatttattcttctgtggatataaaaaatctgctccatcactgaaagggaggattaagacctaaaaatatatggggttaatgaacatgccactgaatcctgtattatccttgctaaatattcatgctttatgtttcgactcctttaagttgcaaaataatttatagacaccataactccacttatgatgtggaccatgagcacaatcaagcttcatcaacaacttttctgaatgctttttttttcctaatgtaggtgacagatcatgcagatggtaaatatgtcgttgcccaattccatgaatggcaggctggaattggactgatcctttctcgagccaggaaacttcctattgccacaatatttacaacccacgctacactacttgggaggtatctctgtgcagcaaatattgatttctacaaccatcttgataaggtaaatattccttcctccctccctcttactcacccttctttcagattgctgaagctgaaagataagtattgatctgtacatttcatctgccaaccagatggcagaaatgcccttttagctaatcaatattcatgacaaagcttcccttgggttgaaagacagctcatatagttcaactttgttcagagtacactagagtatagaggtgagaggcctgatttctgtcccactttggaacaatagttccagagggatatggtaggagtaaagacatggtgtaggtgcaaggttgggcccttgttctagcctaaggctatggaagcgctgtgaacaccctggatccacatgcagctctgagtggcaggtagataattgagatttgagacatacaaacttgcactatgagacttacttcctctatttcttctatcctccaagtaaacaattgattaaaagccacattataggttgataggttcagttttccctgtaactttgcaatgcacagggggcatttttgtgggatcaagtaaaacagaagttattgcaaacagggatatgggtccttggtgaacaagaagttatttttgctcatcttagcaggttacctgagtctatgacctgccaaagtcattcagttttgatttatttcttctatttttcatgtcaatttagattaatgaaagtatatattttatatcatcatgttaataatattaacaaaatgtttgagtagtataaattcagaggttttgcagatttggtgtctatattaacaatcaaatctatttagtactctagggttcagttttgctatcaggaaaattaggaagttagaaagttgatttttaaaaatttcccagcttaaagagttctaggattctataaaatagaatgtgtatgtgtgtgtaatacacaaataatactcaaataatgccactgaaaagttatactactgtctcaaagacacttagagcgcaagaacgttctttctgaaaaactttaacatctgtaaagcaatgagtggtcctgatgagcccttccctataaaaaggtcagcctaatttaaaggtcaaactagaaacacaagctgtacatttaaaataaaatcaccaaggaattcagaaagcctggggatctgggaggttcttagcggtatatagtaatggtggactaataagggcaaaccagtgatctgtgataagctggtaagctcaacaaccatgcttcctggagaggagtgcactttgacttcagtgaaggagaaaatattagagtggcagattgaatatttcacttcagaattcttgaatcttgtatagtaataattaattttaaaagctactaataatatacataggatatttttctttggttttaaggaagaaatgcattatagtatatagttatatattacaattttacccttttgatgaaagggcagtatttttcatactgtctttagatataatcacacatctctctagtttaaagcccttcactggttgagatacttaagtttagtcagatccctgcccatctttctagtaaaatgttctatctagcaaaatgactagtagacaacaagcagtcaagaactagcttttgggttaaattcatagtcattttacacagcagaagcccccatgctcacactaaatttagaatttgggtgacacataagaataccaaattatatacatgaaaggtttttaaaatttcagtataaggaagaagtcatagtttaatctttgatgcaggaaccaggatcagcttcagtaaattctgactcagacaaatgaaaatagggcaaatatgagaacaagaataagataattaaacttttgtaaaatcagaaagattagaacgattttactcaaattactgctaactgaaaacaatttttgttagtagccaattacaaaaactctaacgctggtttaagtttttagtaaaattcattatttaaaataagattttaaccattttcagccagcgtatgaaatttctgagaatatgtctccaaattcattttttaaa

SEQ ID NO: 612 - DNA, 17068 bp, Homo sapiens
  source 1..17068: mol_type = other DNA
agattgcttcaggggggtggggtggggtggggtggggctgggggcttgtcgccctttcaggctccaccctttgcggagattataaatagtcatgatcccagcgagacccagagatgctgtaatggtaagactttggatccttcctgaggacgtggagaaaacttgctgctgagaaggacattttgaaggttttgttggctgaaaaagctgtttctggaatcacccctagatctttcttgaagacttgaattagattacagcgatggggacacagaaggtaagaatgatataattactggttatttttgcttgtttgggatacactcagaaaggcaaatattaatggtaatctccttgttctattttctcctaagtcaccaagctatcttaaggccttttcatttcgtctctagcctgcactgctgccgcttcatcagttctctttgaatgtcatacagttctgttcaccttatcataggaaagtcacccggagaagttgtgtttgcttctcaggtttattttaggtaaccatatgccactgaggacgagatggttgagtgtttagaggatcgggctgcttggttgtatggattacaagtgtgggtctcagagccagtgtgaagacttctctggaagcattagaccttgaaaaggtctgtgtttggaggcacaggccagggtctggccatctgtttgtcctataacatatggggttcgtggatgctaaggagaaagaattccagttgtccttcctattagggttaaaatcgtgagtgcaggacatactaaaatattgagtgttgtatatgcattatttgcagggagaaaggcttttcttttttttctgattgagttttactcttgttgcccaggctggagtgcaatggagcgaccgcagctcaccacagcctccgcctcccgggttcaagcgattctcctgcctcagcctcctgagtagctgagattacaggcatgaaccaccgggcccggctaattttgtatttttagtagagacggggtttctctatgttggtcaggctggtctcgactcccgacctcaggcgatccgccggcctcggcctcccaaggtgctgagattacaggcatgagccactgcgcgcagcaagaaaggcattttttaccaagataaatttaactaaaaataaggggccaggtgtggtgggtcacacctataaccccagcatttgggaaaccaaggcaggaggatcacatgaggcctggagtttgagactagccttgggcaatatagtgagatcccatctctacaaagcagaaagaaagaaaatgtaggaaaataagaaagggatggaaaattatgagactaaagaagaaaaggctctcaaagatagtgaatgatgagaggagacagaagagatttttactaaacggaaaaagatttaacagagcattgcactggcagggccctccggggtaccgatgcttagctgggactgagacatctgggaggctgcaggcaaggtcacttctcctgctgaagctcccagcctgctgcctaatctgcccgacctgaaaggaaaggagtttaagatatgaaaggttgaagggattttgggtggtggggtgggggggaatggcgtagaagttggcctcaggtataaaaattgagctgccccaaggtagaaatggaaaatgtctcgcccggctgaattattccaggcaaggtgaagatgaccggttctccccactaagaaatgtctcttatatgttgggttcgcccttatatgttgggttcagagtaagtactttcttcccctgcgcgggagttagggatagcagaactgtatttaataaacgaagactgaaatggggccaggatgcagtgagtagatccagtaggttacatggtcctgagagataagagactcaaagagccacccagcagtgaagacacaaactaccaccccctccaccaccaccagtgggcttccgtggagtctggggtacagatcagactgcactgtatttgtttccagaatggtcaattcttagtaatcctacccgagactgtctttttctctgccctcccagttcgtgagtggaattctatgcctacatttgcctgatgcaagtttttaaatatttccaaactgaccaacccagtttctcttaacttcttccttccccaattttctttcatttttaccaagttaacttcacattcttatctccagataagttctttagtataatctattcctttgtcttccccattaattacctaaatctcattggatgttcttttcataccactcataactcaaattctcctaatacagctccataattaataagaaacagtcatcaatcacaagttttaaggactattctctcctctgtcttccctccctccaggtcaccccagctctgatatttgccatcacagttgctacaatcggctctttccaatttggctacaacactggggtcatcaatgctcctgagaaggtgagtgccaggccacaataattagaatttagaatagggaagttattcctttaagtagggtttcaggaattcagaatttaaggccaggcatggtggcatctgcctggagtcccagctactcctgaggctgaggcttaaagatcacttgagtccaggagttaaacaccatcctgagcaacacagttagtgagggtccctccccaaactaggggattttaagacaaactttgtatctatcctgtccaagactgaagatggagacaatattggtggggaaaattagtggggtcatctaatcgaagcacaaagctcacttactcccggaacgctgggcggtgctgttcttcctcccactctttcacctcatagtgatgcacatcctgtattatcccttaggggttagttacaaagaagctgggttcccttagcagagggctggggtagactgtgaacatcggtgctgccacctactgggattttcaggacaaatagaattactattccagcgagagttaacataaattccaatacgttatctgccccttccattcctgtctatttattcccttgattctctaggaaggaaatgatccctaatgtttgtcttttgttctcatccaactgtaacagtctgttcttccaccaacccttttattttgcagatcataaaggaatttatcaataaaactttgacggacaagggaaatgccccaccctctgaggtgctgctcacgtctctctggtccttgtctgtggccatattttccgtcgggggtatgatcggctccttttccgtcggactcttcgtcaaccgctttggcaggtattgactagaaactgggcaaggaagtgggctctaccagccacattgaggacaagtgtggagagttagggcagggaggtgatgatgcctttgaataagaacaccttgaattctaatcaagggaaacctagtccaactggccccgaatatgactgcccttgcttggagctctactaccctggagagctcccacccagctgtgcaagagatgaactgtgagtgattggcctttgcagtccagctagggatagttcagaattattccctagtaaactcaactatggggtttctagaaacatacttaatttacaaggtccgaagttgtttacttgtattataaatgtttttattattttacccaggattggtaggaattatttttgtctatggcaaatgtggataatgacaaaaaaaaagtcttattctatagaagcttaacaatatgttttagaaggtagaatatattttcatttatgactaatgaaggaactgttttaatttgccaattaggcacggtgtggtggctcacccctgtaatcctagcactttgggaaaccgaggcaagtggatcagctgaggtcaggagttcgagaccagcctggccaacatggcaaaaccctgtctctaccaaaaatacaaaaattagccgggcgtagtgacaggcacctataattccagctactccggaggctgaggcaggaaaatcacttgaacctgcagtgggggtgcagagggtgcagtaagctgagatctggccacttcacaccagcctgggcgaaagagcaaaaccccgtctcaaaaaaaaaaaagccggtgccgtggctcacgcctgtaatcccagcactttgggaggctgaggcgggcagataacaaggtcaggagatcgagaccatcctggctaacacggtgaaaccctgtccctactaaaaatacaaaaaattagccgggcgtggtggcatgcgcctgcaatcccagctgcttggaagctgaggcaggagaatctcttgagcctgggaggcgcaggttgcagtgagccgagatcctgccactgcactccagcctgggtgacagaccaagactccgtctccaaaaaaaaaaaaaaaaaatgccaattagatattctagaaatgcaattggaattcacatttaaaaatcggtaaagcaacctgttttacttgattatgttgttcttttgtttttttaccccccaagaaagagggtcttgctctgtcacccgggctggagtgtaatggcccaatcatagctcactacagcttcgacctccgacctcagctccctgagtgcctgggactacaggcgggcaccatcacacctggttcccaactagaaatgttctgataatagaaagtgaaaaacaaaagttagattaaaaaaaaaagggatgatatgagcctggagaagaacagaataatgaggacagaggagaagttaggagcctctcactttgctaattctactttgtctttgattaaccttacaggcgcaattcaatgctgattgtcaacctgttggctgtcactggtggctgctttatgggactgtgtaaagtagctaagtcggttgaaatgctgatcctgggtcgcttggttattggcctcttctgcggactctgcacaggttttgtgcccatgtacattggagagatctcgcctactgccctgcggggtgcctttggcactctcaaccagctgggcatcgttgttggaattctggtggcccaggtactctagaacttctcatacttaatgagtgttagtttcatgggtcattaaaaaagttaacataggtaaagcactgaagaatatctggcacatgttcaattacatatggaagttttagataatagatagtagctgaagaagcaggctgaggccgggcgctgtggctcacgcctgtaatcccagcactttgggaggccgaggtgggcagatcacgaggtcagcagatgaagaccagcctggctaacatggtgaaaccccatctctactaaaaacacaaaaaattggtcgggcgtggtagcgggcacctgtagtcccagctactccggaggctgaggcgggagaatggcgtgaacccggtaggcagagtttgcagtgagccgagattgtgccactgatctccagcctgggtgacagagcaagactccgtctcaaaaaaaaaaaaaaaaaaaaaaccatgctgagtagagaaaggaaaagaaacacaatttgtttattttttcacatggtaaaagaatgtatgattttctgaactttttgtgttttaatgaacttgtggcctgtgaagtatggggtttatagcattatctttgtgtggtttctagatctttggtctggaattcatccttgggtctgaagagctatggccgctgctactgggttttaccatccttcctgctatcctacaaagtgcagcccttccattttgccctgaaagtcccagatttttgctcattaacagaaaagaagaggagaatgctaagcagagtgagtatccttcacaccttactacatgaattatatggttgtggtttgttttagggatgattgtactggacctactttctgttacactctttccctgcctctcagaatccaagtgaggagggttctgattactcctgagtaaaattttcagcccctaaagaatgaggtgaaaaggcgggtttaggaatggatgctatcaggcagggtgtgatggctcatgcctgtaatccagcattataagaggccgaggcgggtcacctgaggtcaggagttcaagacctgcctgaaacaacatggagaaaccctgtctctactaaaaatacaaaattagccgggcatgggggcgcatgcctgtaatcccagctacttgggaggctgaggcaggagaatcgtgtgaacccgggaagtggaggttgcagggagctgagatcatgccattgcactccagcctgggcaacaaaagtgaaactctgtctcaaaaaaaaaaaaaggaatggatgctacccatcacctcacctcgtgcggccctttcctggctgccttacaggaagaatgaatttggggcagcacattctcttttatcctttcctctttcttcttttcaccagtcctccagcggttgtggggcacccaggatgtatcccaagacatccaggagatgaaagatgagagtgcaaggatgtcacaagaaaagcaagtcaccgtgctagagctctttagagtgtccagctaccgacagcccatcatcatttccattgtgctccagctctctcagcagctctctgggatcaatgctgtgagtgtgatactttagggtcaaacgtgtcttaaagtatttcacttaaaatgccgggcatggtggcggtgtgcctctgtagtcccagctactcaggaggctgaggtaagaggatcacttgagctcaggagtttcaggttgcagtgagctataattatgccactgcattccagcctgggagacagagtgagactgtgtctctgaaatttaaaaaaaggaaaaaaaaaaaagaccctggaaggacactggcaacttcagagtgaactgactttaccagtctgtttttacaactagtatagcgagcatggtagtttaaagagggcatgatagatgatagtttaaagagggcggcacaacggaagctagcatttggcaggtagcccttgtattccatgcaaatatcagcttcctgcatttgactgtggattgtaggaagagagtattcctgtgccttctagtcaatatggatattaagagcacccttgtcccacctttttaaatactgattcatcccctaagggttttcagatagtctttgatcaatgggattaaattattttgtaacaaagcattttgcaaaacttactattttgagcattttgatgctcaaaatagtaagttggttcttggaacttttctcctacctagcacaccaggatatttgtatttgaagtggcagtgcttcttatgaggggttagaggctgttatgtcagaatctatgaggagccaagtgtggtggctgctcatgcctgtagtcccagctactactcgggaggctgaggtgggaatatcacttaggcccaggagtcaagcctgggaaatatagtatgaccctgtctttaaaaaaaaaacttgggaggaaatacacagtagttagaaaaagcctcctaggtgattttgatgaatcccagtctcaaatttcttcatttggaaatgataatgtaggccacacgtattactggagaaaaatgtgctcccgagactttccagagcagcagagctgggactaggcaggtgaggcagctacgtgcaagtgtagccctgagaatgagcacctctttaaagaatgtaccttgcgttagttctgtgcctgtttaaaaaaagaaaaaagaaagaatgaaagaatgcacctgaggcaactccctagctgcctcaccacagtccaggccctgcaaaacaggatcagtaaaagatcacctgtgagaaatgacaagtgatccgtgagcagtctgagggacagactcctgccatttcagagtatggtgtgtacattctttttttttttgaaacagagtctcactcgatcgcccaggctggagtacagtggcacgatctcggctcactgcaacctccacctcctgggttcaagcgattctcctgcctcagcctcccgagtagctgggactacaggcgtgtgccaccatgcctggctaatttttgtatttttagtagagaacaggtttcaccatgttggccaggatggtctcgatctcttgacctcatgatccgcctgccacggccttcctaaatgctgggattataggcgtgagccactgcgcctggcccatcctttttttgaggtgaagtcttgttctgtcacccaggctggagtgctgtggcgcaatctcagctcaccacaacctccatctcctgggttcaaatgattctcctgcctcagactcccgagattacaggtgggattacagcccagattacaggtgcccaccaccataccttgcttattttttcgtatttttagtagagaatagagggatatcaccatgttggccaggctggtctcaaactcctgacctcaggtgatccacccacctcagctctctctcctaaagtgccggccttacaggtgtgacccacctcgcccggcatgtacattaattattgttggactaagctggctcccaatttagtcaatgagtagattttgcgctaggtataatctcacccaaagctggctgcatcagaattatgggggttgggattcctgagtcagctgaatttgagaatctctgtgtaagagacctgaaagttgtctgtaaaaaaataaatctgatgcacagcaggcttggaaatcacttttccaacctactttgcacaaatgatgatttctaatttcccttatgggcagatgggtaagaggttgcattgtatcatgtttacctagcagagtaaactatttaggtgagatgatgtaggggttaccttgcttggtgacactagatagcaaagtcattttactatgagaaattttattgagatgagtacatgtacattaggtttttgacgtgtagacattatgttaaggaaaagaattggcatacctatttattgcttgtttaaactgctcaagtaattacttttgcactagcctaatatatttccccacaagcttgacgccatcatataatatgttgagatttcttaacagtgttaattagccctagagcagcaggtttttcaataatgactctacaaatctcagtttcaaaacacaattatcttattttagaaaatatgaatatacatagtttacatcttacgtactagggatttaaagagttgtttcgtgagaaggtaaatcccaatgtagaggtccatattcataaaaaagactaataaatattgctatggaggcaaatactctgggtgaaataaactgaagtgaacctcggtaacctagataatgttcccttgttaacttgaggtctgagtccagtattttaatatctcttaactatggtagttatagcaactttagattttagcacagtgcctagcaaacaacataataatttatttaatatatattaaattgcattagtagctggtattatttcataaaacacttcaaaagggcctaggcctaggaaatacagcccaacctctgcttattcaatgagcaggataaggttattcaattagttcactatcaaattgagacatcgatgtccctatcaatgttttgagagtttggggaagagccaattaaaaaagcatttagctgggcctgatggcacatgcctataatcccagcaacttgggaggctgagaggcaggaggatcacttgagaccaagagtttaggaccagcctgggcaacagtgagttgctgtctcaacttataaaaaagaaaccagttagtaggaattacacctttatgtaagttagtgaagtggacataagcaagaggaaatggaacagtgggaataagcatttttagaagaaacaatgtaaatgagtagctagaattaagaacatttagagagagaaaggagggccaggtgcggtggctcatgcctgtaatcctagcactttgggaggccaaggcgagcaggtcacttgaggtcaggagtacgagaccagcctggccaacaaggtgaaaacccatctctacttaaactacaaaaattagctgcgtgtggttgcaggcacctgtagtccagctactcaggaggctgaggcaggagaatcgcttgaatctgggaggtggaggtagcagtgagctgagattgtgccactgcactcctgcctgggtgacagatccagactaggagataagatacagaagataattcatttgcagaagggatattagtattgaacgaaaacctagaaaaaggacttcttacccactgggacttttaagtttatttttgagggttctgtgtaactggtgtgcagaattgcatcaaagctgcatgttttcttttctcctaggtgttctattactcaacaggaatcttcaaggatgcaggtgttcaagagcccatctatgccaccatcggcgcgggtgtggttaatactatcttcactgtagtttctgtaagttggatggtttggtaattttgaggggagaaaagaatccttgctacagatgttcaaagatggattgcatgaccctaccatcatttagttacctttttgttgcttaattttcctttgggaaaaagagataaatttaatgttggatgtagtcttcactcttcaagcaaatatgggatggatgggaaaggagggagtatagaagggactatatagtatgctttgaacttggaattggaggaaaggtgcttggaaaaactctcaagctctgttactccactgtttttacactaaaacaacaataatcaacagaagttatctgtgatccccagaatatgtgagaatttttccccgtgaggtgtgcaatcagttccgtagtggacaccatctaggtgtcctgcgattttttaattatgacactgtctacctggagatagcatcagatctcacaggttggtggcccagttcccaagactgccccccactcctgatgccagtcacaagctccaggttgttttacctgtgcttctgactcaccagctgtagatcaggattcccacgacatcctctttgggtttgattaatttgctacagtggctcacaaaactcaggaaaattgtttcctagtttgatttaaaggatattttaaagcacagaaatacacaaccagatgaagagattcacggggcgaggtctggagggatcctgagcatgggagcttctgtctctgtggggttggggtgcactcctagcacatagatgagttgttgctgaccttcctgtcagcttccacgggttcagatatctggaagctccccataccctgccttttgggccttttatgcagacttaattggttctccatgattgaagcatggacaactgttctgacctgtgattggacaaaaagggaatgatctgaacccagctgggcctgtctgcttagatgatttgttggcctctctgtagcgtttcttcctctagggtgtggggcaggaccctctctgaaatgagggttttatgacccacagtcagattagcgtcctgccaagtgggagggcaggagaaagtcagagaagaattctgttatctgaggcctgctcctgaggcctgaagcatcccaacattatgacaaaagactctaccaagggctatggggattttgagccaggacctgtgaatggcacacaatatgtatgtatataaaatcataaatcacaggaggggtatccataacaagtgtcctgctgttggtaaggcagatttcaagtagctcagatgctgttttcatggaaaggaaaactgaagtttcatgtcatattcttcttccagctatttctggtggaaagggcaggaagaaggactctgcatatgataggccttggagggatggctttttgttccacgctcatgactgtttctttgttattaaaggtaggtgctctttgggtgaaaaaaaagggagggggaaagaagagaggttacagttgacttctgtgacacaaggggtgggttgttaaggttgcagtttgtcaataaagtcagaggagagaagcaggatgcccagagtttaagaaacatgggtcgtcagagaactggaggtaaactgttagaatccttacatttatagaacattattatagcttataaaataaattatctaatttaattcttagaataatatcaaggtaatcacacttaatagatgatgacatggtctcagtacaaagtgacatatatgagatcatatagatgggattgaaaaattcaatcctcagctgggcgcggtggctcacgcctgtaatcccagcacactgggagggtgaggcaggcggatcacctgatgtcgagagttcaagaccagcctgaccaacatggagaaaccccgtctctattaaaaatagaaaattagccaggagtggtggtgcatgcctctaatgtcagctacttgggaggctgaggcaggagaattgcttgaacccaggaggcagaggttgtggtaagttgagatggtgccattgcactccagcctgagcgacaagagcgaaactctctctcaaaaaaaaaaaaaaaaatccaatcctggctgggcgcagtggttcatgcctgtcatcacaacactttggaaggccaaggttagaggattgcttgagcccagaagttcaagaccagcctacgcaacatggcaagaaactttctctacaaaaaaacaaaaaaaaattttttttttgagacagggtttcactctgtcaccaggctggagagcagtggcaggatctcagctcactgcaacctctgcctcctgggcttaagtgtttctgctgcctcagcctcccaggtagctgggattataggcacgtgccaccacgctcagctaatttttgtacttcttagtagagactgtgtttcaccatgttagccaggctggtctccaactcttgacctcagataatccacctgccttggcgtgagccacagctcctggccaaaaaaaaaatttttttttaattaggcaggtgtggtggcacatgcttcaagtccaagcgatttgagaggctgaggtgggaggattgcttatgcccaggagatcgatgatgcagtgagctattgtagtgccactgccctccagcatgggcaacagagtaagaccctgtctcaaaaaataaaaataaaaataaatccaagccttttgactccacagccactctttgtattgtacgtcagggacaggaggagcttgccgttaattgcttctgggaacctagatactaggttacactgtctttaaatttaattttctctgttccttgctcttacaggataactataatgggatgagctttgtctgtattggggctatcttggtctttgtagccttctttgaaattggaccaggccccattccctggtttattgtggccgaactcttcagccagggcccccgcccagctgcgatggcagtggccggctgctccaactggacctccaacttcctagtcggattgctcttcccctccgctgctgtaagtaaactcaccttatcttaaaaccagcctatgtaagctgacatgaagatactccttaataatacagtagtctgggcctggcatggtggctcatgcctgtaatcctagcactgtgggaggctgaggcgggtggatcacctgaggtcaggagttcaagaccagcctggccaacatggtgaaattcaaaaattagctgggcatggtggtgcatgcctgtaattccagctacttgggagatcgaggaaggagaatcgcttaaacctgggaggtggaggttgcagcgagctgagatcgcgttactgcactctagcctgctcgatggaagcaagactccatccctaaataaataaaaaaatacagcagtccctcctcttcttcagtttcagttacctgtagtctaaaaatattaaatggaaaattgcagaaataaataattcataaagtttaatttgcggccagacacagtggctcaagcctgtaattccagcactttgagaggcctaggcgggtggataacttgaggtcaggagttggggaccaacctgactatcatggtgaaaccctgtttctacaataaatacaaaaattaggccgggtgtcgtggctcatgactgtaatcccagtgagcgagatcacaccattgcggtagcacacacctgtagtcctagctactcagaagactgaggcaagagaatcacttaaacccaggaggtgttcatggtgagctgtgatcaaccttctgctctccagcctgggtgacagagcgagattccgtctcaaaaaaaaaaaaattcataaatagagatggagttgcccaggttagtctcaaactgctgggttccagtgatcctcccaccttgacctcccaaagtgctgggattatgggcgtgagccaccgcactcggcccagaaacacagattttaaaaataatactcaaaagtccaaaaatactcagtagacatttggaagcatctaactgtaatgaaatggaatgacagaaagaaaactagagagaactacagtaagttagcaatggaatcataagcgaatctgaagaaacctgttttcattaaatatggaagggttatagcttgaagcctattggaaatatgaatgtgaaggaaattgactttgtcaatgaccagatttttatatcaaccttccttttttctgtcctttctctagcactatttaggagcctacgtttttattatcttcaccggcttcctcattaccttcttggcttttaccttcttcaaagtccctgagacccgtggcaggacttttgaggatatcacacgggcctttgaagggcaggcacacggtgcagatagatctggaaaggacggcgtcatggagatgaacagcatcgagcctgctaaggagaccaccaccaatgtctaagtcgtgcctccttccacctccctcccggcatgggaaagccacctctccctcaacaagggagagacctcatcaggatgaacccaggacgcttctgaatgctgctacttaattcctttctcatcccacgcactccatgagcaccccaaggctgcggtttgttggatcttcaatggctttttaaattttatttcctggacatcctcttctgcttaggagagaccgagtgaacctaccttcatttcaggagggattggccgcttggcacatgacaactttgccagcttttcctcccttgggttctgatattgccgcactaggggatataggagaggaaaagtaaggtgcagttcccccaacctcagacttaccaggaagcagatacatatgagtgtggaagccggagggtgtttatgtaagagcaccttcctcacttccatacagctctacgtggcaaattaacttgagttttatttattttatcctctggtttaattacataattttttttttttaactttaagtttcaggatacatgtgccgaatgtgcaggtttgttacataggtatatatatgccatgatggaaatatttatttttttaagcgtaattttgccaaataataaaaacagaaggaaattgagattagagggaggtgtttaaagagaggttatagagtagaagatttgatgctggagaggttaaggtgcaataagaatttagggagaaatgttgttcattattggagggtaaatgatgtggtgcctgaggtctgtacgttacctcttaacaatttctgtccttcagatggaaactctttaacttctcgtaaaagtcatatacctatataataaagctactgatttcctttggagcttttttctttaagataatagtttacatgtagtagtacttgaaatctaggattattaactaatatgggcattgtagttaatgatggttgatgggttctaattttggatggagtccagggaagagaaagtgatttctagaaagcctgttcccctcactggatgaaataactccttcttgtagtagtctcattacttttgaagtaatcccgccacctatctcgtgggagagccatccaaataagaaacctaaaataattggttcttggtagagattcattatttttccactttgttctttaggagattttaggtgttgattttctgttgtattttaactcatacctttaaaggaattccccaaagaatgtttatagcaaacttggaatttgtaacctcagctctgggagaggatttttttctgagcgattattatctaaagtgtgttgttgctttaggctcacggcacgcttgcgtatgtctgttaccatgtcactgtggtcctatgccgaatgccctcaggggacttgaatctttccaataaaccaggtttagacagtatgagtcaatgtgcagtgtagcccacacttgagaggatgaatgtatgtgcactgtcactttgctctgggtggaagtacgttattgttgacttattttctctgtgtttgttcctacagcccctttttcatatgttgctcagtctccctttcccttcttggtgcttacacatctcagaccctttagccaaacccttgtcagtgacagtattttggttcttagttctcactgttccctctgctcctggagcctttgaataaaaatgcacgtagctgaggccggatgcggtggctcacgcctgtaatcccagcactttgggaggcctaggcgggcggtcaggggttcgagaccagtctggccaacatcgtgaaaccctgtctctactaaaaatgcaaaaattagccgggcgtggtggcgggcgcctgtaatcccagctacttgggaagctgaggcgggagaatcatgtgaacccgggacgcaggggttgcagtgagcggagatcgcatcattgcactctagcctgggccacagggcgagactccgtctcaaaaaaaaaaaaatgcacatagctatcaagtgtgctttagcttgaaaaggtgaccttgcaacttcatgtcaacttctggctcctcaaacagtaggttggcagtaaggcagggtcccatttctcactgagaagattgtgaatatttccatatggattttctattgttactctggttctttgttttaaaataaaaattctgaatgtacacgac

SEQ ID NO: 613 - DNA, 18463 bp, Homo sapiens
  source 1..18463: mol_type = other DNA
gggtgcctcatattgccagacaagagctcagacctgaggagagtgactagcttctctgtgtcccaggtaagcacttcggtctaattactgcctgctccttccacagctgtcttgtcctcatccctcctgtttggctcacaccaggggaagtggacactggaaagattaagccagctggttctctttctttgtttttgagatggggtctctctctctatcacccagactggagtacagtggcacagtcagggctcactccagccttgacctcctgggttcaagtgatcctcccacctcagcctccggagtagctgagactacaggcgcacaccaccacacccagctaatttttgttatttttttctagcgatggcgttttgccatgttgcccaggctagtctcacattcctgggctcaagcagtctgtctgcctcagcctcccaaagtgctgggattacaggtgcaagccaccacacccagcctgccagctggttctcgatggcagctcccaacatcagtagaggtccctggggtacttttcaggaggaaaactcacttcgtgtagcccattcagctaagggaagccacggggcccttaggcaaacagaccctgggctctggggatactgcagtgaaggagacatgtccctccccacagggaatctcagtgggaagagacagagctgaatacatttacctagcatataaatattagggctacttggggattgcttcacagattctgtcatgtaaaaatgctgaataaatattgaatggatgagggaatgaatgagtgagtgaatgaataaatgaactagctgggccttgagaaagacacgtgtgtagcccttagtccttttcgaaggtaattgccccagttacctcattttatccttgaaatagacctgcagcatagaacaagaattccacacccctatttgacagatttggaaactcagcataggtatgtatggtttggggagatttatcagaagctgatttgttgctttattaaataaaaaactacccactccccttgcttccaattttggaaaggcacattagcacatacctataccagaccctgtgccggccatgagtgcagaggtgatcaagttgggtggggtaaggaggtgaagaaactagaagcagagctatcagtttaggaggctgttgtaataatcaggccggaggatggtctggtgcagtgtgtgggaatggggaggaggggatgcagaggagagctcttagagagcctgagatccaattgcatagaggaggtgagggtgagggatgcgcgcaggcagcccgaacggccgtgtgagtgagcacacttcgatgtctccagtcaaggtggagaacagaagagctttgtgggggtaaggtgatggaaaaatgagtatggctttgttgaatttgaggagcttctccaccatccagatagtgatgtctaacagaccactgggatttaggatttggctgaggccaaaggtagatttgggagccctgacacagctattaatgaaaccttgggaatgggcgagataaagggagtgtagagggagggcatgaccgaaacttgggaaccccattgtctgaaggaacagaaattactgatgaagactacgagagactcaggaaggagacctaggagagactggccgtgaaagccaaggacagggggaattctgtagcaaagagaatgactactggctttgcatgcctgagagagggcagcagaggtggggactgaggaaaaggcttgggattgggcagttaggaggtcaccagtgaccacgtggagggcaaattagtgagcatagtgggagtaggcaaggaggggagtgtaggggtgggaaggtactatatttccagaagttctgctgttgcaaggaagggaggtaaagtgactcagtggacagatgtctcttcccatattgggccctctgctgtgtttcccttttcccccacccctaaagagcacctgactcactgagggctcccttgggactatggaaacagcaataccacctccagctcggatgagcgaagtatctgacatttctacagttccttacagtgtgcaaaggaccactaactcctttaatcctcacaagaactgagcttttcatgttatagaggaaatggagaatcatagagtttcagttcagattcaactacataaatctgaatgcacatctgagcaagttcctttgctctcgtgatctcatttgccccacacaaccctttgatacatgttggtcccatttcacagatgaaaagcctggaggttgagatggggtgcagctgccttgtggagagcagggttcccacctctgagtacagggctctttctgctctgcatcacttcactgttaaaacccacctgatgtttatgttgcacactacatctcataaagcatttccccaggtgttattctatttagtgctcacaacaaccttgtgagggtagatattatttcctcctgttttatggatggaagctgaaattcaaagaagtcataaatgacgtccaaggtcaggtcactagtggaacccctttctgaagcacagatccacccctgtccatgacccctgttgccttcaggatgaaattcatgtgccttagcctggcacaatggctgtcccttttccagcctgcctgcttctctggcaggtctttggttccctctttgttccaagcctctagcatgtccctgacctcccaaccacagcagcatgtccatctattacatgtggccatcttgctcactgcctgtgctaatcatactgtgattgttgatgagactgtgaggtccctgagggcagggcctaggtctgcttcatctgtaccacaacgtccagcatagcaggcatcaggaactggtgaatgtcaatgaatgacagaattaacgaatggcatttggactgaaatcagcctttccagtgctctctcattagacatgcttgtgaaaaacaagggccttctggttgactgctacaggatctttgatggttggaggttctgaattctgctcccagcttccttcctggtccccttcagaaggaaggaagttggtctgggttacagactcctagggcctatagagtaaatggttgacccaggttgtcccttttctcccataggtggccaccttccactgtggaagctcatggactccattgggtcttcagggttgcggcagggggaagaaaccctgagttgctctgaggagggcttgcccgggccctcagacagctcagagctggtaagttcagcactgggttcctgtttcatgcttgtctaaggccttcaagagcagcgtgactgaagctgccatggggccctgggctctcacccatgcagcccctttccactgagcttttcatatctgagctggtaacgatctcctttcatgctccaaacaactgcaaggttgggctgatcatcttacaggtgatgaagagggatatagagaagtgttatgacttgagtttaagacatgacaggagcttgagctgaggtgtttcagctccaaacatgtcatttttgccaccttgccacacaggtgccgctcccgccccaagtgggtgacacagtctagagtggactttctcagggttatctggtcaaaagttgtgttcttgagacctttcctttcccgcctctccagttcctcctgcatgtctccctcaatgtagccgctacaatcaggcacacagacgattttagtgccaaactcatgcctgaggcttgctcagaagtgagtttcttctttttctgtcatcttgaccaagatttagaagctgtctcataccacacccttgagcaggaaactcttgtgtaagccatttcatatctcttagtctctgtttcctcatcagtaaaatggaggaaaataaagtctaatcctccccaccccctgaaggctaatggagataaaggacttgcctatggccgggcgcggtggctcacgcctgtaatcccagcactttgggaggccgaggcaggtggatcacctgaggtcaagagttcaagaccagtctggtcaacatggtgaaaccccgtctctactaaaaatacaaaattagccggcatggtggcacatgcctgtaatcccagctacttgggaggctgaggcaggagaatcgctcgaacccgggaggcagaggttgcagtgagccaaaattgtggcagtgcactccagcctgggcaacaagagcaaaactccatctcaaaaaaaaaaaaaaaaaaagtccgggcgcagtggctcaggcctgtaatcccagcactttgggaggccgaggtgagcggaccacaaggtcaggagatcaagaccatcctggctaacacggtgaaaccctgtctgtactaaaaaatacaaaaaattagctgggcatggtggcaggcgcctgtagtcccagccactcgggaggccgaggcaggagaatggtgtgaacccgggaggcagagcttgcagtgagccaagatcgtaccactgcactccagcctgggtgacagagcgagactctgtcaaaaaaaaaaaaaaaaaaaggacttgcatagaggaggtgcccactaaagggtacttgagtcattctctgcagtttctttagttttctggcatattctgacatccacttgactaggcttgttgcccagattgtggaggcattacccctcgctgcatttcatgctcccacttcccccttgtccaacctgtaccccagaccctgctgcagacagttcttctgtgcctgacccacagccgtgcctcaggagtgacagcggtggctgggccacagtgcctgcccagccaggactggctctagggcctgctgtcatctcctccctcgcttcttgcccctccctgatgacactcctgtgcaggcccacatctgccctgctggctccatcacatacacctgcggttgaaagaatccctttcggctttgggggacttcacagggacaccaaatttcccatggtcctggacccccaactcagcaccacaggccttaccctgtgctccccttgccatgaccttaggttgaaaaaagttagttaaccacgtgtggccagttcccagtaccatctcagaggcccttccccaccccttccaccaggcttctctttgtcatcagagagggtatggagtcaggctctccaggctgggtgtgctttgtgctctgaggacagggaatccgtgttccactgagcatctcctatgtgtgacactgttcctccacttcaggtttgctgtcgtctcagtcctcatggcatctctgagaagtaggtactattgttcctgctagatagaggggttgcttgctcagagaggtgaggtgatgggcccaggccagcaacacagcaagttggtgacaagagccagtgttgaaaccacattggacttcacatgctctctaatgcctttctccttgctcttctgtctgaggtctctccctgctcttcctggggtgtcaggggtggctccgatagcttctcctggcttgtgtgtgcctcaccaggatctgccagggaagtccttctgtctttcttgcagttctgctgtcttctagtctctcctcccgaacatctcaatatgcccaagaggaaaaggaagaaaaacaatttgcccaagccattgacttctccgtgactctactgttttcatgaagcaatactaaaacgcccctcccatcccaatggcacttggcacttccacatacattacagcctttaattcttatgccaccacaaccatccaatcaacaaatcctgcttccagctggtgctcctcgtggccctcagatgtagccttgagcaagacatagtccctggcattgggggacttccaagtactattattttctcagttttgcacgaagaggtgactgaggctcagagagaggtgtgactttcccaggactgcagagccagaaaaagggagtgcgaggactcagctgtaagttttctcaagccggatcatctggggtttctttccagcaactttcatcagccttgagttcttttcaagggaactttctaggttttataaagcttcacattgacatagaaacatctctgcattcaggtagatatgggttcaaattctcccctgccccttcacagctgcttggccctgcagatgacttgccctctcggagtctccgtttccatatttctaacacttgggcagctggggctcagaggggcaaggctgagaccccgcctgtcctgcagctctttgactttgctgcccactgcctgagttcctggatgtgcagcctgtgagcaaacagggtctgcagcttggcttcagcttctctttcccttgtcaccagataggcctggtcagggtgagatagagtgggcatgggcacccctagcaggcatggctgctggaagcatgtgctgtaaggcaaacgtgtaagtggacatctggcaccccagttaggatgattcgccttcttagggatctgtttcccattctcttcctaaagcaagaggtgggactgagttgtccttatctccctcaactggcagcttctcctcccagcctctcctccctggagcggccttattatccaggtgcctgagttgttattccaaagataagtgtccagtttggggcaataggtcattgaaatggaactcctgtgtgacaggaagtgggggctttggaaagtctgagcctgaggaggatggagttgccaggctgtgacccttcaatgaatccagggaggctgttggggcttctttgaaggatgggtgagagagtcatctaggggagggtatttgctcacagggatgaggtccctggggctcttaagctactgggcttctggtggagtgacagcctggggtgtcctggcttctgccttccctgccttctcacctgccccttcagactccgatccactcccggatcagtcttctccaaatccatccccttgctcttcccctggatcttcgaatggcttgttcccttccttcatttagatcacctcctcagggaaaccctcttgaactcatatctaaaaatacctctttctaccctggtcactctctaatttcttatcctgcccccctacgtttaatagccaccatcactactggaaccaaattgtatgttcacgtgcttaatttctgtctcccaccctggaatctaaagcatttgttgcttcttgggtggttatgtgtgtgcggtgcttagaatacagctgggtgcatagtgagggctggagcaatgttttgggaaggatgactgactgaaaaaaggaccatcctctgcagtgtggtctccaaatgctctcgtgctgggctttttcaggcttcagagtctgagagtggattaggagagggaaacacttgaagtttgttcgtgcatttgtttattctcttgttcgttcaacaacaactcactgagagactcttgctgtgggtcctggggagccagagagcaatcattagtggtatggcaggaagaaggtcttgccaaaccctgaattcaaagaagaggaggggtagggtagaggatgtaagaaattgagaaggagccgtgaggtaatggggcaggaggaggaagaaggtgggttctctttccaggacagagccttctgaggatgccagagctgggtgcaggctgttggcaagagagtcagggtgtatgaagagccgaggagtgggctgggcagggcaggcctctgccttgtttggaggtggggagtctggccagcccaatggtgctccttcccagatgttggcctgtttctccccaggtgcaggagtgcctgcagcagttcaaggtgacaagggcacagctacagcagatccaagccagcctcttgggttccatggagcaggcgctgaggggacaggccagccctgcccctgcggtccggatgctgcctacatacgtggggtccaccccacatggcactggtgggtatcatagattgagatgcgtggccaggcctggaagagggtactgatctaggggagggaaacgttccttattcctgtcccccatctctatggccccttgaccagactttgcaggccttaggaatttgggaagtgggcagagggctctggtcttgccagctgcatggctttctgtgacctgcttgccctccagagcaaggagacttcgtggtgctggagctgggggccacaggggcctcactgcgtgttttgtgggtgactctaactggcattgaggggcatagggtggagcccagaagccaggagtttgtgatcccccaagaggtgatgctgggtgctggccagcaggtaagcactcactgcccagcctctggggtctgggggcctggctgggtggctagggctcagatgggcaaggctgagcccccccacttctcctgcagctctttgactttgctgcccactgcctgtctgagttcctggatgcgcagcctgtgaacaaacagggtctgcagcttggcttcagcttctctttcccttgtcaccagacgggcttggacagggtgaggtggagtggacatgggacgctgggtagagggtggctgcagccccatgaaggccgtcagaggagtaacccagcttctctacctccagagcaccctcatttcctggaccaaaggttttaggtgcagtggtgtggaaggccaggatgtggtccagctgctgagagatgccattcggaggcagggggtgagtggagggaggggtgacaggagggctgcccatgttggcctgggcctggcacacatgcgttgggtctgggcttctgagagagttgctttcctcttctcttcatgtcctccatccagtttaacctccatccagtttaacctatacatggtacatgttgctaccattcccattgtataggttaaaaaacactgaggctaagaaaggtcaaataaacattcaggacctggggcaaaaaaacatgaatagactttgacctcctcctcaaggttttcacagtctagatggggaagcattctaataaaagattgtccgtgtcaaggaggagtgcgtggacaactctgggagcactacggaggaagcactggctctttgatcaggggcttgaaggaggagtttgcctcccttcaagtcaggctggggctggggcggatgatctagtctcagagaaggccacacacaagagtctggatgctggacaaaggctgatccgtctgggctaacctcttgtggtgagaagccagtgctgggaggaacaggcttggggagccaggcaggatgacagtgaggctggcaaggcgcagagttcaaggaggtgctcagtctcaggaaactcatcctggtcctgggagatggtgagggtggacgtcactgtgacctgggggcgcaagttgggggttagggaggagctgagggtgggattggaggaaaagttcctataaggtgggagcccagagcatctgtggcacaaatgtgtgtggcatgcagacatgtgtttcatggactctatgtatctccttcaaagccagggccccagccctgcccatcccctggattccctcctctggccactcaggccagccttgacctctgccctcttcatcatctaggcctacaacatcgacgtggttgctgtggtgaacgacacagtgggcaccatgatgggctgtgagccgggggtcaggccgtgtgaggttgggctagttgtaggtgagccatggaccatttgtgatgacaggtggagggtgtgctgcctggctagcaggccttgacagggttgtctctgccagacacgggcaccaacgcgtgttacatggaggaggcacggcatgtggcagtgctggacgaagaccggggccgcgtctgcgtcagcgtcgagtggggctccttcagcgatgatggggcgctgggaccagtgctgaccaccttcgaccataccctggaccatgagtccctgaatcctggtgctcagaggtgacctggcagggggccctgacctttggttccaggccctgtctatgactgctctgctcccaaccccttctgtccctgttctcaggcccttaggcccctccctgtcactctgagggtctccagggagcaacctgggggccctggccaggttcaaagaaggaagggcccaaagttctagaatccagaattgtcaacccttgatcttccctgttcctgactctggcctgccctgacagtttgggggttgagggctggaagtggttgagcaaactgctctctgccttcctttgggtccttcttgttctccaggaggcttctgaatgtaacctatgtcagagggggcagtggggtctgggcatacacccacctgtcctctgggaggctattcgttgcttctggagtctccagtttgggagccccaaagaaaagaatccttctttgggaactcttggaggtagggccaggtggactgagggcttagaaaaggcttcctccagccacccttcccccctgcaggtttgagaagatgatcggaggcctgtacctgggtgagctggtgcggctggtgctggctcacttggcccggtgtggggtcctctttggtggctgcacctcccctgccctgctgagccaaggcagcatcctcctggaacacgtggctgagatggaggagtgagtcggggagatggtggtttagtgggggattcttggcttggaggaaggggatgatactctgttcccaaggtagccatggggctttagtgggatggggagcttctgggctgagccccaaaccacttccctttcccctccagcccctctactggggcagcccgtgtccatgctatcctgcaggacttgggcctgagccctggggcttcggatgttgagcttgtgcagcacgtctgtgcggccgtgtgcacgcgggctgcccagctctgtgctgccgccctggccgctgttctctcctgcctccagcacagccgggagcaacaaacactccaggttgctgtggccaccggaggccgagtgtgtgagcggcaccccaggtattgtggaaacgtgatccgcatgattagttggcatgaacacgtgtgtgtgatacacacccagagggccctctgggatcacatgtgcaagccagtggacacgaagggcacttaggcagagggagggccagactgagctatgggaggccagaagacatccaaggagagaaacgatgcttccctttgtgtgtgcaagggtggaggccatggcgacacgggggcgtatggctggtgcacagaacagatttcaaattgaagtgataggggaggctggctatggtggtacacgcctgtaatctcaacactgggaggctgaggtgggaggatcattggagcctgggagtttgaggttacagtaagccatgatcactccgtggcactctagcttgggtgagagagcaagactcgatatctacaaaaataaaaaaaaaaaagtgatggggccttgggcttcaggaggccctaggggtctggggccaagctgggcacacctgtatgtatctgggggtccagggccaagccgtgcacacctgtgtgtgtctgggggtccagggccaagccgggtgcacctgtatgtatctgtaggttctgcagcgtcctgcaggggacagtgatgctcctggccccggaatgcgatgtctccttaatcccctctgtggatggtggtggccggggagtggcgatggtgactgccgtggctgcccgtctggctgcccaccggcgcctgctggaggagaccctggccccattccggttgaaccatgatcaactggctgcggttcaggcacagatgcggaaggccatggccaaggggctccgaggggaggcctcctcccttcgcatgctgcccactttcgtccgggccacccctgacggcagcggtaaggacctggcctgagtgtgggaccgaaacatgggctcctgggggtcccagtgtgtgctggggctggagccacaagccctatcccggcactgagggtctctgcccccacagagcgaggggatttcctggccctggacctcgggggcacgaacttccgtgtcctcctggtacgtgtgaccacaggcgtgcagatcaccagcgagatctactccattcccgagactgtggcccagggttctgggcagcaggtacccacagcctgaaccttgatgtcagaggtggggaagggctgagcagtgcctacgcctgacctgtcctgccccacagctctttgaccacatcgtggactgcatcgtggacttccagcagaagcagggcctgagcgggcagagcctcccactgggttttaccttctccttcccatgtaggcagcttggcctagaccaggtgagggagggccaagagaagtgattcccaagggcctcctgcccccacatacccttcatggagtgggcaggaggcaggggaaaaggctgggcggtggcgggtctggggttggtggtggtggcagcactgctgggctgggcttgcacacagcctcagtttccccagacagggtaggcccagggttagggtctgaaccatttgggagcaggtcaggcctagactggggctgatcagaggacagatcgtccattttagctatagcactggtgtgtgggcctcagggtcctgcaggaaccagcatttgttcctgtctctagcaggggcttgaggtcgcttggggtttttttggcctctctcctcctcctttctttgtttccttctcagtgcctggctcagtgttgggtgcatgactagggtggcagagtgccaggcacaggctaagacacacatccctactcagcacacactttagcttgttcttacacaaggatgagggacttctcaatgtgcacaccggaagcctgtcacggaaacaatacctcccgggcctctggtccaaactcccaggaatctccctttcaacatacccaacttctgcttgaaagcctcttgccaaggagctcactgcccctgaaggcaacagttgcattcttagacacctgtgatcaatgaaaagcttcatctcacctactccaaccagcctccatgtgattttcaccccctgctcctgctctgacctctctctgatatgcaactcatttttttttttgagatgaagtctcactctgtcgcccaggttggagtgcaatggcatgatcttggctcactcactgcagcctccacctcctgtgttcaagcaatcctcctgcctcagcctcccaagtagctgggactacaggcacatgccaacacgcccagctcatttttagtagagatggggtttcaccatgttggccaggctgatctagaaatcctgatctcaggtgatccgctcacctcagcctctcaaagttctgggattacaggcgtgagccaccgcactccacctgatatgcaactctgtactctgctttcttttacacggtggtcctttggatggtgcagtgggccagtcttgctgcttggctgctctgctccaggctaagcctgctcagtccttttgattattccttgtaagatgtgagaagcaggtgagactccatgtgcaaatcggggggcggggtgggggcaagaaatatagtcttattaattttctgtaactgaacttaatttctgtgctgaaggctgggcgcggtggctcacgcttgtaatcccagcactttgagagtctgagacgggtgaatcatgagatcaggatttcaagaccagcctggccaagatgctgaaaccccatctctactaaaaatacaaaaattagccgggcgtggcagtgtgtgcctgtaattccagctactcgggaggctgaggcaggagaatcacttgaacccgggaggcagaggttgcagtgagctgagattgtgccattgcactccagcctgggcaacagagcaagactccatcttaaaaaaaaaatgttgggcccacattattttcaggggtgaaaacttaaccagtgtggggattgccttccccaggagcccctttggctctgcagcagcctttgctgtgcagaatttgcagggatgtgggaactcagggaggtgccccgggccctgctctttgggcacttgcctctgccacttcctctcttgagtctcgacaccttcctgtgcattatctggggaaggagggcagaggcctcctctgttctcagatttctcagatcccttctgaacaggggttcagcccagtggggagggcataggacacctgtctcaggaagtcatcagcaacctgggtctgacttccccctttgcctccccttccccactctagggagagcagcccacacagggctcttactcatcatctggtctctctcaaacgggttctttctctcactctatcacattctctgctttctgtttttgagacaatgagcctaggacaataaaaaacgggataaaaggacatattattggaggaaaacgttgcttactatttctaaaatcttctgccccaaagatttcctgacctaccctccatgctcctcctctgagcaaagcagtaattttctcccaacagctgtagactaattcctgctccccctgccccctccctcagaggacgcacactaagaaaacagcattcctttccaggtaaagttgagccccgtgtcactaagtttaagtcccttttctcacaatctgggcactcagccttcatcctgcccaggggcctgggttctggcttttccattcctcctgcccctgcatttggaacacatgagtgactcgcccattgacacggctctatccctgaagctgagaattccttcctctagagtaacttggagttctttctgaaagggtgggatctgctgtcatctgggcctctgagccttctctgtcctcccctgtctcacacacagcactcactttaccagctctgttaattcctaacccaattacaaagggccattccttccgggcacacgtcttaaaatggccagaccctctgactgtctggaactaataatggaaaatgtaggttagatggttattaataggtttttgcacaccgaaagcctcctggggagtagggagcgggcagagggcaaggccttcaaccatacagcaaagtaggcaaggaattgtgcttggggagggtggaaagcctaggcttgtgatggatgcaggttttgcagaggcagagtgagcctgaaggggcctccagcttcctgccacttcctctcggtctcaccccagggcatcctcctgaactggaccaagggtttcaaggcatcagactgcgagggccaagatgtcgtgagtctgttgcgggaagccatcactcgcagacaggtaggagcctgttctaggggtgctttggggctgtggcaggccttgaggggagcaaagagtctcctactttctgaggggggagccctctgcggtagagacctctgggtccagtgctggttgctgtgacgaccgcgttgcccagcaactagcagcatccttttgtgtgcaggcagtggagctgaatgtggttgccattgtcaatgacacggtggggaccatgatgtcctgtggctatgaggacccccgttgcgagataggcctcattgtcggtgaggagggccctgccctttcatgcccctactgcttggcaatttgctgccttctgttgattcctctggttggatgtttccttggcggtggggatgtgggattgctctggtctgacccagtagggctctggaacaatctcttgggctggcagtttggagcttgggtgtatagtccagctcagtgactgactcatggtcatttaagctctctgaacttcactttgcccatctgataaatgaatctgagctttggagttgtacagatttgggtggaaatactagctttgtgtttccacctgtatgaccttgggcaagtcaccagagcctcagtttcctcatctctaagatggagataagagtaacaatgcctgtctcaaggcatcatgaggatgaaatgggaggggacaaaatacagcatggtccctggctcatggtacacacctggtgtttggagctgggcgggggcaggggaccaatgagcaatgagggtccttcagacagtccaagattccatccttattaagcacctaccctgtgtccacaggggactggacagaggaataggaagacacataaaacaagaggcaatttctgccttctcagaaccgaccactcagcaagggttaagcccagaacaacacgtagcggtcagagagtgacttgattctacacgtgggcagcagcgaggccaagatcaggaaggagtgggtcccaggatgagtggaacttgaaagccctgaaagaaaggatttggctctgttggggaggagggatcccacagctcctggggcattggtctctcaacacgaggcatgtggcagcctctcttgagggggaggtttttgaacccagcacctggcacggttaggcacttgggagaggcatgcccaggttgctgtgtgcataaacagctggacagaggagctccaggtggggccagcaaggagcccaccttcctggagctgaagctgtgtcagagaaaggaaggagacgccctcatccagggtgcgtcctctgcctggaatgcctttttctttctgtgcttcttggattcagtcacttcctctctgttgctttcctgatcctgttggcagagactcgccccgtggtctgggctcccacgatgctctccttggtgcttccacgggggcacagaggctctgtcagagctggctattcattgcctgacctctggccagactgtggggctcctcgtctctgatttctctgtgtcccctgctcttggcccagcacctcttagttggattaagggcctggcaggccggtccagggagcttcggcctctcaaccgcagagagctaggggcgagggcgggggatgtcacatgtctcccaggggaatgacaggacagctgggcattgtaggagcacttgggggtggcatggtggatgcactgatggtgatgttggtgggaaaggcagtgaaggtccccagggcttggagctggcagggtctgcacgagggatgtcgggaaggaagaaggaccaggaccagggacaggctgtgagcatgagaggtagagagagtgagcccgaatcgttgccatctcggtatgggaagtgctcagagggtccttgtctacatcagtaagtagcttccacgttgtctggcctctctgcaggaaccggcaccaatgcctgctacatggaggagctccggaatgtggcgggcgtgcctggggactcaggccgcatgtgcatcaacatggagtggggcgcctttggggacgatggctctctggccatgctcagcacccgctttgatgcaagtgtggaccaggcgtccatcaaccccggcaagcagaggtgtgggctgggcccaggcagtggtggctggctgtgaccggtgctggggatggtggctggtggggccttctgccgagtgcacacatgttcatgcaggtttgaaaagatgatcagcggcatgtacctgggggagatcgtccgccacatccttttacatttaaccagccttggcgttctcttccggggccagcagatccagcgccttcagaccagggacatcttcaagaccaagttcctctctgagatcgaaaggtgcctgaggcctacattgcctcccccacttcagggggtctttctgtccactgtgggggattgctggccatgggtggtgacgaggtctgctctggaggatgaagtgggagaagtcacgacccacctccctgtgctctcttccttcctggcccccagtgacagcctggccctgcggcaggtccgagccatcctagaggatctggggctacccctgacctcagatgacgccctgatggtgctagaggtgtgccaggctgtgtcccagagggctgcccagctctgtggggcgggtgtagctgccgtggtggagaagatccgggagaaccggggcctggaagagctggcagtgtctgtgggggtggatggaacgctctacaagctgcacccgcggtgagtctgggtgtgcgggctggggagggaggtgtggccaggtggggctggtggcctgggctcacctcagccctcctctcacagcttctccagcctggtggcggccacagtgcgggagctggcccctcgctgtgtggtcacgttcctgcagtcagaggatgggtccggcaaaggtgcggccctggtcaccgctgttgcctgccgccttgcgcagttgactcgtgtctgaggaaacctccaggctgaggaggtctccgccgcagccttgctggagccgggtcggggtctgcctgtttcccagccaggcccagccacccaggactcctgggacatcccatgtgtgacccctctgcggccatttggccttgctccctggctttccctgagagaagtagcactcaggttagcaatatatatatataatttatttac

SEQ ID NO: 614 - DNA, 32744 bp, Homo sapiens
  source 1..32744: mol_type = other DNA
gagcaggaaatgccgagcggcgcctgagccccagggaagcaggctaggatgtgagagacacagtcacctgcagcctaattactcaaaagctgtccccaggtcacagaagggagaggacatttcccactgaatctgtctgaaggacactaagccccacagctcaacacaaccaggagagaaagcgctgaggacgccacccaagcgcccagcaatggccctgcctggagaacatccaggctcagtgaggaagggtccagaagggaatgcttgccgactcgttggagaacaatgaaaaggaggaaactgtgactgaacctcaaaccccaaaccagcccgaggagaaccacattctcccagggacccagggcgggccgtgacccctgcggcggagaagccttggatatttccacttcagaagcctactggggaaggctgaggggtcccagctccccacgctggctgctgtgcagatgctggacgacagagccaggatggaggccgccaagaaggagaaggtatctcgccctccattgggcattctgggagtgtttgcttgcctgtccccaacattccatggtttgtttgagcctcagaatctgattttatgcacaggctctttgagaagggtcttgccaggggtgccttctggggcaggaaggcccctactgcctggcagacccatccagctttggactctggtcctgcgacccggaagtcaggctgccaagaggtccaggcagtggcctccactggggaggggctctggagagtttagagccctagatgtgggggttagggacatgaggtcttgtggacaaagcccactacctgattttgagacaacactcactagacatggtgacaagtcaaagatgccttgcctcctaccaggaatcacttcgcagggagcccgagggctgctgtggcctgctgaggagtgcagggcagttactttttccaaaaacaaagagaaatccaggcatgctctgagccagccctgagcccagcagtgagcaaggagagagctggagacaggggactttgctgtgaaacactggggggaatgtgcctgcatcaccccagctgggggcccaggcagagtgggggagaaggggtaagtgggcagagccagtcactttgggcatgcttccctctcgcctctgtgtgaaatgaccaggtcagcataaaccccgggctggctgtgcttctggcagagctaatgatgttaggaggaaaacaaccaacccaagtgagagggtgcgcagccagacagctggaccggccgaggccccaaccaagtcccagatctgcctgtcactggtgctatggcagcaatttggatgagaaatcctgcccaaagggccccttcaggccacccggggagaaggaagcggctgtctttggcatgaccagaaagatggctcggagctagggagaggtggacatgtgggctgtggagatctggcactttccccaaacaaggagagaaagcatagtgtgcctatgtgtgaatgtgctatgtgtgcatgtttgtgcctgtgcatacctgcatgtgtacatgcatgtgcacatatgtgtgcacagggaatcactttaataaaggccacagcagagctgtccctgagccccttgcattcacagtggcatgtgagtgaaccaccttcttaggctgggcatccagtctcagactctggggctgcccatgccccatcctttatctgctccacgtgtgaggggttgctggtcctgaccagggccagctgtgaaccccagaatcctgggaagtcactgacattcttgtcagggccaagagtggagcaaggcaatgcctcgggcacaaactttaaggggtcaccagaaacatcaatcatcaagatatatgctattttaaataatcaaaatgaatgcaaaaaaaatttatgatggacaacataccaaattctaaacaaaggcaggatgagtatcactggcttctgcacttttctccacccagtctacccctcttctagtgcctggatcgcagggtgccaaggcctggatgagggaagcgtggagctgcaatggccactcctgtctgcctgttctggctgcacagaggactcagtccttgtcttgggggaacctatcttggttttagggtcatcctaaggatctgatgttttccaagtgagctggctgtccaggcccacccaggttcagtccagtcctgtgtctctgggaagtgctgcccctaccccaagccagtgtttgaccttggagcaatgagcaatgccctccttccactttcaaagttgtccccaagacgtcagctgtggttgtctctgtgcagacaccgaggaggaactgtcttctttctccttttggttgctttggaggaaagtaaagtgttgctggtttccctctttctacttctttgattgagagcagccgtcttgccggtaccaaccttccagatcttacctgtggttgcaggagcctgtggcctcagtcctgtgcccagtgacttctccatgtggatgtcagctccttaggggcaagcctgattccactgacactactcccacccctcataagccccttcttaccagctgcagttgcctggtaccccaccatcgctgactcattcctttggcatcaaggttcatcccttactgggccaccacttctgggtggcctgaaatagggccctgggcatccctcttggggaccttttggtctatattttcactctcacctcactaaggacagatgagtaaatctggttaactttgcctgatagatttggtgaccttttttcaggaaggagcctggaaagatgagattcaggtgtattggtcagcttagactgccataagagaataccatccactgatggcttagaaacaacagaaatctatttctcactattctagaggctggacgtccaagatcagatgccagcatggtcaggttgcagggagggctctcttcctgacttgcagaccgccaccttcttgctgtgtcctcacatcgtggagagagagtgaaaacaagctctctggtgtctcttcttataagaatgctaatcctatgatgggggctccccctccttacctcatctaaacctaattatctcccaaaggtctcatctccagataccatcacactggggttagggctttgacatatgaatctggggggacacaattcaatctgtaacaccaggagggcatgccgggaggaactgaccttcctccctccagctgccctggacacctttgccccattgaaggagcaggctcagaagtggaatgaggatggaataaggtgcactccatcatgcttacccacatccctggcaggaattgtcctgggccccagcaggagagatgcccccccatactgccatggcacctgctctgagacaggtgtgcagagtgcaaagctccaggtggcccccaagcaggtgtgctgggaggaggggcccgtgtgggaggagcaggcagcgccaaggcctagcggagcagtgacaggtccctgacttcagggaatgggcacgctgtgggcaggcagctggtgtgggggtgagggctggggctgcatctgtgggaccagggctgggccatccatcatatgccgtgtcacaaccccagtgcccctgctgtagccaggacaggaggctgggccaggctgggaggtgacaagagtgggggctgtccccaggagaagcactctgctgcctgtgcccaggcctctggggatgaggacccctcagaaggagtagctatgtctaggaagccccagggcaggagcaagccaaaggggacatcattagtgagatccaggggatcagtgggccacagaagccccagcgtgagcccctctgactgatgcagctaggcccacacctgcacctgcccacagcaagacccccaggaggagaggggacagatggagagaggcacaaagtgcccctggcctctgccttgaagccaccccaaggcaagagagatttgagcccctgtttagtgacctccaggggaacattctggcccatctgatgtgggaagccccttgtggagtctgtcattcctcagctgagccaggcctttggaggcagcccaggcatgtcccctgtgtgctcctatccctgtgttgggacacctggcccagcccctccttctgcctttctcttcccttcccttctcaggagtggacacttcctcctttagccccctcacagctgtgtgaacttctctgtatctctctctttctgtctctttctccccctctctctctgtctcattgtctctctgtgtgtctgtctgtagtattctctctctgtctctgtcactctgtctctctctctctctgtgtctacctttctgtatttcgctttgtttctttttctctgtgtgtgtgtgtgtgtatctgtttttctcactctctctctgtgtctatctttctgtatttcgctttgtttctttttctgtgtgtgtgtgtgtgtatatctgtttttctcactctctcaatctctctctctctttctgtctctcttttgctggcctgagcaaagagggagccccatcctgatgctacataaccgtgaaccagcacagacagaattgtaggaaagtcctgcaagtagaaggatagaaggatgagggaagaaacgccatgtgagtcatgacagatccctttccaggagccactgactcaccctgcctcctgccctcccactgtgacactattactcacagacaggcccggattaaacctatgttccaggtgccctgtggttcccacagtgtggctccctgggtctggcctcaggctccacaggtgcccagccctgccaaagtctccagagcagctgtccagctggggagctgcggggccccttcacagagcgcatgggaagaagttccatcctacacattacatcgagagggacgtgcctgagaaggggagctggagcccgtgcagccccctgcttgcgtgcagaacatagtgtaccctgagcatgccatgaaaaacacaaacgcacaaagttgtaaagaaaaaagaaatgacaggtggctgtaaaatcagttatagcccacgagaggcccactaatgagtggtgatttcagctgattacaaagaaatgatggtgtttctgtaatgaactaaacatgcactcgtgcgtgcacacacgcgcacgtatagtcacataactgaccagccctatgcatcacttgttaattacttagtaactgtaacaataatagtttccaataagtgagccttagtctctgcgcaagggtcagtttattgagcacacgggggccttgcagtgggggcaggtgatctgctcctgggagccgccagcctctcctctcctgctcttcatcttcctccgtggtgggaaattgtctcactgcttctacacctgaggctgaacatctccctttatttcagtctgaaacacatgtaaaaatatactggaatgaattaaggttgcaattattgatatcaggcagtgagtacatcagggtttattatactatctcctttacttacttcgaagttctctattaccaaaaaattaaaaactataaaagaaagaaaaaggaaatgaggctagattcaacacagattactcttaccaaacccttcgtagtcccaggagtcccctaacacaagcacttgtgacctggagtgatattcacagcattccttacctggcaatacctgagtattagcccccccagtgggatctttgttgtagacaaccagcaactatcagcccagccaataaacaagtaggaaaggggagtgctggagaggccaagaagtgggattttccatgctcctgggctgtgatccagagggcacggctgtgaggctgatctcaatgaacactctgtcttggaagtacagggatcctctgctacctgaaaacgttctgagtattcactttcatggattgcaaagtcatttacccaaaattcactctccaaatgaaaagtgagtatgatgaatcagtattcaagttccacctgggtcctgggagagggcatggacatcatatcccagctgttccgacaggaggacccaatctgagtctcactgcctgcctgcatcgtttgtctgctgccagcctgcacagtaggaagggaaaacatgatttgtatctgttttaggtcaggttcccaagaagtagagcctgagattggaattcttggaaaatggtgtttgcgggagcgctgtcagcagaagctataaggaagttggggggacagaaaacgagaggtaagaagccagtcaaaaaggcaggtccagcttaagtccgcctcagtctggttccacaagggctctgatgcatgaagaatatcacagggttgtccctcctgggagaggggccagcctattgtacctgtatcaaagccaccagctgagggccagtggggagggaagatcttccaggcatttccaggaaactctcaggagaagggtgtagctgtgagcagtctgcagctgctgctcactgcggctaaaggctgggtgtgcaggccagtcagccagtgaggtgccaacagcaggcactacagtccaccccttgactgctcagacctactgctttccactttaagctctctccatccaggcacagcttcagggaaaacttacaattggagaaacagagggatgaactacaatgcccacttctgcatgtgattgtaagactgtcactgatactcaccatcatgccccatccccaccatccattctagtgtccccttccccttggctaacactgctggtctaggtgacttccctagagcaggagccaaacccttatccctgaggcatctgaatcctggattcctttatcaggctattgttgttgtaagttgtccattcccaattacaactggacatgagactaccaagaaacaccctggcaaatcatctgagtgcaagccatattcttcctgctccattatgtagcggtagtcctacctcctaatgacaagggtaaattgccacattttgctccttgtgccaggatggtaatacctttctctacctgcttggctactggcacaaggaagcacagcatgaccaggaggcaattgtagctgtacatttagtgaatgtgttaatgtatcacctggtggaaggaccccctctgagaaccaggacttctagacccacaaaacctaaagttgtgaatggcggaagcacaaatttcccaagtggatcatggagagtgatgaagagttcttggttcccaaacccacatattttacctttcaggaacatggcctcatcccatagccattagagtgcatattgcattctggaggagactgggccctcctcatgggtgtcatcttcaagatgacagctccactgtgcctccaagaggatgctccaccaccctatctgtgattccttggttagcaggacaggctgctgcactgagggtaggaaaggcaagtccattgatggctggaatacatgtcaatccaagtcaagagaaaatgccgccctttccaggttggaaggggcccgatttagccaacttgtcacccagtagtggctggttggtctcctccaggagcagtgttataccaggaattcagcaccagtcgctattgctggcagttcttacattcaacagcagcaaaactaggtcagccttgatgagagggaatgtatgcttctgggcacaggcatggcttccttctctgactccatgactatctatttctgagtgcatggtggccgacattcagctgcctgcccatcctatccacttggttattattgcctcttccacaagaagtggtttctggctgtcattaatgtctcatactttgtgcccactcacacaggtttagctctacaacttttccccatgccaccacttttccacaatcttctaatgttgctccttccaagctactgaagaacgagctaagctattcaccaatgtccatgagtctatatttaccttaggccacatctctctccacacaaagtgaataagcaggtgcaccctccaaaactctactaagaggatttcttctccccagtgtctttcagggccaccttgagtggggctgaagtacagcagaagtccatttccagcttgcatcaacattccaaactaacctatccatgatcaatgcatagatgggtttttccctcctccagcagctagacaaaagacaccccccaccaggaggccatatttgcatgtgggtgaaagagaggcacaggggccaatattcgtgcaacagtggtagatggcaggtgggtctgggccacctgtccctgcagcttatctgtgccatctggacctgctcaagcctgattccagatataccatttccatcttatgatggatggcttatgacctagtgggtctgacagcaccaaactcataatgggcagttatggccacatggtcacttaatgtcctatggtcagacactctgctgagtggcatgccaggaaatgctttacaagtggtgtttggttctctgctgcagatggcatgaccttggtccggagccctaggggtttggacagtgactcctgttggggcctaatctcacattccatgcagagtatcatcagatttgccaatcacatagcctaagggtcaggactgatccaaccagtttttgcagagatcaaactggagaatgaaaggttgatatgatgtgaccatcatatcacgtttttctctcttgaaaagtatgcagatgtctgaaagagacaagtgccccaggagaaaatgcatgccttcctcaggatcggcccccacctcccctcctggccacaaggagggtcaaatctcagcatggcccaacttggacctgtcaaggaagaagaaaaaaattgtatgccaaaggaactcagtctttggctaacaagtactagacatcctttaagtctttgagaatggtaataatttctgccatccctccagatttgtgtttttctgttttggctgggtgggaatgcagcattttcactttgcctttgttattacaaatgttgcttattctataaatcaaggaaccattgtaagggctcttctgatggttaagtatatccattccaatgatttattcgggatccaaggaaatgatttctgggtgaatacacagaactagtggatccaatttgagacatacctgggccagaactatatttgtcgtcttaccccaataagcctgcactctactaggacagccatgacagcactttgggaccctagatataagtgtgaattgctggctgggcatggtggctcacgcctgtaatcccagcattttgggaggctgaggcaggtagatcacctgaggtcaggagttgaagaccagcctggccaacacggtgaaaccccatctctactaaaaaatacaaaaattagctgggcgtggtggtgggtgcctgtaatcccagctactcgggaggctgaggcagggagaattgcttgaacccaggaggcggaggttgcagtgagccaaaatcacaccactgcactccagcctgggtgacagagcgagattccatctcaaaaaaagaaaaaaaaaagtgtgaattgctatgaaatcactatcaaaagatctgagtgttacccttactcagtgtggtcgaatataaatagccataggttcctgttatacacacttgctgtggtgctacagagtctttcctcatgggaacccagtccctctttcagtcaatgggttctggttcgagaactggctgaggtttggaaactgtgcctttccatcataactttccactggggtgactgaccttggccttctgttcatcctttctagcccctaagaatccaacactctattagccttctccttagacccctataagctaatcccttctagttgttagtctgaccttggtgcccaatatgataattattcccactttgcttctgatatgcttctaagtgctgcccctggtctctgcccttaagtgatctatcatccccactgccattagggggagaagctctgaaaaagagttgtctcccatcaactctggtctacaaaggacagccctactgagcctcagccatgtgcccgacaccagcagattctttacagcctgggaagcagagtgtcttccctgcctttccagggaacatagccagcttacaggctttttgatcttatagagtaggtcagttatattttgccccatttcttttatccttttgatcacttcctcttggcccaccatgtaaactcaagcatccctgcttcatttaatcgagctgttgctttttctaagctaccaagagcaaccccagcaatatatcagagccctctcttgggacccttgctagggtgttaaatcctgcatcataggagaatgcccccacatcagcaaagtccccttatcctcttgatatcccacctgccccagtccagcaccttcaggatctggtctcaatcacaggatccagcacctttgggactgttgcaagcataagatccagcacttttgggatctagtctcccacttcctgctagtacttgttagccaaagactgagttcctttggcatacaatttttttcttcttccttgacaggtccaagttgggccatgctgagatttgaccctccttgtggccaggaggggaggtaggggccgatcctgaggaaggcactcattttctcctggggcacttgtctctttcagacatctgcatacttttcaagagagaaaaggcctccttctcacagcaagactacttctgtagatgcaggtggctcgtgggaatctggcaattcaaaattctcaagtgtactcactagcacattagaaaaccagtagtacacatctctttccaaatcttcattcagtgacactatgtcagtagctggaaatgggccatggtgggtgtatttaaaccatgaaaatcagaaaatgctacaaaccagggcatcccgcatctctagacagcagattgttggccatttcccagcataccattgtgtatactccttcccatcagggccgtggcttgccttggtggaggactcagcccttgctgaagttctgctactgctcttacaattgagtcctatgcctggtctccagctctgcctgcctcactacaggagacaagcatctctttgaacactgccgagaagaccctctggctctcaggcttggctttaaatcgatagacctgagcctgccattttctcttttccatgcatcactccactgatccacaggtctcagtggcatagtccttcgggttagcatctcccccacaccctcggtgccagagacactgagtaagaaagtacctccctgtctacccccatccccgctccccacaggcagggccttggcgatccactgctgcaatgtgccagagactgtcagtactcctaccaccagtgaggtggcaaccagctgggaagtgatccaactccagagtcccgccctcataggctgatttctaggaccacccctggtatactgtgttaggttcttgaagcagagcctgagataaggattctggcacctgtgattgagtgggagggtgctctcaggatgagatggggtagaaataggcaaaggtacagattcagcagcagttgagcctcagtctgacccagcagggagctctcaaatgtgaatgacatcacagagttgtccctctgaggcaggggccagcctttgtgctcctacatgagtcagtcactggctggaggcccctggggaaaggctagggctgccagctttagcaaataaaaaattagggcactcagttaaattgaatttcagataaacaacaaattattttttagtatatgtcccaaattgtgcataacataatgtgttttctccgccagccctgggaagggcgtaacttcccaggtatttctaggtgaagtaactttgtagatcaggagtaagtcccaggaaagaagtccagctcttctcttcagccctgggcagctgggggtaggcacaggggcccagcaggcacccatagcatctcctacagcatctgaaatgaacagggtcatcacgtactacatacaaatgtacccactgctgagttcttcagggattatatcattaggtacttggtattttaaatacattacattatgcagaagtcctttgtggattgctatatttggagagttttgtgatattggggggattagatggagttttcagatgggcatcatacggtttttcatttaaaaccctagagtattgtaatcctagggagtgatcctgcgattagtaaattagctctccaatagattttcaatgtggttgcaaaggacatgcatgtggttcaccctcccaggaaatccagaagggcagcattggcctgagtggcctgagtttggctggttgggctggtaatgctggacaaagacaatgggtggaatggtttgcttccctcagtcctttcagacacagcccagcccaccacgtcaagccagtgggtgcatctgcaaccaatccccatgagaactgcagcctctcagaggtgggcaagttggcccgggtgggtcaggaggatcagatgttgaggaaatctttggattggaggcaggcagagcagggaagcatcgggtgattctatgacagacccagggctccaagctgcagttcaggaggggcactggcacggcctctgctcaactcccccttgagtgacatcaggtgaagtgccgacaacacagaaggcagcaaatgctgccagtcaggtctgcttcccaggacagccagttgctaacccttctccagcacagcactggattttggtcacctggctgggagctccacctccccagctgctgcctcacctgcttttccaaaccccaccctgtaaacggtaactacattttgtgcccactacgcctcgtttccatctctttggagcacctctcacgtggagctgaacagaacgacctgttaagcccaccgtgtctgttagggttgtctaggctgtatcagatacccaactaaaactggattcaccaacaggtattgtcaaagcacataagaaagagtccagaggcaggcagctctcagcctggtgtcaggctctgggtcagctttccagattctcttaaccttccccacatctgccagatgccgccacaggcacaggaggtacaaacaaacccaaaaatgttctggaaacaagaagggaaggggatccccaccatatctccccagaggccttccttctcacatctcactgtactgaagccagctctagcagaagacagcagggtgaatttgtccagggtattcagcccccagtgctgggtccattactacttgacccctgaataaaacagaggttccatgagcaagaaggaaggggaactggatgttagagggcaagaatgtatccatcccacccctaggagcacgcatggacaactgccccatttttgctcctattgcagcccaggggctagcccagagaccttgccagtgctgagtcacaagatgctgggaaagtgagaccagagcctggtcttggggaacagctcaaggccgcattggtctgcaggtcatagagcagctgctgagcagtgagagcccacgatgggccaggccctgggtcttggagacctgaatgagatagactgggttcctgttctcctgggcattgcctcttagagggcaaagacaattaacaataaacaaatagaacatgaagtgttttccgatagtgactgatatactttggatatttgtcctctccaaatctcatgttgaaatgtaattccttatgttggaggtggggcctggaaggaggtgtctgggtcatgggggcagatccctcatgaatggtttagtgccatccccttggtgatgagtgagttcacgtgagagctggttgtttgaaagagcctggccccctctcattctcctgctcccactcttgcatgagacacctgctcccccttctccttctgccatgattttaagattccagggacttcacaagaagcaaatgctaacgccatgcttcttgttctgtctgcaaaactgtaagccaattaaacctcttttctttgtaatttatccagtcttgggtatttctttataacagcacaagaacagcctaatacagtgatgctctccaagtgacctttgggctgagacctgaagaagaaggggaagcagttaggtctgatagctcatgcctgtaatcccagctctttaggaggctgaagtgggaggactgcttgagcctaggagttgaagaccagcttggaaaacatagcaagaccctggctctacaaaaatattttttaattggccaggtgtggtggtgcacacctgtagtcccacctacttggaaggctgaggcaggagcatctcttgagcccaggaggttgagactgcagtgagtcatgttcacaccactgcactccagcttgggtgacagagcaagacctgtctcgaaaaagaagaaagaagaaagtaggaagaagaagaagaagaagaagaagaagaagaagaagaagaagaagaagaagaagaagaagaagaagaggaagaggaacaagaacaagaagaagaacaagaagaacaagaagaagaacaaggagaacaagaagaagaataagaagaagaaggagaagaagaagaaggagaggaagaagaagaagaggaagaggaggaagaggaggaggaggaagatgaggaggaggaagcagaagcagaagaaaaagaaagaaaagaaagaaagagaaagaaagaaaagggaaggagggaaggaaggaaggaaggaaaaagggaaggaaagggaaggagagggagagggagaaggaagaacaaagaagaaagaaggagaagcagaggcttgtgctggatagccttgcttttgccaatgaccttgctgattttcagggggtcctggtgtcttagtccatttgtgttgctgtaaaggcatacctgaggctggataatttacagagaaaagaggtttatttggctgagagttctgcaggctctacaagaagcatggcaccaatgcctacttctgatgagggcctcagtctgcttccactcatggcagaaggtgaagcagagcctgcatgtgcagatatcacatggtgagagaggaagcacgagggggcagggaggtgccagcctcttcctaatagtaagctgtcttgagaactaatagagtaagaaataactcacaccctgcccccaaggaagggcattaatctattcatgaagtatctgcccccatgacccaaacatctcccattaggccccccacctccaacattgaggatcaaatttcaacatgaggttccggtgggcaaacatccagctataatactgggcaatgctgaccagactcttcccctctcaggcccagagctccttggccctgtaacaacagaaaattgcgtttgagtgtcaagatttttcctttagtccccatgcagctccttagaatgaggtggcatcttctcccttttcataggtgaagaaacagaagctctggaggaacgaatcattcatccaaggtcaggtagctagtaagcgtcccaccagctccccagatctcctgtttcctgtcccaagtcccactgagtgagctggaacaatggcttcactggcacctgccgggaatggtggcaggtgcctataatcccagctactcgggaggctgaggcatgagaatcacttgaacccgggaggcagaggttgcagcgagccaagatcacaccactgcactccagcctggataacaaacggagattccatttaaaaaaattaacatataatatacatacagtaacattcactttttaagtgtacagtttgatgagttttatcaaatgtatatggttatataaccaccatcaccattaaggcagaatcttcccatcactcaaataattccctcagccccacctcttgctgtcaatcacttctcccaccctagccactggaaatcattcatctgttttctgtccccttggttttgccttttctagaatgttctatacatgagaccactgagaatatagtcttctgtgtctggcttctttcacttaacataatgcctagctcagcagtgtgtcaatcctccctcccttgccattgctgagcagtgagtattccactgtatggctgtgctacggtgtgttcatccatttattcattcaccagctaatgggcatttggattgtttccaggctttggctatgatgagtgaagctgctgtgaatgttcaagtacaagtctttgtgtagacaggggttttcaattggcgggataaatacctaggagtagtatcgtgtggttaagcgtacgtttaaacttagaaaaactgtcaaactgttttccaatgtggcctgtaccatgttgcatttccatcagcagtgtttgagaattccaattgctccacatcctcctcccgacacttggtttcacccatcttttaaatattagccactctggtgactgtgtagtgatatgtcagtgtggttgtaatttgcatttctatgattgactaataataatgttgcagatatttctgtatgcttagtgggcatttttggtgagtttttaaaaattgggttgttgtcaccgtcttattgagttggaagaattctttatatgttctggatgtttattcatgtgtgtgtctgctaagaggtgagactggttctaccctggtcctaacaagcaccctgggcctgcatccctttttgtgtctgtgagctgggtctgcagccctctcctcccactacctactgcccagcagtacccctcacccatcactgtggctcctgcaatgacatctcagcctgtctctccctccctccagctagccagaggcaggatggctcagtgacacagggtgggccctgaagacagagtgccagggtttggaccttgtattagcaagagtcacaagggaaacttactttatctctccatagctctgttgtgaggatccaataaattaatccatagaagagcttaggacagcacctggcacaaagtatacatgagctattatgatgttattcttccaacccattgtttctgtgttgtcataaacatgaatgcaggactcagtgtcccagctctgtgtccctcgcatacattccctaacagcccacaggtcttgcctgtcaccgcctcattcaataagtgatgactctgcctcttccttggctggggccttgcattggacatttctgtatccatatttgttttttaaaaactagctgttggccgggcgcggtggctcacatctctaatcccagcacttgggaggcagagacaggtggatcatgaggtcaggagttcaaggccagcctggccaacatggtgaaaccccatctgtacaaaaaatacgaaaattagctgggcgtggtggcatgcacctgtaatcccagctacttgggaggctgaagcaggagaatcgcttgaacctgggaggcagaggttgtagtgagccaatatagcgccactgcactccagcctgggcaacacagcaaaactccatctcaaaaaaaaaaaaaacaaaaaacaacctagctggacttgacactcttgttagaggaagatttttccacatctgttaacttttcttctattgttatccatctgtgcaggtttttctgtcctcctgagtcattttgataatttatattatattttgaaaatcatccatttcctatagttgtttattagtgtcttctctgttatatttgatcagattaccaaatcttgctcattgattgcccatttattttattgtgtttatttttttgagacagggtctcactcgacagcccaggctgaagtgcagtggtgcaatcatggctcactgcagccttgacctcctgggctcaagcaattctcccacctcagcctcctgagtagctgggacctcaggcacacgccaccacagctggctaatattttatttatttatttatttatttatttttgtagagatggggtctcactatgttgcccaggctggtttcaaactccttggttcaagtgatcctcctgcctcagcttcccaaagtactgggattacaggagtgagccaccatgcccagcccctatttactttatagtaagtgccttcatgggcataaatgttcctctgagacagctttggctattagccatacttttaatattttgtacattcatggttattcatttataaatggtctgtaatgcaatgcagatttcccctttggcccaaatgccatttacagcagcacttttctctttctgagcagacagaatattttggtttcccctctgttgtttatttctcgtctgcctcgcctcatttgctaggtgttcccttggtgtgccttaagtatgagccactcaaatatttgtgtttctctaaacacccctgacactgtcctgctggtttctctatctggaatatccttcccttcttggccagttccccctagtgcatcaaagaaatcctgctcttttgccttcagaaaacaaaacaaaacgaaacctatcagtctccttatgtccccaaagacatagctttgctggtatctggttgtattgagctgttcatttgtctcttctgctagatggtaagctccttggaaactaaaaactaatcacttttctaacttcagactgagcacaaattaggttctcaagaaacattgaataatgagtgatccggtatccccttccaacatatttttggtcattgataccatcattctgagtagttactagggaacacttcactgcagtaaccaatacagcaaaacgtgaaatacagttacatagtagaattgtatttcttgcccatataatagtcaagtgcagttcttcatcagctgggaggttctcctccacacagtcatttaggaatccagggaacatagcagaggttgctagctctagacccaaacccatgtcctctttgtccacagtgaggacaatgccagcaacagctggccagctgttctgtagttctcagcctccctcgcagtgagatgtctccatgcaatttcagtggagcaacatataccatttccatttccaggtgtaggctcctaagaagagggtggcttcttcatgttctttctcacctttccgtaggctagctgcagataatgatgaggctttagggagtgggtggagccataaagtagaagcctggattcctaaatgacggtgtgaagtgttccctaatttcacgtaattgtttcttaatttcctgtttgggttatttgttgctaaggtataaaaaaaccctgatttttgtgtgttgatatttgtgtgctgcaactttgctgaattagcttattagctcaatttgatctcagatattagctcaaatattttgggagattatttatggttatctacataagatcatgtcatctgaaataaagatagttctatttccttctttctatcttagtccatttgggctgctgtaacaaaatgccataaattggaggctgagaagtccaagatcaaggcccaagctaattcactgtctgatgaaggcctgctttctggttcatacatggcaccttctagctgtgtcctcacatggtggaaaaggcaaggtagctctctgggattcctttttgtttgtttgtttgttttgttgtttttgtttgattttttgagacagagtctcactctgtcaccaggctggagtgcagtggcacaatctcggctcattgcaacctctgactccctggttcaaacgattctcctgcctcagcctcctgagtagctgggattacaggtacccatcaccatgtccagctactttttgtatttttagtagagacagggtttcaccatgttggccaggatggtctcgatctcttgacctcgtgatctgcccaccttggcctcccaaagtgctgggattacaggcatgagccaccgtgcctgtcctccggtattctttttataagggctctttttctttttatgtgggctctaccctcatgacctagcaccttctaaggccccacctcttaatatcatcacacagcagatttaatatatgaattttgaggggacacattctttccatagcactttccagtatggataccttttatttatttttcttccctaattgctttggttagaaatgtcttccctaattgctccactactatgttgaaaagaagtggcaaaagtgggtattcttgtcttgctcctctcttaggaagaaagtttaagtcttttgccattaaatatgacgttagctatggggttttcatatatgacatttatcatgttgaggaaattttcttcttgtttcaatgatgacagggtgttgagttttgtcagatgctttttctgcatcaatcaatatgaccatgtagtttctttgttttattccattattgtagtacattacattaatttttgcatgttgaactattcttgtgttcctgggataaatttcacttggttatggtgtataatccataaccataacctgaagatatgctgaagaggctaagtgccatggctcatgcctgtaattccaacactttgggaggctggtgtgggaggatcacctgaaatcaggagttttagaagagcctgggcaagtaaacaagatcccatctctacaaaaaattgaaaattaccgctgggcatggtggctcacgcctgtaatcccagcactttgggtggccgaggcaggcagatcacctgaggtcgggagttctagaccagcctgaccaacatagaaaaaccccgtctctactgaaaatacagaattagccaggcgtggtggcacatgcctgtaatcccagctactcaggaggctgaggcaggaaaatcacttgaacctgggagacggaggttgcagcgagccaagatcatgccattgcactccagcctgggcaacaagagcaaatctccgtctcaaaaaaaaaaaaaagaaaagaaagaaagaaagaaaagaaaagaaagaaaattagcttgatgtggtggttgtgcacctttagtcctagctactcaggaggctgaggcaggaggattgtttgagcccaggaggttgaggctgcagtgagccatgattgcaccactgcactccagcctgagcaacaaagtaagacctcatcactaaaaacaaattttttaatactgaagaattttatttgctggtattttgttgaggattttgcatctatattcacaagaaatattactctgtagtttttcttcttgtagtatctttgtctggtttcagtatcaaggcaatgctggcctcatgagatcaatcaggaagtgttacttcctcttttattttttggaagaatttgagagaattggtgttaattcttctttaaatggttggtagaattaccagtgtagacatctggtcctgggattttctttgttgggaggttttttagtactaattccatttccttacttgttattagtctaatgagattttctgtttcttcttgagctagttgtagtagctcatgtgtggaatttttctatttcatctaagttatccaagtttacctaagttaaagttccattttatctaacttgggtaagccaacaaacaatactaaattgttcatagtattctctcatagtcctttttttctctaaagtcagtaataacgttcactctttcattttttcattcctgattttaataatctgagttctttctctccccctccctgcaattgagagtcatttaaaagtgtcttgattaaattttatatatctgtgagttttccagttttccctctgttattctcttctagttttatttcatgtgatccaaaaagatactttatatgatttcaatttttttacatttactaagacttgttttgtgactaaaatatccttgagaatttccatgcacatttgagaaaaatgcacattctgctgttgttggacagagtgttctgtatatgtctgttaggtctaattggtttagagtattgttctagtcctctctttccttattgatcttctgtctagttgtttaatccattattcaaagtagtggccgggcacggtggctcacacctgtaatcccagcactttgggaggccgaggagggtggatcacaatgtcaggaggttgagaccagcctggccaacatggtgaaactccgtctctactgaaaatacaaaaaatttgctggacatggtggcacacgcctgtaatcccagctactcaggaggccaaggcaggagaatcacttgaacccaggaggcagaagttgcagtgagctgagatcgcaccattgcactgcagcctgggcaacagagcaagactctgtctcgagaaacaacaaaaacaaaaacaaaaaacaaagtagtgtactaaagtctccaactactattgtagaactctatttctcccttcaatgttgcaaaattttgtttcatgtattttggtgttctgttctttataatttttatatcttcttaatggatgaaaacttttatcaacatataatgttctttgtctcttgagacttttttttttaacttaaaatctatttgggctgataatacagccaccacaactctcatattggttgttattttcatagaatatcttcttccatccttctactttaaaattcttctatctttatatctaaagtgagcctcttgtagatagcatataggtggataatgttctctttattcactctgccaatatctgccttttaactggagtttaatctatttatatataaaataattactgattaggaaggacttacttctaccactcagctattttttttctgtgtgtcttatacatttttaagtttctcaattcctccattactggatttttttttttacttcttgattttgtgtctgtgttgttacattttgattattttctccttttgatagcggcaggaggcagccaaatgcctggcagatagaagcttgtcccccatgaaaccccaccttcaagccaaaaaatagcctgaaggctgaaagaccggactgctggtcccagatgaaacccatgatccagagtgagaacttccattcctgtttgcctgccctctaaataatcccttttaaccaatcgaatgttgccttttccaatactacctatggcctgcccctcccccattctgagcccataaaagccctggaatcagccacattgggggcactttgccaacttcaggtagggggaccacctctgtatcccttctctgctgaaagctgttttcatcactcaatgaaactctcaccttgctccctctttgattgtcagcgtatcctcatttttcttgggtgtggtacaagaactcgggaaccagtgcacaagccagacttggtctgggcagcacgggttagtgggccatctcccacagcaggtagcatggccaagtgaggcctgggcagggcatcaccaaggtccctggcttgcaaagtgaccaaggaaaaaatcctgtgtcactttccttttctcatattttttagttattttcctaatgattgccttgaggatggcaattaacatcttacacttataagaagctagtttgaataatagttccaatagtacatgaacactctactcctatatatctccatccttcttcctttatattgttattcccacaaattatgtttttatacattatatcctcactaacataaacttattattattttctgcatttgccttttaaatcatacaggaaaacaagaatcacaaagaaaaactacattaatatttgctgttatatttacctatatagtgacatttaacagtgtatttttatgtcttcagatgtctttgaattactacttagtgtcttttcattttagcctcaatgtttccctttagcatttcctatagggcaggcctgccggtaattaattccctttggttttctttatctgaaatgtctaatttcttttttattcttgaagaatagttttgctggctataagattcttagttaatagtttttttcccagcacttcaattattattaaagtgttattattattattattattattttgagatggagtctccctctgtcactcaggctggagtgcagtggcgcaatctctgctcactgcaacctccgcctcccaggttcaagcaattctcctgcctcagcctcccgagttagctgggattacaggtgcccgccaccatgcccagctaatttttgtatttttagtagagacggggtttcaccatgttggtcaggctgatcttgaactcctgacctcaagtgatacacccaccttggcctcccaaagtgctgggattagaggcatgagccaccatgcctggtctaaagtgtaattattattacagctgccatttggcctccttggtttctaatgagaaatcatctgttaaacttattgcaaatccttggtatgtatgctatgtgtcatttctctcttgctgcttccaagattctctctctgtctttgtcttttgacaatttgactataatgtgtttcagtgtgaatttcttagagtttatcccacttggatttcattgagcttcttggatgtgtacgtttgtctttcaccaaatctgggaaattatttcaccatttctcaaatatctttttcttcccctttccatctctcttcttctggagctcccgtatacttagttggcatgactgatggtatcctactggtccctcaggttctgttcatttttcttctttctttttttctgctctgcagactggataacttcaatcgccttttcttcaagttcaatgattatttcttctgcctgctcaaattggccatttaacccctccagtgactttttcatttcagtattgtacttttcagatccagaatttctatttggttcctctttaataaattctttttattgtcattccccatctgttcatacattgctctcccaatttcctgtagttctttgtccatggttttctttagttaattaagcatatttaagacagttgacttaatgtctttgactagtaattccaatgtctaaaattccttatggatagcttcttttaaattatttttgtcctgttagagagtcatatcttcctctttatttgctttgtaatactttgttgaaaacttaacattttgagtagtaaaatgtggtaattctgaagccagattctccccctcctttgagattggttttgttgtttgttgagggctgcagttgtccatttgtatagtgacttttccaaacgatttttgcaaagtatgtattctctcttgtgtctggtcactgacgtttctgttctggtgcctctgcagtcagcctatgacctggaagagcattccttaaatgcatagatttttttaaaacccaagaaacaaaaaacctagcatgtatgtacctttttaaaaatcttctgatagatgccacctggaaggctgctgctgcctgaaggggcagaaacaaaggcaagctctactctgagccctcagggaaccaccagataaacaaaagaaatttgattctccaaatttctggaagacaaggtcctttctgcccactcctgctccagccagctgctctaggaacacaattactgtccacatggccacaggaatgttgaagaatgcaggatggtagctggtttgcccacaccactcacttatgagccatcagcatgcctctcccttcatcgagcactcccatggttgctgtaagtgtccaatcaggttccagaattctgaaagagttgactcttacaggatttttttcttttctaacttgctggttgtttagatagaggaaccaattcctgaagtttcctacgttgccagcttcatgaggatcattccctagtaactcttttcagacaaaaagcttcattgatttactgtaggactagcatcaaagagtctatgccacctagtctgtctccttaaaacacagaaataatcagtatgcattggggtaggagtttggcattagatctgccgtaaatcaagagctggggacagcccatgtcttaaactctgacccaagggctaaaatatcctttggtagcaacaacagctacaaactattgaacaacttgtatgtgccaagagccttacctgcattatcccattgaatcctctcaacagccctgtgaggtagtagaattgttgcctgccccttactgaggcctagaaacattaaggaatttgcccgaggccctagagccagtgagtggcaaagccagtctccagactcaggctggagatcctacagttctgtgttaccccagtgttatcctgcctctcagcacagagtcttggatgattctcctaacccctccctaggcaatgcacagggctgctccctgcacccttactcatgctctgctcttcaaccccaacagtgctggccttaggctttatccctgacacccagccccaggctccattccatctgttgacagaggcaaacactggggcaaaactgacctctgtggataccactgtgtccacctccaccagcttcagctgaagcctctgaacatctccagcatggaagaagccccaaaggatatttcctgtcccccagcatatgcttgaccctgaagccctccccatctagtcaagaagaccaaactgttaacaatcctggagtcagagtgacccatgggtgaatcttagccaagtcactcatagctgttgcatcctagtaaatcccttaactcccataggcttcagtttccctgcatataaaatgacagccttcagctcatcggccagtttcaatccatctaaagggtctagcacatcccctggcatgtggaagccacagggcacacactagttgtggtcatttgatcctggcatgctctgctgtctctcggctctccccttgcctctttccctgatgtcctggccatcagccactgcctaacaccctcccactcaccaggcccttagcctgccccttagcacaagagcacagccggtctcaagtctaccctgctgtaagcaaacacttgcaacatcatgctgacctccaggccctgttgcatcagcgtgcccacacttggtgcccagctggtactgagggtatcagggaacaggccagtggtggaagggcggacactttgggttccctggtttcctggctcccaatatctttcccaatggcatatggggtctagcagcttggctcatttaactgtgaacctctaccctttagaatctgggcctccaggcttgcttctgtgcaaaatggcagataaggctcaacctttctttttttaacttcattgttaaatattactccattaatacccatttactgcagaaaaggtaggaaatacagataagcaaaaaggaaaataaattaaaatcctcataccaccatcatcaagataattactgtcaccattttggtatatttcctcccaatacatatattatctatatcgtatatacgacaaaaatggatcatactatgtttcctgttcttcccctgtgttagtcatctattgctgtataacaaactgcctcaaaacttagtggcttcacctttccgtgtattatgatgacaagaatgtggtatgacactgtcttatatctggatcatatgctaaaagatagaaaatggtttctaaacttatttgttctgtaataacaaaattttatttcataaagtgtttttaaaaaaaaccatagtagcttgaaacaacaaacctttgttatctcacacagtttctgtaggtcaagaattcagaagcagcttagctgggtggtctggcttggtgtctctcctgaggtcagggttttggctggggctgcatcacctgaaggcttgactggggccagaggagctgcttccaaagtggtccactcacatggctggcaagttggagttgcgtattggcaagagacttcgcttcttctcaatggatcttcccagagttcttgtaggcaacctcatagcatagcagttggcttcccccagagggaacagtccaggagagaacaaggcagaaaccacagggtcttttctggcttaggctccaaagtcatactccaccatttctgcattatcatattagttacacaggctagacctattctgcatggaagagactataccatggggtgaataccagaagcagggctaattgaaggccagcttcaagggcggctacacattccctttcaacagtatgtcatgaacatctttccatgccaatagagcagatgaatcttaccatttttaatgactacatgtaagtgtagcataatttatttaaccaacctcctgtagttgggtatgtgggttgtgtctcgttttttgatagtagaattaatcatcttgaatatccatcaccaaacttgtcatattattttcttttgatgaatgaaaaagaaaatcaagtcatgtctgtcaatcagaaccctgagcaactaagaaatgggggtaccactgggacatagagcaaggtcccttctgattctgctcttgtctttctctccccatgaaatggggagttcactatctactgagacatcctagcccacagctgcacagttctgtctttttagaaagctctaagcagaaacaatgttcatccatcctcctcgggacagcccttgagctactgaagactctaagcatgtcctggtcatcctccatgagccatcatctctgaggccctccccttcttggcccctcttctctggacaggttctggacagtcttgcccttccaaaattcctggaaagcaggaactgttcctgctacaatgactctcaactccagtgcagtacagactgttggtgtcaccccttatcctgaagaagaggcactgagacaggacaagggtgggtgcccaggagggctggcatgagtcatgagaatctggtcccggagaattagacggtgtggggaagtaggggtgttgggccgctttctggcctcatggatgccaatgaatatcagcaggtggctcccagaaaggaactctaggggatgcctgttgctctaaatagaggctagagagggcactggcagttcagtcaaccaagaaagggggcccacttgcctcagcttcaggctttgtacacatcctcagcctttcttgagaactgaatttagattctcctcccctgtgctgtgtgcttggcccagaagaagggcaagtctcgctgggtggctgcttcttggcctggctgaaccagaaggccccagtgccactccaaacctgggtgtgagccctgcccccatgagcaaacagtagctcagagctgggggctgtgggggtcagtggcctgtcacatgagatctgatgaggccatctctgctctatattgggaaagggatcaattgtatcaagggctttcttgggagtgatcactctggccattggcgagagacctggcattctgacaaggcaccctccataccctgacccacttgccagctccagctaattttagcaggctttggcaggtgccagcaagtacatagcatgtggatgtcactcccaggtgagcccaaggagaggcctgggccagagcctggaagtcatggtctatgcccatggaggcacccaaagcaagcctgaggcctggactttgcagtcacaaaattaagaatgatacccctgttttttgtttgtttttgatcagttggccaccttcctccaccaccccttccccaagttccatacagacccctggattgtatgaaatgcaaatcgaacctctctgcagatgaaaatccactggggatccccttgcctccaagagcaagtccagacctgcaccagcgcgggccaggcccccttaggaccccctccctgtccaagggcatttcagtaagtgttctgtggccaaggcagcctggtgactttctgcccgcacaaggctgaggaatggaagatgggtaggctggctctgcacaccccctcctgctgggcagcaatccctaccccatgttcacagagtgtggccggctgccccatggctctgtccccgtggccctgtcaactgttacccacatggcctaccctccctttctgccctgcctctgaccccatggcagggggcagagtatttgagcagccgccaggctgagccctttcagtgcagaagccctgggctgccagcctcaggcagctctccatccaagcagccgttgctgccacaggcgggccttacgctccaaggctacagcatgtgctaggcctcagcaggcaggagcatctctgcctcccaaagcatctacctcttagcccctcggagagatggcgatggatgtcacaaggagccaggcccagacagccttgactctggtaagggtcacaccaaagttagggactttgcactgggagagcagcacccagggcagggcccttggttttgcagattaccaaaactaaggctgggggcagggaaggcgagcaggcttggggcaccttggaaggaggcacatgggccttgggggtcctggctagggcagctgtgcctgccactggccctctgcccaccacccctcctcactgtggctatccagtgtccagcctctcgaggggttctagggtacttattcctggagctaacggtgacccaggacaccagtgtccggggcctggcctggggcttttatggggggagctggctggctgcccagggctgtctggctctctgggggctctgcatggcatttccaggggttggtggatcagggattctgtccctcaggagaatgtgggcactagcccaaggccactcacttctgtgtacatagccacctgagggcccaggaatggagggggccaggctacagctggacatctggcactcggatgggctctggagcccccaggcctgcagcatctgcccagggactgccctggcccttggccatttcctcagggacccacagctccaccagccggcccctcccagtgctggaatagacagttcctcagtccacatctgccaaaggcggcactagaaggcatcctgccttttttactgcgttctggaggtggggtcacaaagcactgctcactgcataaaagggacagcatcctgcccctggcagccctgcctgaccagctccgcctctcccactgctatccaacctgtacaccctggtgaccatgtccaggccagtggccttaaggactgtctctgtactgatggctccacatctacctctccagccagactctcctctgaactcgggcctcacatggccaactgctacttggaacaaatcgccccttggctggcagatgtgttaacatgcccagaccaagatcccaactcccacaacccaactcccaggtcagatggaacctcttcttcccaggcccttctgttcctctcctcagcccctcccacctcccttcagaataagtctagactcttatcgctttcaccaagcctgcgcccagcatccctgcacagggattgttaggacagcctgacgccctgcttccaccctgccccaagatgcccctgctctgcagcccggcgcctccaggcttctcacctcctgctgctcacagctcagcctcactccctccctccccgcctctgctccagcctcagtgcaggtcccctgctcccatcttctggcagcagctgcccgacctggtccctcttcatctgtccccattccttcaccccccagcctgtccccaacttgactgaggttctttcctgcagatccccgcccttgagaggggttggtcccactgtcaactctgcttctgtgccctgtgccgcacctggcattcagtgagcatctgctgaagagatgagggtcagatgccctgcagggagtgtgggggcgtcctcaggcaagaaaagttgtacgtttggctgtgggccctgattatgtgtcctgtgacctcttgggtgaggtcagcaagagaaacctctgcaagctggctggggctgcctcccagaggctgccagggggagggacaggctctgtctgtgctcttcttccgaggctacacctggggcgccaggctctcagggctccccaggtaccaccacatttcctacactgcttgggaaagccctgtaagtttgcacagacacccagcatgaggctcgccagagagatacttgtagctggggtctgggcaccaggaacagcttggtgctgggcctgaagtcgggcaggatgcagcctggccaggtgagaggaaagcttggagccagtgcctgggttcaaactcctctgtggcctatggttctgtgggcttggggaagggtttgtacctctgtgtccagtttcctcacttataaaaaaaggagataataaaagtacccatgtcccagggtggctgtagcaataatagggaggggtgcccagagcaggtctggcacacaggaagtgtgcatcagcctcagtccctgccattgggcttgtcctgggagtctgtgaagccaacctctgctccacaatgtgacccccaggcttgtgagaccaagctgggtcagagcttcctcctctggggttgcaccaggaggggaacttctgcaggcccagatgcaccctgaggaaagggcttgttcccaccaagaacaaggctcacctttggaggatgctccccacatgagaggtgaacccccaggtctactggtgactgcagcctcggaagctgacagcatctatcctccaacccatgcccactgggaagtgtgtgaggggtcctcataggcc

SEQ ID NO: 615 - DNA, 10753 bp, Homo sapiens
  source 1..10753: mol_type = other DNA
cccattggctgcgagaggccggtgcgggccgcactcgcagggcccgtggcggttcaggcgccagagctggccgatcggcgttggccgccgacatgacgcccgaggacccagaggaaacccagccgcttctggggcctcctggcggcaggtgagctccggggaacccgggcccggatgcggcctcgccctcccgcccctccgcgtccgctccgctcaccctcggccctgtccccccagcgcgccccgcggccgccgcgtcttcctcgccgccttcgccgctgccctgggcccactcagcttcggcttcgcgctcggctacagctccccggccatccctagcctgcagcgcgccgcgcccccggccccgcgcctggacgacgccgccgcctcctggttcggggtgaggccccgggctcgctcctcccgccctgggaccccacgccctcctctcgggacgggcatcgggaccctccgccccccacccttcccctcgggacaggcatcgggccccgccgccaccacctttccccacgagacaggcattgggcctctctgccccccatcccttccctcgggacgggcatcgagcccctcagcccccacccctcccctcgggacgagcaccgggcccctcagccccctacccctcccctcgggacgggcgcggggccccggctcttttacctctgagcccgcggggagtgggtggagggggaggatgggctgcggcttcggcgccccctcctcagcagccgcccgcctccaggctgtcgtgaccctgggtgccgcggcggggggagtgctgggcggctggctggtggaccgcgccgggcgcaagctgagcctcttgctgtgctccgtgcccttcgtggccggctttgccgtcatcaccgcggcccaggacgtgtggatgctgctggggggccgcctcctcaccggcctggcctgcggtgttgcctccctagtggccccggtgagtgtcccgtctctcgagtgtcctgtctcgcggcctgagaccgagggggagtgggacaaaccgctccccaggcctgggggcgcggctccccctggcgggaccttctgggtgccaggcttgaagtccctgcgttatctcgcggtccctcccgtcgaccctgggaaggatcctactgttctctccattttacactgaggtcatgacatgcagtctcggaaaggtgaagtcctttgcccaggcgaggtccacagctagtcagaggggaagcagttgcaggaacccagggttgtcccacttagccgtgcccctcttttgctctgcaaacctgcggatgatccacaggagcccactccctacattttggttttcatccctggcttcgggtcaatgactgcaattagcaggaagttcctgtcctgatttctcttggggcaaaggctgctggcctctgtgttccccttcccttctcacaggccagcccctctggcttccccatcttccccctttccccctcctgacccaggctgcccacttgggagccccgaacatctgggtcaaatcctggttctgccactaacctgagcagagtgcctccctgggcctcagtttccttctctggaaaacagggattatggcattagcccctgaggtagtggtcaggattcagtgggactttggatagacagcccctggcatggcttgtagaggactggatcctgacagcttggtgacccatgaactgcccccagccatgggcttggacaatatctcccccaagtgaggttgaaagcagccactcaggcccctccctgggtgctcatttcaccaacgtttgctaaccggcagcagcagctggaccagaagagggtggggaagaagctgggccttttatgtctttggtttttttaactgggcagaaacacacctgtgttaggggcctaagctatggaataaccttagatgcatgggtgagggcctggtggcctgtgggcccaggagggagctagtggcagccactggtagtgaccgaggcagagagttcgtgcttctagtccaaggccaccactcaaagcgtgggccctgggctaggatcctgggtgggcgtcacgtggagctggttaacaaggtggaatctttcgcctgtccagacctactgcatcggaatctatgatttatccagggtgtctgtgcacattaaacgaaggcttgagaagctctgtgcccaccgcctctcgtcatcatatgcagccctctccgttacccttaatcccctttaaacacctgccacagatctttcagtggtggggacctggggatggctctgctcacctaggcaggttccactaaggggcttcagggcctgccgtaaccccctgcaaggactttcctcagctctgaatggctgagacctttccattttaagaactcttggagcctgagtaaagcctcatctttttttttttttttttaatttttatttaaaaatttcggagtttcgctcttgttgcccaggctggagtgcaatggtgggatcttggctcaccgcaacctccacctccagggttcaagtgattctcctccctcaacctcctgagtagctgggattacagatgtgtgccactaggcccagctaattttgtatttttagtagagatggggtttctccctgttggtcaggccagtctcaaactcccaacctctggtgatctgcccgcctcggcctcccagagtgctgggattgcaggcatgagccactgcgcccagccataaatcctcatctgattgctggcaggtctacatctccgaaatcgcctacccagcagtccgggggttgctcggctcctgtgtgcagctaatggtcgtcgtcggcatcctcctggcctacctggcaggtatagttgtcattatctcttgcttcctgtttgtggtcatgtggccattttacagatgtgtaaacagaggttcagtgaggtcaagggacttgtctgaggtcacatagccagtgcccaacatgccaggctcgccttcctgggaccttgggataggtgagtctttttttttttttttttgagacagagtcccgctctgtcgcccaggctggagtgcagtggtggctctctgcaacctctgcctcctgggttcaagcgattctcctgtctcagcttcccaagtagctgggactacaggcatgtgccaccacacctggctaattgtttgtatttttggtagaaagggggtttcaccgtgttagccaggatggtcttgatctcctgacctcatgaaccgccaaacctcagcttcccaaagtgctgggattacaggtgtgagccaccgcgcccggccgataggtgtgtcttatgactgagttccagggacagctggagaaggtgataccctcagctttcctgaagccccctctaggggtgtgggaagggctgactgcttaggtcagtaccttactgtgcagtgacaaaccagagggctccagaggtgggtgggtccctgtaaaaatcttcagcccgggcgagtaaagggctgagcaagtcccctgagaatgtcagtgccagattcaccatgtcggcgagttgcaacgtgaaggaggccggggtcctggggaccccgaggggcaaagctgggccagcatgaagaaacttcaggagacaggtgtgttctcattagaaagaggccaggctttagaggccagacccagtggctcacacctgtaatcccagcactttgggaggcagaggtgggcggatcacttgaggtcaggagttcgagatcagcctggccaacatggtgaaaacccatttctatttaaaatacaaaaattagccaggcgtggtggtgggcacctgtaatcccagctacctggggggctgaggcacaagaattgcttgaacccagaaggctgaggtttcagtgagctgagatcgcgccactgcactccagtgtgggcgacacagtgagactctgtctcaaaaagaaagaaaaaacaagggcaggcttcaaatctgaccatcctgagtttggggatagcctctcctacgtgctgtgtgaccttggccaagtcataccacctctgaaagcctcagtttctctgtcttgaaatgggcataacctcatctagtccagtacctgtccattaaattaattgacacatgaaaagtgcctaacagtgggttccaaatgagaattgtcaagggatgacttgagaaccatggggatcatcggggtaggaggcctcgggggcctgacgggctatggcctggcccagggcacaagccctctgcatcgtcagggcggatgatacacaggtctttggtgtttcatttttacccacttaaccaccctaacaaattcagaatcctgccagcgatctggctaccttgggagacctgagtaaaccaaagcccccactgtgtgcaggtgttgacattcatcatttcggggacaggtactgggtgtccacccacccgtggcactatcttcagctcatcttaatatgtgcttgttgcttctcctgcctttcctgatcaatttctgtgagtttcgatccactggggtgggtgaactctgataactccacaaagtgacatggtggtggcacgtttgcttcacattggggcaatcatgttccaacgactagacttcatagaacaattgtctgcacccccagcacagaagaaaaatagggacatcatggctaccttagaggtatttttccactgggaaccagggatgggtaagccttgggcttaggaaaaattagtaattagagcagcaatgccctagactcatttattccagggcccctttgtaagagaaccttttaactttatataaaactaggtaattctgcacttatgctgttcttcatacgtcaagacagcaaaatcctctcacctctctactttcatgtatactttgaatagataatgcattcaaatgactcaacactcaagtgccagagtggagagatgtccagtgaaaagcttcctccgcctctgtccctttcttgtctgggggagtccccattgcctgtttcttggtagccttcagagagtctgttcatatgagggacatgcatatttatcctccctcccccacctcttctacaaatggtgccacatcataccatgcggacacgcagcaagcacctcatccttcatttttgtggctacataaatgtttcgttgaacggatgcagcctagtaatgtccgcgttgtcatacccactgtcgcttccgcagctggtgtgattggcccgtgccatgtgccttcatgaacagttgtgataatggcaatgtcagtagcgaacatgagggcagatgtgcagaggcagcgaggccccatctctgaagctgagtctttgaggctggcaaggcccaggctggctcaccctggctctgacgccagcctcctccacccaccccccgcaggctgggtgctggagtggcgctggctggctgtgctgggctgcgtgcccccctccctcatgctgcttctcatgtgcttcatgcccgagaccccgcgcttcctgctgactcagcacaggcgccaggaggccatggccgccctgcggttcctgtggggctccgagcagggctgggaagacccccccatcggggctgagcaggtgagaggctggaaggcagagctgacaggagtgggacagcagtcacgggagggtagcacagcctgttcccaaggccacacacttggggggtgggggacagggaggtgcctatccaccctccaccctcagcgaggacaggcccagtgtgtcctgtctttgagcaggccaagacagctggagccccacggagctgggccctggcctccaaagtcaccagcaaagcccgagctttgacccttactgtcccaggaagagaatggccaggcctggtgggggatacagaggcagagctgaggacttggatttaacaaaggagttgcaaggcagggtagagggctaaaagtctgggttttagagtcacccaggcatgggtttgaagcccccacgctgcccctcacctaagctttagctcttcacctgtgatgtgggagtcagcacctgcttcacagtgctgggtgggactcagtgggggaaaggaaggcggggcttagggaggaggggggctcagtggggagggtggggtcagcgaggaggatgggttcagtggggaggggagggtcagggctgtaggaggtgcttagctagggccaggcccagacctgaggcaggtgctggatgtgttggtggtggcagggatgagggcagcagcttgctctttgcccagattacctctttgtggctcccccccacctatcaggaagtgccctgggcaggtgagggtcatctcacctgacacatggggaggctgggacttgtctgcacacctgaggacacagggggtgctgggatgaggagccaagacgtgggagtcagcgctccccaagccttaggacagtagacccccagaggggggccgcttgcgggaggggagagagaaatcctgatggccagtatccgtcagagcagagctttcacctggccctgctgcggcagcccggcatctacaagcccttcatcatcggcgtctccctgatggccttccagcagctgtcgggggtcaacgccgtcatgttctatgcagagaccatctttgaagaggccaagttcaaggtaaaagggccctgcctggcctgcctcgtccagcccccacatagatggagcttcctccccaagcccagggcccagccatccagcacaggcctggagagggagggacccagctctcagctggcccacctgacctgcctgggctctgtctcccccaggacagcagcctggcctcggtcgtcgtgggtgtcatccaggtgctgttcacagctgtggcggctctcatcatggacagagcagggcggaggctgctcctggtcttgtcaggtgagggttcacccctgtgcagcctccccgccatgcgggggagggccttcgccaaggccaccacactgcaggaggaggacagggagcatttgtgatgacaaacatcatggactaatgcggccatgatttgacagcagcttgtcaccaagcactcactgcaggcctgtccatgccagtggcactcccacaccacgcctttaacctctgtggtgaacccaccagaaggcactctcacagccccagcttatgacgggaaaactgagggccaggaaggtgaagtgactcaagagtttgtgggtccttttggacaagtgactttacctctctgagcctcagtctccccctctgggaagtgggggtaatggcagtgcctccctcagcaccattttgaggagtgggaggtgatccacgtgaggccttcagcaagagctgcggcccacggacatttggtacccagcagctgctgcgaagacgaccgtcggggctgagggttactcgctgctgcttctgtgccggtacctcccatttcctcggcccagagggtctgctccgggaactttttgcagttcgctgaggtccaaggcggggtggctgccacccagtcagggcttctgcggccaaggtgccagaacaccaagctggccgttctctgggagccgggcctgcccctctcagaggcatccaggccatgctgctgcgccctgggccgttccccgggtgccccgcccactgccgccctcccgcctgcaggtgtggtcatggtgttcagcacgagtgccttcggcgcctacttcaagctgacccagggtggccctggcaactcctcgcacgtggccatctcggcgcctgtctctgcacagcctgttgatgccagcgtggggctggcctggctggccgtgggcagcatgtgcctcttcatcgccggtaagggggcctgtgggaggctgggcgaggagtgggaggtgatccccccggccctgctgtggcggctcccggcaggtggggtcttccccagcctcacctctcctctcgtaagttccaagctctgcatttctagctctgaccacatgcagctgtggaactaggcccctctgcgttcctttcacttaatcccctgagcagccctcgagcaggccccgttgtgaccccatctcagagacagagcctgtgcctgaggagggaagaggctggccgaggccttggcaggaaagcatggagctggtgggaccacactgggatccgggaccccacagccccacaggctgggaagctgggtctcttggctctgcagcaagctgaggagcccagccctgcggaccctgatgcctgtcttgcctgtctcgctcccacaggctttgcggtgggctgggggcccatcccctggctcctcatgtcagagatcttccctctgcatgtcaagggcgtggcgacaggcatctgcgtcctcaccaactggctcatggcctttctcgtgaccaaggagttcagcagcctcatggtgagggcaggctccaccagcaccgcgttcgtgcagtcagccgagaagcactttctaaaaccacttgtattgcagaagacccagggtcgtggccttacatgcagcctgagccccaccatgcctgggccactggccatcttgggcaaggcgacgtggaggcagatgggctaggccagatggggaacccaggctgtgaccccttgggagtcctctgcctgtcttggcagtcagacagcacagctggcctctccccttagtgaacgtcaggaaagcgggccttgagcctaaggtcttacatgggaagagttgacagggctgggctgcagccccaccctggctacttccttgctgtgtgaccttgggtatgatgcttaccttctctgagcccgcttctttggctgaaactggaggagagtaacagcagcttgctcttaagacggatgggagcattaattcagttcatcctgttgctgccttctcacggatggactggcacaggtgtggcccctgtcccggggcttcccagccaacagagagacagttctggggtagatgatctggttgtttgttcagtcatttgtgccctccaggtctcctggcatgtgccatgtccaggcccattcaaggcgccagggagagcaatgaacaagatggacagggtcccctttatgacaaggacgggaaaggccatggcagtggtgggagaatgaaccccagtggggctgggttaggatgtggtggggcgggtcatgaggggccagcctggagtctgtgcagagcttgggacccgcttaggcaggactgcccggggagcacatcgagggggccaggccgatgcctgggggtggagattacttgctgcagctgggaggggatgcgcagcaaaggaaggaggaaaagaagccaagaaggaggtgacaaaggacctaacagtccttttttaggagagaaaatgtccaagaggccaagagaaggccttcgaggagggagagatcgccaggtcccagaggaccaggagctgagaagcacctttttagttctggcacgtgggaggtcacagtggtggtggatggcagggacaggttctgactgaaggccccatgtgctcctggggccatgctcgctttgccctgtctcacccatttccaccacactatgaaagaacccaccgggggcctcagggtggggccaaagctgagggtggagggttggtctgtgggccctggagtcagacctggaacaggagcccagctgtcactggatagcgggtctctggccttgaggcagtcacttcattgctgtgagcctcagtttccccagccatacgacctcggtatcttggacagtgctcggcccaagccaccagactggatgccagactatcctccatgtcccagagctgggtggagataaaatgggtgtggccttgggcagggcaggctggggtcaggggactggaccccctggtggcagagctgtctcagtgatcgcgtggggcttcctgatctctccccgcgtccacccatggcctttcctctctctgcaggaggtcctcaggccctatggagccttctggcttgcctccgctttctgcatcttcagtgtccttttcactttgttctgtgtccctgaaactaaaggaaagactctggaacaaatcacagcccattttgaggggcgatgacagccactcactaggggatggagcaagcctgtgactccaagctgggcccaagcccagagcccctgcctgccccaggggagccagaatccagccccttggagccttggtctgcagggtccctccttcctgtcatgctccctccagcccatgacccggggctaggaggctcactgcctcctgttccagctcctgctgctgctctgaggactcaggaacaccttcgagctttgcagacctgcggtcagccctccatgcgcaagactaaagcagcggaagaggaggtgggcctctaggatctttgtcttctggctggaggtgcttttggaggttgggtgctgggcattcagtcgctcctctcacgcggctgccttatcgggaaggaaatttgtttgccaaataaagactgacacagaaaatcaggtcagtgtctctgggctttgtgcaagctcagtttgaaaagggtttattcccatcactgcccaggacaccctgtggctttacttgctcatggtcagccaagcttacccttcacactgagaagtcatttctggctacttccttgggctcagttccctgggtcatcagccatcaaatcttgttgagtttaaaaaataaacagcaaaaaaaaacaaaacaaaacaa

SEQ ID NO: 616 - DNA, 32744 bp, Homo sapiens
  source 1..32744: mol_type = other DNA
aaactttcgtgcgcgttgaaagctgctggcgcggcggggcggactccacccctgcccggcagcccagcgcctccggccgcacttccagctctctgcgcagcccgccgcgcagcccgccgccccagccatggcgaagcccctgacggaccaggagaagcggcggcagatcagcatccgcggcatcgtgggcgtggagaacgtggcagagctgaagaagagtttcaaccggcacctgcacttcacgctggtcaaggaccgcaacgtggccaccacccgcgactactacttcgcgctggcgcacacggtgcgcgaccacctggtggggcgctggatccgcacgcagcagcactactacgacaagtgccccaaggtaaccgggggcgggacggcgggccggggtccagcccggagtcggagtctccggccgcggccgggcgggacgaggtggagaacccctcagagtggtcccttgcacccggtccttgccccgaagtccagaggagacgtgtctaggctgtgggcgggcagcctgggggacagattaggcctcccaacagacgccgaactcatgtctccgaggtgccacccgccagtgtcccgcccaaaccactgtgccgtccgcccctggaaaccgccaggtgggcaaaagcccaggcccctctcgcctgtccacttcacaaacttttttggaactttgactctcagcatttaatcaagaggtgacgggggcctcttgtcctgtatgccggacactattctctgccctggacactcagccctaaacaaaagggacaaaaatcttgccttgctggagcttggtattttgggaggggagacaaacgccgagctgggaaaaggtcgtaagtctcaggcctctgggagtggctaagtgtggtgcagaggaggggcagggtcccgctccaagcgtagagcgccgcccacccattctcctgagtgggtgtagctcctggaattccgtgagtctttcgcaaaggcggcccagggccaggcaatgccctggactcgtcctccccgaagacacacactcccccgacccttagcccttccacacccgaggcctgcccccagagctgctgaggaaggctggtcagggaccacctccatccacggcgtgggggcgggagcagagacctccttagggtgattttggacctacagagggacaatatctctgcctgacagtttgcgaagagggcgagaggcagtggggaaggactggggaggacatggcagggagagggattgtgtgcaggctggagtgagggcgggtgtgagtctgtattgggagaggaaactggagaagccaggtagagacatattggaaagaataaaagattgggatacatcccaggggcagtgggaaatatatataaacatttattagaactttttaattatgtaaaggtgtgaagaaaaaaaaatggtctataatcccagtgcccaagaaaccccataggaatttttaagaaaggaaatgaatgtaaattctcatagtaagaaattgcaactgtaacagttttcaaatggaaagtaactcttcttcaccccaaagacctaggcctccaccaaggtagcaactgctaaaatgtatccttaaaaatttaaatgcaccttagaaaacactttatgtatacatatatttactgttttgttgttttgttttgttttgttttgttttgttttgtttgagacagagtctcactctcgcccaggctgaatgaagtgcagcggcgccatcttggctcactgcatccttcgcctccagggttgaagcgattctcctgcctcagactctcgagtagctgggactacaggctcctaccactacacctggctaagtttgtatttttagtagagacaaggtttcaccatgttggccaggctgctctcaaactcctggcctcaaatgatcctccttccttggcctcccaaagtgctgggattacaggtgtgagccaccacactcggccactatcttttaaaaatttatttacacaaagggaatgctactaagtacaccatactgcgcctctcattaaaaattatttttaacaattttaagcggaagggtgggacactgagcatatattagaaacacacactcacgcctctgtagcatttagcatcatagagcaccagagaatcttgtatgtttttccttcagtggcttatgcagtgctttatggttttcctggttctccggccagtttcttcactgggctctccttttctacgtgagtgcagatataagccaggaattccgacgtgtgtaaattctgatagcgatacactggggatacaacaatgaacatgtttcattccacacgtgttcatcaaatatctactccatcacagtcgtctgtctaaacaggatggttcctgccctcataaagtagagcaagtaggtgtgtccaagctcctctcccacctcccttgctctccaataactgtgcagatgaatcccaaatatggatccctagtctgaattccttttctaactctatgcgtacatttctgagtgtttagtgaacatatctagatatcttcctatttcctcaaactcagtacgttaaaaactcaaaccattatttctcccaatcctgccccatcttcccgtgttttgttttgttttgtgacagagtctcactctgtcacccatgttggagtgcaatgatgcaatctcggctcactgcaacctctgcctctcgggttcaagtgattctcctgccttagcctcctgagtagctgggattacaggtgcatgccaccatgcccagctactttttgtatttttagtagcgacaggattccaccatttggacaggctggtctcgaactcctgacctggtgatccacccacctcggcctcccaaagtgctgggattacaggcatgagccaccacgactggcctctgtgttttttgttttcatgccattgtcatcttgacaatccagacgcaaactttagtctcactttttgccgttcaactgtttgccaatttctgttgatttctataggttcccttgaatgacgtgctctcctccattatctcttcctgccttggtgaggctctagctacccatttgttgcagctgacttcacgtggttattttgctttccagaagtggtaaaaccggcagcctgaggctgaataaggatagcagacatactttgttggccaagacatttttcaggaatttaatttttagcgcctgtggtcaggacttgcacactccatttcttagcccagtactcttctttgttttatgtgacctcaattacacatttattttctctgcctagctcctgaaggcatttgagtatatgatcccgtctcattctgtgcattgtggtctgctcaagcttcctaaagcaacgcatcttgcccctgctcaattatcattggctcctcttgcctgccatagaacttaagcaagtattcgaaagcacttctcagtccaggtgggcctgttcttcccttgttatcttccattaccctctgtacccaccttgctctcccaacaaaccaatccccactctgggcccccgattcacttgcagtgtccttcctaccacatttctatgctcaactcttgcctgtcctgcaagtctcaggtttattgacaggtgttccagaggtcttcccggaagtacccaggccctctgactaatgctggggataaaaataaaacatacaatttaaaaatatttgttatatcttctttattttattttacaagccttttgaaaatatccactttttacataaaatactagtaatcatagtacatgcatgtaatttataaagtatattggagatgctcatatattttactatcagtcatatgtaacaaatatttagagaccagtaagtaagagtatggccaagatctattttttgaagtcttatatattcccaaatataaggagagattacctctaagaagttatttgtgagaaaacagggaatcaccttacgttcctgtccttataaagtctgtcatgcaaggaagtattttctcatttactttattctgagcaaccacatatctctcaagagagactttgaaatatttttaagaagacttaagttcgtgctaatgtggaatcattaaaaaggaggcaaatttaatacagatgtagtcattattcctgggggtataacctcacaattgcaagtgtggaatatatactatataaacaagctttttgtagattacttaaaagaaaaaggcaaaacatcatggttatagagataatgaaaatacacacatggaaggatttttttaaactgggtaatactatgcaaatgggtatttgtggcttaagatactattacctgtgacagcggtcatcacgtactagagcaccagccattgcctatgtctgccccagagaaggtacttttatccaatcattcgaaggtatctaatagctggtgagggttctagtaacagcattatagacattcaaacaacttggatgaaaacgaagatgatgtgttctggaaagcagtgttaggtggcccgttaggtcatggatgttgaccatttgttgtgaaatttagaactcaattgttcataaaaggaaaatgggaaagaatgaaatttccaagttgacgttttcaaataatattttgttttaaatatttatgtgtaactagtatgttaaatatgataatacgcctttattatactgaattctactcacaattttttttgattggccaaattattattttttctttttttacttcttatcttatggaaatggggcaatccctaaaatttgaggtaactatattggtgcatttacagatttttgccattttgttttgtgtctagtagagaagagaggatagatgattggagaataagatattgtaaaagggggcaatgaagttactcactggtgctttttttttttaattagtaaactgtgctgtatataaagaaggttttcagcaggtctgaactttgtacctctcaccttcaactctgatgatatttgcctgacttttaccatgtcaaaggcaaataatgtctaagtcaatagagaaatttccaatttcaataagaacaaacaccaataaaccttaggtagtcttcttgttcataaggaacttgccagtaaatagactttatagaaaaatttgattctaaaattaattgtaggccgggcgcttggctcacgcctgtaatcccagcactttgggaggccaaggcaggcagatcacctgaggttaggagttcaagaccaggctggccaacatggcaaaaccttgtttctactaaaaatacaaaaattagctgggcatggtggcaggcgcctgtagtctcagctactcaggaggctgaaggagaattgcttgaactaggagacagaggttgcagtgagctgagattgcgccactgcactccagcctggccgacagagggagactgtgtctcaatcaatccatcaataaataaataaattaattaattaattaaactgtaaaatttcttacagtaatcagccaaggaggaatattttctacccatgcggtgtgtgggagttaatctttgtgtttcttggatgacttgagatagtcatagccaactcagcttaccggcacccaccaaggtgccctataaatattttattaatgaatggtgagctatggccgtctgacttctgtttgtccaaaacctatgctttattcatgaggttcatgatcaggagagggaaaaaacacaaaacattgaatctacttagatgagtttgctttttttctccccgggggtaaaaaatactgaattacttcgccaaaaatagtgctttgccaaaacctgttgtcagtaacacttttatttagtccttcatacatctctataggagtgttagcagaaaggagtcaccatcccagactccaagagagggttcttggatctcgcacaagaatttgaggcaaattcatagagtaaagtgaaagcaagtttattaagaaagtaaaggggccgggcgcagtggctcgcgcctctaatctcagcactttgggaggccgaggtgggcggatcacctgaggtcaggagttcgagaccagcctgaccaacatggagtaaaccccatctctactaaaaatagaaaaattagctgggcatggtggcgcatgcctgtagtcccagctcctcaggaggctgaggcaggacaatctcttgaacccaggaggtagaggttgcagtgagctgatattggaccattgcacttcagcctggtgacagagcaagactttgtctttaaaataaaaaaagaaaagattttgaaatatttttaaatatcttaagtccatgctaatttggaatcattaaaaaggaggcaaagaaaaccttttatcagcaaggtttctgtgacctgtatcttgtgcagacctcctatttcatcctgtgacttagaatgccaaacgttctgagaatgcagcccagtaggtctcagccttattttacccagctcctattcaagatggagtcactttggttcaaacacctctgacgggagtctcattcgaacctgtggtgacatagtcctgcctgtttgtttcttattggtgacctaacacatgaccttgtgtttttatgttaagtgaggttgatctcttgggggaaacattatctctcttttctttatttcagagggtatattacctctctctggaattttacatgggccgaacattacagaacaccatgatcaacctcggtctgcaaaatgcctgtgatgaggccatttaccaggtacattgttcctagatttctctcatcctgtctctttaaatttcatgtgcacttcaggaaacttggggacattgcacaaaaaaataaagtaaaataagagtgaaaaatcgcctctatagatgtggctattacaaacttttagaaatatacatcactggtaatctctcatttaagaggaacaaccagaaaaagttagataactcgttatgactcatgagaattttcttttgcaatcaaagtctttgacagcattcctcacagattacatttcagaaattagtgtctgaacaagccttttaaaagtacttgagtcttctgctatcagaatcacaatctttactttgggcttctatctcatttttaagaaatgatcaaactttgttattcatgtatcaaggcaatttgtgaaaatgatcagctttaaaaattctgttgtcatactttctctgttgcttaatgagatgtaaaatacacttcctccttaaaggagaagcttgaagtcttaaccctaatgtgctaagttgttttcatgaatatatttaactttttctttcctgagcttcaggcaccttcatacccaaaacaggtagcccttaacctttttgatgtggttgaaaggagaaatgtgtatttgcaaagacacattctaaatgagagactgttcaaacttttcatttcctttgccatgggattgtcccctcatgtgtccttcgctcaagaacaaatacgtctacaaccaggtcatagctaactcacatacatgtgggttaggtggagtatttcctgtgaaagaacccctgcaggtcctctccatgtcccttccctctccttcccctaatatcagctgaaaataacatctctcccttggagtagcctatagccaggcagggtgatgtgatccatgtctacttgctcaaaatttatatcatacttttttttttttttgagacggagtctcgtcctgttacgcaggctggagtgcagtggcacgatctcagctccctgcaatctccacctcccagcctcagcctcctgagtagctgggattacaggcatgcaccaccttgcccagctcatttctgtatttttagtagagatggggtttcgccattttggccaagctggtctcgaactcctgacctcaggtgatccacccaccttggcctcccaaaatgctggaattacaagtgtgagtcaccgtgccagcctatatcatgctttagacttacgtttttagaatttaaaaattctgagtgttagcaccagcagttggcttacaccaggaacctagtaagctctaatctgcagagagcaaatttgaaaggccctttaacactgaacagaagcataaccaaggttgaactcgtaagatacagttgtcaagacctgtgtgacaggtaggaatccaaacaggtgccatggaaacgggggcacaacttcaagcactggtgcatcttccacatatgtcttcaaatgtgcaaattatttttccatttaaaaaaaatacccagtttcatgggttgcctaacttcagataagaacccagttgtttcacagtaggccacctttagccatgcctgggctagattagcatctagtcaggatggaacaagtcatttgcctgaccaacaattctttcatcgtaaaatgagcaatccaatgtgatctccagggctgcagagctctgtcatgggtgcccagtggtgctgtggactctgctgtgtgatccccagcactttggggcagggagctagctggcaatcagtcccatccgtgcccaagttcacagatgctatttggcttcccacagcttcttatccaccccagggaaaagtaaaggattttaccccatccagctggattgcaggactgcagtttccctgcctgctgtcaggacccaggtctccagggcagtaacccactaactggttttgagttgacaacttttgaccctactgagtaaatatgctgtggtcatgaaaagatgaactttagtccattctggaacgtctgaccctgagacctttcggtcattttcaaaatccctcagtccaattaatatcagcttggtactggactgtttctgaggttttaaccctactgtacacacacacacacaattttttttaatgataatagctaacatttattgagggatatctgcccaagaatagttctaaatgctttgtttgtataatctcatttaattcacggcaatcatcagtgaggtaggtactgttagcctccacttttttaaataggaaaattgaggcatagagttagtagcttgcccagggtcatgtaagaagtaacagagtcaataatggacttttagagcttacacttttctccatgctgcagctgcaccatctcatacagtttgcctctgcagtcagtacctgatgccagaacaagctgcaagggagctgacgctagattaggtacacagctaaacctgaatacctttacccagagctgtaggaaatggctgtccctctgaatggcctgaatttttatctgcttccaatattgttttcctttcattaccagcttggattggatatagaagagttagaagaaattgaagaagatgctggacttggcaatggtggtcttgggagacttgctggtaagtgacattgtgagtgtattatattgtctggccgattgaagacatctcagatgccatgcatgaccatgcttgcaagaaccaggcaggcttcctagaagaagcgcaaggtatgacctggttgtagatgtatttgttcttgagtttgcactttggtttgatcaattctagacaaatagtagagatgggaacttgaacaaaagagacactgcttaaaactcagttaaccagatccttcctatgcacttaagagtatgttaaatgttaacacactaaaaaatttattatgctagcaccccctttgatcactaccccagttctgtgctcctccctatagggggtcatagggaacagtttagtatttagaattccagaccttttttctgcatattcattcacattatatacatatgtacacacaaacacacacacacatatatatatatacacacacatacacacacatgtaaatgtctggaatatatatcttccagaccttttttctacatatttacacacacacatacacatatatatattcatagaaaatatttaattttttaaaaaataaatggtatcacactgtatggctttaatacaatgtgatttcttttttagtttggagatctatccagtaaagtacgtctaggtcaaaagtagtgtctttacttcactattatttgttcaaagcttctcaattcacatccttgtgtggcatgacctaagttaagttgctgttgttttattttattttattttttcagtggtagactccaggtcagaggcatgaccccagttggtcaaccattgtcttgccttgtgcacttgactgcttgattgactagtgggcaatgatacactaatattattggtatgattttgttaataatgtcctttttgtgtgtggatacaatttgagttctttgcttttttcagggaataatttttcatcaaatatataggaaagcactaaaaatacaataccagctccattagtttagaaaatacacatctctataaccaagtaattccacttgatatctaccctaaagaagcacacacataagaagacatgtggggaaaataattgttacagtgtagtttataaaagtactacactgattgttgaagaacaaaattgacctagatgtactttcctagctagatctccaaattaaaagcgaaatcaaattgcattaaagccatacagtgtgataccatttgttttttaaaaattaaatattttctgtgaatatatatgtatgtgtctgtgtgtgtgtaaatatataggaaaaagatctggaagatatatattccagacatatatgtgtgtgtgtgtgtatatatgtgtgtgtgtacatatgtatataatgtgaatatgtagaaaaaaaggtctggaattttaaatacgaaactgttccctacgaccccctgtagggaggagtgcagaactgggatagcgatcaaaggggatgctggcataataaatttttttgtctgtaacttttaatatttttaaggaagatgcattaatgtattatttgtgaaatttaaatttaataataaaaatgtactaccacacatgtatcagattgtattctatgaaaaataattatctcctctcttttagaaattgttcaaaaatcttctgattttgcatacacccaagttactagaaagccatttgcatctgtttcatttttttcatccttagtacattagtcacagtgtgctttaacattgtcattaataatgaacaaaacaaaataaaacaatgcctgtgggatacttgccaccttcctgtgaagttaattatcagacaatttagtaggctttctatggggctgcaggaaggccagcagtgctgatgcacatctgagaataagaaccagcctgcctaccttttatgtgaagcccgagccctcagtctttgttagctaggttaactctgtgtctgacattcatgacatcgctccttgagttgactgatgaagtcagagtgaagaggctgatgaagctgagaattctcattagatgatctcatctaagttgggaccccctctaaagataatctgatcaggactcaggaaaagccgaagagccacagctcaaagagaacaggaatgggagcagagccaggccatatgtgagcacagggattggcgatgtaagaaaaacttgaaagcctaggccatttgtgtttgtggatctctgttttaagggctgtaccaccaacctcattcaatccctttctgtttgatctacagcttttaatattcttgtcagttttaattcctactgtacacttcctcattctgtgtatatttctcagcttaaattcctgggagggacaatctgattagtgtaacaccttagttttcatccagccacaagacagatccttacccagcctgttggttaactgttctggatcagatgccctgtcattaaataacagaaaacctagcaaaaatgcttcaatcaaaaaggacatgtgttatcatataacaagaactccagaggtaaggccattccaagactggtttattcagcagcaggagtatagcaggactccaggtctctggtccttttgtctttcccctcatggaaaaaagacagtggcagcaaggaaaatctttcccagaattctcctatacccaacagactttctagcaccactcatctgattgaatgtcattgtatgcccacggagaaggaaatacaattgctatgattggcttagcagattagaccaatccagcaagattcacttcctggttcagcctccctgaagcatatgatcacctaatatctgaacaacagtggaattccattagccaggaagaaacagagctggccacagaatatcttgtcagtcagttgctggaagggaatgggacacatataagttatactctcctgggactgtcttttccagtggggtgagtcttaggggaggatagagacagcttcccttagaaaaggcagtgtggggacaataatcgacattatctggtgcaggttggcttccttatctgttctcaaacaaaatgtacacaatagttatttctagatggtgaggtcatagatgagattttcttctttatacatttttgcattttctaacttttctatagtattaattttataattagaaatgagttatttttaaaaatcaatacccattgtgcagtagtatctgtgctttagaatacaaatgtggttcttcatataacaatgttttgtggctgccatgtgttttagggaaagactggaaattttggctcagcttaatgactctatcttttgcctgtgctctgttgaatgtagcctgcttcttggattccatggcaaccctgggacttgcagcctatggatacggcattcggtatgaatatgggattttcaatcagaagatccgagatggatggcaggtgtgtgagccatctttttaaattttgtcattaaggtacttctctttcatggtgctctggatgatttataatatatggacctttaacatagagctgtactaatttctctggcatttggttggtatcagtgagttctatctatccatcttcccacttcagaatgtatgttccccaagaacagagagccttccagtatcactcatcaccagatccattgcactgagggcagtggctgacgcacagggtgctctgaaaatatatatcactgactgcctgattgtggagcacctacaatgtgtgatgttccattctctgcagcagtcataatggaggagcacatctttgactcatgatctcagccaagaacccttgatgataggaagcacattgccattttgtaggtgagaacactgagtctctgaggaagtaaagttacctcagatcacactgctggccaatacatgtctgtatccccagattcccaggaccatattcagtattctattctacactcagagtcttgccttctttaatatgctatggttacaagacacaaaccaagtgtcctgatttttttataagatgaaatcagacagtgttgttaactgttatagcaaataaatctggcacacatttaatatgtataattacactgccccatagaaatttgtacaaatctatccaaatgacactacttttactttatataatcaaaccagattgttaggtacttattttttttttatctctggtaactgtttgagtctacagtcgccctagtgtggacagtttttgctaatactaagtgtgatttaggcttcctctctccctatttttgtctcatacatacaccattgacagaaatatatatcttcagtttccaaaaaacttgagctctctgagcctttcccacacttatgagatgagtccaacaagagaacgctcagggactggatgcagagacctaggctgtgccaggataaaggaagataaccctatgagaatgagtttagtgtcaccactgccctctttcccctccctcagtatttggattctttgtgaaccaaaaaagggaggaactaaaaaatttggtttgatgagagaatgtgccaaggaaaaagactcaggagaatattagggatagagtggaagacaaacttccacattttgctaaggaccagagctgtttatctttagctacccccaaataaataaaagctgagaggcagcatcttgtagaagagaagcctgggtcctaatttctcatttgagacctaatgtcaacttaggagacctgattacttttatgaggtatgctgtctcaactaggttaccaaacttccctgaacctcagttttctcaatggcaaaatggagatacaaactctacagaattattataaaaacatgtaaaatatctggcacacaataaaatgctaatattagtaagcacacaataaaatgctaattttgcctaagaaaaggaggatgctttaataaattgtgctattctataataaaatattagtgaagccattcatattatatttttaattaattttaacaaaataggaaatcattgtgttacctataagtagaggatatagagttataagggtaataaaacctcagctatccagagaaggccagaaagataaaggaaaagtgctagaaaaaaatacatcaaagcttcaacagaagttgtctctggaagatgggcaacttttactgtcttctatgtactcttctacatatctcattttctgtaagaaatatatatactatcttctatttactcttctacatgttttagattccataaataatgtgtattttgtaatcattaaaagttataaaaatgaaataggttgttcctctccccaatggagtaacctagagttccatgttgagagcctatttagcaggcatgtccaggacaaccaacactttgacacaacctaaccaaacaacacatggtatctaattttagccttggaaaaggataccatgcgctactcactatactccagaatttccaaggatctcatttcttatctcttaactattatcagatggaagatttaaaagaaactcagaaaacaaatctcaattttttttttgtctcaggtatattttccccttacgttttatgaagggtcactgttatcacacctacctttgctctttttaaatgatctttgttccaggaaactatctctttctctcctatcagaccaagaaagcatgtattccagtgttctttaaaaagaaaaataaagaaagaccaaataggttttgctcattcaaaatattgcaaagctggccaggtgcagtggctcacgcctgtaatcccagcactttgggaggccgaggtgggtggatcatttgaggtcaggagttcgagaccagcctagccaacatggtgaaacccccagtctctactaaaaatacaaaaattggccaggagatagtggcgcgtgcatgtaatcccagctacttgggggctgaggcaggagaatcacttaagcctgggagatggaggttgcaatgagctgagatagtgccactgcacaccagtctgggcaagtgagtgagaccctgtctcaaaaataaaataaaataaaataaaataagataaaagaaaataaattccaaagctaaccttatcaaccatcatcacttctttcattatgacttgaaattgaatcagaagggtatataattttacttaccacctccattgtttactgggatgggattttaaccgtcaaacataaaatatatcataccataaaaaagaaattatttccataaaaagcaaaatgcatctgtcaagaaagcagcaggccttttcagagtatagtcatgcccccactcaacacgtaacactgttcttacaaaggcagatttggagaaggctgatgaaaattccacatgctgggaagatttttaaaggttgatgggcttttaatttttgagtctcttcaaggaagatttgcaggcgtggagtgttcatcgtgcaccccctgaaattgtgttgctaaaattctatatttaccatctcctctcatggggagtgcagtaacagtcctctatgaaaatagctggcctaggaggaagtggggagaaagacaattgcaacaacctcacagaagtttcacaatcacaccaaagccctgggtggaaaggcactcacagtatgtatctcggagctggatccaagtggcttctgcaacccttctcttgcctcttagcacccacaccaagttcgtaatagccagtcatgcgtgattcacattacccagcaagcttctaattatcactgtggaattcttggtgtgccacagaaacatttatcagttattataacatcagaaagccaagttcatgggctctcctgatgactgttcactggttctttgtcgactctgtatcccacaggtgcagagaagagcatttcttagaattcagtcaacagagtcccctgggctgacctctccatccctgctggctgggacagattccattgagtcattcctctaaagaaatgcctagtccagctgccacctgcacccaggttggctcttttactccacagatccacgcttgctttcttcagccccgtgcagcctctgggatgaaacagctctgacagctcacttggatgtagatgaaagttctcccaccttggccccccacccctaccccttcatatgattggcatgttagtgcatttggggatcactggctacatggaaacctaaatttacagatcaatttgtcaattcattggaagaaagcaaggtagagagaaggtttatcaccatcttgcagcttctgtagatttagtggaggcagcaagggatagttctctcctcctcagatctactcaggtcaacttgttatgaaacgcttgtttctcaatctaccttaaaaacaagccttataaaattgatagaattattcaccaattctttattgaatcagcgggagattcacaataaagaacagcaagcaaataaactctcctacgagttgttagccccatgaagctaaaaccaatcatttacttggcaggaaaaaaattcaaccaacatttgatggcattaagaatctcatgtaagagtgtaccctcaaaagagcaaatgtggcttatcgtggtggctcacgcctgtaatcccagcactttaggaggccgaggcaggcagatcacttgaggtcaggagttcaagatcagcctggtcaacatggtgaaaccccgtctctactaaaaatacaaaaattagttgtgtgtggtggcgggcacctgtaatcccaggtacttgggaggctgaggcaggagaatcacttgaatctgggaggcatatgttgcagtgagccaagattgtgccactggactccagcctgggcgacagagcaaaactgtgtctcaaagaaaatgaaaataaaaataaaaagagtaaatgcaacctctgacttccacaggagtcagggactgagcccacaggaggaagttcagtgcccatcctctcttatctgagcatttcaggcttcttgggggcaggacagtatatcatcctgctgcatttctcagcaaaaaaatatgtcatcagttctcccatggtcatgagttttcagaggaaaactgtttctgcctcatcgtcttcctatttcatacaataccttcagatgggttttacaacagccctgcatgctgaaatgaggcaaacaggcctatggttctttcctgttacaggaagcagtgttcacattgctcagtattttaaaacccaaaattggcccttgcctaagtgcagcataaagtattttgtaagtcaagatgttttgatcctttgttgatgtcatcattttatttattatagcatttctagttatgaacccaagttaatggactttttcttttttttttttttttttttttttttttgagacagagtctcactctgtctcccaggctggagtgcagtggcacaatctctgctctctgcaacctctgcctcccaggttcaagtgattcttttgcctcagcctcctgagtagctgggattacaggtgcccgccaccatgcccggctaattttcatatttttagtagagacggggtttcaccatgttggccaggctggtctcaaactcctgacctcatgatcagcccacctcggcctcccaaagtgctgggattacaggcgttgccaccacgcctggccaagttaatggactctttaacaagcttcttgacaactggcaaacttcaactgtttctttattaaaattttattttattttattttactttattttttgagatggagtctcactctgtcacccagggtggagtacagtggcatgatcacagctcactgtagccctgacctcccgggctcaagcaatcctcccacctcagcttcctgagtagctgggactacaggtgcacaccaccacactcggctaatttttaaattttttttagagataggttctcactatgttgcccaggctgctctcaaactcctgggatcaagtgaccttcctgcctcaaaaaaattttatctttgttctcttatgactgggatagcggaagtttagtttttaattctgaattacagattacagttattgactttgcattgccttgtagctcttggctgctctttgtggggttcagggaccagtagaatcaggagcccctgggagcttattaggaatgcagaatttcaggcccctccccagacctactgagaatctgcattttaagaagatgtgactttctgacgagctcagatctctctccagccttccctagggttcatcttgcatctgatacctcctccttcctccagtggctctctaactcctagctcttccaactaaagatgttgttgctatgagtcccatttccattcatcattacactggtagttaatattagtgggaagcttactggctttcttgataaacaacactatcaaaatttgaataagtgaacttgtattcatttctctggctgttgacaataatggttagtctaaattctcaaaagatagtggctgtgtttatttttgtctcttcacactgttcctgagacaggcattacactcatgtttaggtgatcatgagatgtccaacattgtgttgtaattcttaagcagtatcttctaaaactaaagctgagttttctaagaggtgaatatgaggtatcaaataggtaaaataaccatattggagattatctcattgacaaagctgctttgtttacccccttctggccagaacacaattccattttttaatgtatagtcatgcaccacataatgacatttcagtcaacaatacaacacatatgcaatagtggtcccataagatggtaatggagctgccccctgtgggtgtaccatttcttatgttttatactgaatttttactgtactatttctatgtttagatatacaaacaccatcgtgttaccattacctatagtattcagcacagtaacgtgctgtacaggtttgtagtctaggagcaggaggccataccatatagctcaggtgtgtagtaggcagcaccatctgggtttgtgtaagtgcactctgtgatgtttgcacaatgacaacgttgcttaagaacacatttttcagaatgtatccctgtcgttaagcaatccacaactgtatgtgtcatattttaaaggtttcaataatttaaaaatacatccccctccaatgtgtttggtggtggtggtgttcttattttgatgtgtttgtttgtttgttgcaaatgaaaatgtatttgatgtccaggatatcctaaatagaaaccatagtttaaaatcgtatataagaaatattttgttataaattgacataaatacctaggaaaatattgaaattgtcaataaaataagttcattacctcttggaatatgttattttcaaaataaactataatctatagttcattatcaaatcaaaattacataaggattgagataagcaaagactacataatgcaataatgttctgtacctataccaataagcttgattaaaagagtgttctgtaagtagcattttctaactgattctgtatattctagccacaagaatcttgactgaaccctttgtgtaggactcaacaggcccaggtatccaacgataaacatccctgtaaggcgtctgtctttagctgaagctggacaattggattcacagacgttaagacagaggctctggaacacagagacctaagggcagatcttatctctatcgtttactgtttgaccttgagatcttatctctaccgtttactatttgaccttgagcagttacaattcctcatctttaaaagaggattaaatgcagtaatacatataaaatatttagagctgtattagcgagtattattgttgatgtaggctgtaaaaaagttacaaaacagtactcagtattcataagttgtttcagttaaagatgttttaaatttaatataatataattgaagtgctaggttcatatttcctgacaaataaattctaagcaatactgtatccttttgcaggtagaagaagcagatgattggctcagatatggaaacccttgggagaagtcccgcccagaattcatgctgcctgtgcacttctatggaaaagtagaacacaccaacaccgggaccaagtggattgacactcaagtattcagagtgctcgtatagccagcgttttgtatagtatttagtacagtagataatacattgactatgtagcatatagtggtgatattgagtatagggcatgtcgtgttttgaataatagaatatatttttgtaaataaatctgttacttctcttagcgcagcccagtcattttggagacaaaggagctgaggccaagagaggagtgacttttataagggtcattttgcaaccagctttgtcagaaaattgtcagttcttttttttttttttttttttttgccagaaaattgtcagttctatagtaaccagcatgcttacctctttggttttatattaaggtgttgatagcaaaattgaataatttgaaatgtcattcctggctgggtgcagtggctcacaactgtaatcccagcactttgggaagccgaagcgggcagatcacctgaggtcaggagttcaagaccagcctggccaacatggtgaatccctatctgtactaaaaatacgaaaattagccaggagtggtggcccatgcctatagtcccagctacatgggaggctgaggcaggagaatcgcttgaacctaggaggtggaggttgcagtgagctgagatcatgtcgctgcactccagcctgggtaacagagtgagactctgtctcaaaaaaaataaaataaaataaaataaaaataaaagtttgcagtttacacaatcaatcctggaagcattttatttacactgtgggtcccactgctgagctaacttgcatttacaaaacacctctagatactgtcataatgtatccagaaattcaattagagagagtgtgtgtttctgggccaacagaggcaaggttagggggcagaggtaatataagtgagctggcccaagccatgcaacttagcctcatagattgaagtcatcacatgaattaaccccaaactggtacccagtgatgtcagagcatgagtccagatgtgctctgtgcgtgcatgggatggcttccaataaagtcaaatgacacagtcacgtgtcagtttaggtcctctaggaaacagacaccagagagaatgagaagtgcaagtgacatattgggggatgcctatgaaagacaaaggggagagggagcaggatgaggtgggaaggcttcagactgtgacacaggtgtgccacctgtgaaaagtgaaggggaaagaagcagcattctcagggagagcctcagaccacagtgccactctgagcaagtggccaggctgatggagcctgacactaaagattgcccattagagaagtctcggccctagtgtcccagccacatggagtgtcccagagagcgcagctttggtgtgagctctgagggagcaagtcctctttgaggttctctgaaagaagatctaagctgtgcacttcttgggctgccttaattatgcttcaagggtcagaagggtccaactcttgtttgaaccgagactcaatcccagcctgcaaatgactttccctgattgattacaacttgctttaaaagtccagagacttttatctcttaatgaaagatatttaaatgagggtgatttattactttgaggtcgcggtgatcacgaaagtatgactgagtatatgtgattgatatgggccataatgcttcattcattcacaattcagcagaccaaattaaagagatgcgtgtttaagtttcaatcctgccatgactgtgatcttgggcaagtcacttctctctcagcttcagctccctcatgtccaaaataagtgggttgcactaaatgagatccagcatcctccagttcaattattctgtcattctccttccttcgagcttgactctgatgaggccgggaataaaaatgaatgatttctcacttgaattttcgatgcactgtgaaacatagttaatcttcctcttctctatttcagtgactgtcacaaagatcaagctagattttccaaagcttacctcttagactcaactcagctaattatcagctgatttggcagatcactgtaggaatcactaaaataactccttatgcaactttaaaaatctagcatagcattttaaatattatatgagatgttatagcttcataaatttcctattccatttactttcatcatacttgaaatcagatcactgaaaaacctatgcaaaacatattctaagtgctattttttggtgggtacagattcacaatgtcactttgtttgcatatcatattttattattattagagcaatggctttatctgaaacatgaaagataaacttttttggctgggtgcagtggctcacgcctgtaatcccagcactttgggaggccgaggtggatggatcacgaggtcaggagatcgaaaccatcctggctaacacggtgaaacctcgtctctactaaaaatacaaaaaaattagccgggcatggtggcgggcacctgtagtcccagctactcgggaggctgaggcaggagaatggtgtgaacttgcagtgagccgagattgcaccactgcactccagcctgggcaacagagtgagactccgtctcaaaaaaaaaaaaagataaacttttttgaatacaaataccatatcattccattccactgcatttatatcagggcaagggcacatggagagtcaacatagaaatactgtaaaggaccatcagtgtggatggtttcagtcactagattgtaccaggtcggggaggaaccacatgttcctctaataccctctgcagccctgagaccctcttctccatttaggcctcacacaatttaagttggtaatggagccaggaatagaattccattgcagtctcccagccccttgttcaacctatgtcatcacacttgggaaacaatgagcagctgcttctgtttaatcccacaggtggtcctggctctgccatatgacacccccgtgcccggctacatgaataacactgtcaacaccatgcgcctctggtctgctcgggcaccaaatgactttaacctcagagactgtgagtacagcacaggccttggtttctttatgcgtgtgcttaatctttttgattggtagttagaaccaaattgagcttgaaacaaacaaaaaagccttgagtttctgatctgaacttcactgactaagcaggcattgtatggaggaagtagggagggcatttttaaagcaattctcatgtgaagtccagcatgacggtgtgttgaaatcctttgggatttttaggaattttaggaatcccacatgacacacagcacagagccagtgagatcaagaggtttccaacaacaatggctggtttctctatttattgtttctctaactttcccctagttaatgttggagactacattcaggctgtgctggaccgaaacctggccgagaacatctcccgggtcctctatcccaatgacaatgtgagtgatcaaggttgctttcttagtggcaacagaggcagcttatttcacaagagcctgttcagtaacctataaaacacatttaatattgatgtttttccatgtgcagaacaagctccgtatttcttcctgaattgtgtagatttctcctcccaaccaagtaaggaaaacaaatctgtatagtgcatgaaatcagaattggtattttgcccttgattagtgaccccatcactaattgggaagttattgagatgtattttaaaacaaaacctggatataagagatgaagtaaatcactggtgaagcactgcctcctttccagatagaaattttatctgcaaagtcagaagtcactgaatattttctgcctcgcctcttctctcactgactaggctctttctggtcctctgccctgatgctagatggagttagagaccctggggcagacccatgaacaaacatctgtttcttctgccactgacttgtatctttttcttatagtcaattattctaattttattgtaaatatagcttagttaaaaaaaaaaaacacttggggccaggtgcaatggctcatgcctgtaatcccagcactttgggagtctgaggcgggcaaatcatttgaggccagaagttcgagaccagcctggccaacatgacgaaaccctgtccctactaaaaatacaaaaaaattagccaggtgtgatggtaggcgcctgtaatcccagctactggagaggctgaggcaggaaaatcgcttgagcctgggagacagagattgcagtgagccgagattgcaccactgcattccagcctaggtgacagagtgagactctctcaaaacacacacacacacacacacacacacacacaccacttggaactggatctcagataactgctattgattcttggttgttttaaatatatgtaactctaaacttctctatgggtaaaatcattttcatgaagctgtaatgatttttttaaagtggtctcagaagcaataaaattagcactctgctttacaaagatggcagaagacaaggatcttggggggactaggacataaatagtccttaataccagatgtccacctggtgttaaatcataatctctcagaaaggaagatgattatgtggattttgctggagcatttttaggaacctaatggtatatgctattattcctttgtggaaaacattgtggcttcagtacatttcagagaaatctctaacccaaaagcaaaaagttattctatgtcagggtcaaagtaagagttcttccaagtctgggaccgtactgccaacctaaacccagtctgcaggggcttgaaattcatcctcctgtcttcagtaaggaccaaaactaattttactgggaaataatcgtctgcagtaactgacaatatatactaagttagcatggggtaaaaaattgactagatttgttgggtaaaagggagttctcaggatcatgtttttgtttgtttgtttgtttgtttgtttttaagagtaagctgaaaaatccttttatactgtaattacaataacaaattcattcttctcctcaacttggccatagccctggcataggtcagtgattatacttttaagtattagggagttcagagccccagatattctatatgcagacctctatgctcatattcattagttttaataagactctggtccaaggcttacatttgggggatggggtgctcatcattttaaaatttttaattttaatagttttaggggtacaggtagttttggttacatggataagttctttagtggtaatttctgagattttacgcacctgtcacctgagcagtgtacacccaataaattgtcttttatccctcaagtccccaaagtccgttacatcattctcatgcctttgcatcctcatagcttagctcccacttacaagtgagaacacacgatattcggttttccattcctgagttacttcacttagaataatagcttccagcttcatccaagttgctgcaaaagacattattttgttcctttttatgtctgagtagtattccatggtatatatataccacatattgttgttggttgatgggcgcctagactgattccacatctttgtaattgcgaattgtgctgctataaacgtgtgtgtgtacatgtgtctttttcacataatgacttcttttcctttggctagatatccagtagtgggattgctggatcaaatggtagttctacttttagttctttaaggaatctccatgctgtttaacatagtagctgtactaatttatattcccaccagcagtgtaaaaagtgttcccttttcaccacatccatgccaacacctattgttttttgactttttaattatggccattcttgcaggagtaaggtggtatctcattgtgattttaatttgcatctccctgacaattagtgatattgagcattttttcatgtgtttgttggctgttcatatatcttcttttgagaattgtctattcatgtcctttgccactttttcatgggatttttttttcttgctgatttgtttgagttccttgtagattctggatattagtcaaggctcacatttttaatagaagttacagtttttaattctacgaccaggtaaagacagggcagctccatgatctataaaaatcgaagtgtgatggctcagggttaggaccatttcttggtgacatttacacggttgaggtgaccgacagcaaatctatgtgggaggaacttggaagctggccaccatcatggcctctaaggcctccaccctgcacaccatggcctggctgcaatcctgtctcgcagtcatgtagggcattctcagctagttgtggttctccacacggtccatggctgccagtgcttcctgatacgttgcctgccagcaggagggcggtcatgtgctggttgtgctcagctgcaggaactggggataaggttggaggccaagtgtcctcaggctgtcattaaccttttccttcacttcttccctgcttcccagtacttggtactaccaattcctgagccttggggagctccaatgtacacactgagttgctttttggcttttccccactaccaggtcaggatttggctgtcttggatcttctgaatcacttaccactcatgcatctgtttttcagcctctaaaaggttgttgctattgtctttatcccaacctctttatcttttatctgtatgcctttagagaatcctttcactgccattttcatggggtctcaggaaagagcaaaggctcacagtttggcattcaaaccaccacccctcagcagatgtccaatgggccttagtcttaaagttcctagtgcaggagacaccagtcacattttggccacacctacaatatgaaccatttttattctatctctctggcttgaagttttttgaagggaaggagctaagattgaagcaggaatactttgtggtggctgcaaccttgcaagatatcatccgccgtttcaaagcctccaagtttggctccacccgtggtgcaggaactgtgtttgatgccttcccggatcaggcaagtatttagtctgtggatgcagttagggtccactgagggattgactgggatttcctatcagattaattcctctctctcagtgctaacaacgttgagcaggaatagtgtgcatcaagtctttcatagaaggtgggcatatcagtgctttctccagatgtgttaggacaaagaagccagaccctgagccatccgttgccttcatgttgatgtctttccccacccaggtggccatccagctgaatgacactcaccctgcactcgcgatccctgagctgatgaggatttttgtggatattgaaaaactgccctggtccaaggtctggatagtttggcttctttttcctttaattaaccagaatggctgcagttgaaagactgccaaaaactccctttttagtttttcaaagtaagttattgttgctaactttcaacagttaaaggtatattttccctgacgctgacattttccatccttagagttttatagggagtaagactataaaataaatgagcacattcctaatgggacacaaatcaatagctatattaaggcttatattgtgtttaccatttttgtgttgaaaaagattaaaaattaaattatctaacctcagaagacagctaattgagtgtccccatagctttagaagtcagcattttacatactttgtacttgctgagagcactatttacgtttttatccctcaatctgtgtatttaataagtgaaagacacataaggatagtagatagattgatcagaatgctgtcttaagtttcaccagtagctttacaaatggcttccccctcacacccagaacatgtttctattatctggactattcaggaacttagtggaattgagtgctctgactatgcacacttggaatggtcctgttgcagacagggcagggttgaagaagggtttggcccgtgcagtggggtgcccaccttcagggcaagcagctgactccttcctttcccccaggcatgggagctcacccagaagaccttcgcctacaccaaccacacagtgctcccggaagccctggagcgctggcccgtggacctggtggagaagctgctccctcgacatttggaaatcatttatgagataaatcagaagcatttagatgtaagtcattttgagagattttctctgttcatgagcataagatcttaaggtgttacagatggctacagtgttccctcttaccaaacatctttcaatcattgatacagcaaaagtactcaagtccgaacggggctccaacaaaggcagctttttgaaagtgctgaaatggagggatggcacctccatagagctaactcaacccctccctgtggtagtgaagtttatattgagtacaccaaagattttgcttaagacatgaacagcgttatcccaatgttgcattaaacctgagtgaccagcaagggctttctcttcctttggctagagaattgtggccttgtttcctaaagatgtggaccgtctgagaaggatgtctctgatagaagaggaaggaagcaaaaggatcaacatggcccatctctgcattgtcggttcccatgctgtgaatggcgtggctaaaatccactcagacatcgtgaagactaaagtgtgagcctccattactctggcagtgggtctgacactgatccattaatggaatgatgctactaaatgcagggttgcacttagggatgaggaaaggccttgttcaaatgtttaaaagtattttcttctatacaaaaaactcttgcctaaaaaaaaaaaagaaaagaaaaggaaagaaaagaatgctttcctctcagagccatcttaattctagacataggagccaaaacaaacaaacaaacaaaataccaaaaactattctactgaaagtgtagtatatatgtcagtgtgaagaagtcagatggaagtgactagatttggaatttttctggtaattcttttgagttgcaaatgaatttctatttaaatgacagccatagctactgtcagcctgtccctccacctttatttaacctttctaagcctgcacttggcttcttgaatataactccgaactttgtccagtgtgcaggaccctttgccgtttcagccaaattcagtgatgtgtctcctccatctccagattcaaggacttcagtgagctagaacctgacaagtttcagaataaaaccaatgggatcactccaaggcgctggctcctactctgcaacccaggacttgcagagctcatagcagaggtaactgggaagtgctgagaggaaaggaggcctgactcgaatgcaagaggcatatgactatacttgtaacttataaatccagtctgcagcagggctggcttcctcagcatgtggtttgtgcagtcacacaggactccatgctgggtttaattctctgctgtagtcatcttgaaattatttattattattattattattattattgagacagagtttcactctatcacccaggctggagtacagtggtgcaatctctgctgactgcaacctccacctcctgggttcaagcaattctcctgcctcagcctcccgagtagcagggattacaggcacacatcacaatgcccagctaatttttgtatttttagtagagacagggttttaccatgttggccaggctgatcttgaactcctgacctcaggttatctgctcctccttggcctcccaaagtgctgggaatacaggcatgagccatcacacatagccgtcatcttgaaattcttaatttttgaacaaaaggtcctgcaaattatgtagctagttgcagctaacagtattcataggacactcacatagaagatggttttctctagtaaaagaggataataaagctcatataaataactaacagaacctgggttcctggtcactcttataagtagatttcctgtttttaacactttaataccagtgaagctggccgggtgtgatggctcatgcatgtaatccagtgctttgagaagcctaggcaggagactcacttgaggccaggagtttgaaactagcctgggcaacatgagacccacccccaccaccaccacccgtctctacaaaaataaaaagattagccaggtgttgtggcatgcacctgtaatcctagctactcagaggctgaggcaagaggattgcttgagcccaggaggtcaaggctgcagtgagctatgatcacgacattgctttacagcctgggtgacagggtgagatcctgtcgccaaaaaaattaaataaaaataaaaataatttttaggccgggtgcagtggctcacacgtgtaatcccagcactttgggaggccgaggagggcagatcacaaggtcaggagatcgagaccattctggctaacacagtgaaaccccgtctctactaaaaatacaaaaaaaaattagccaggcgtggtggcaggcgcctgtagccccagctactggggaggctgaggcaggagaatggcatgaacccaggaggcggagcttgcagtgagccgagatcgtgccactgtactccagcctgggcgacagagcgagactccatctcaaaaaaaatgaataaataaataaaaataaataaataaaaataatttttaaaaactgctgaaactacatttaagatactagcaaaagtgttcttctcacatagactttatagactcttctttgagtcaaactatcccatgttctgtgtgatacgtgaactacactgtggtaggtgacagagagaaatactgacagaaactgcccatttggacttgattaccatccccaaattgaagtcatcttttcctttgaattgaaagaaaattggagaagactatgtgaaagacctgagccagctgacgaagctccacagcttcctgggtgatgatgtcttcctccgggaactcgccaaggtgaagcaggtgagccttccaggtgtgggtcccctcctgggcactcactgtgagagtttatcctgtagtttttgtttattttttgagacagagtctcgctctgttgcccaggctggagtgcagtggcacgatctcggctcactgcaacctccgcctcccaggttcaagcgattatcccgcctcagcctcccaagcagctgggatgacaggcgcccgccaccacgcccggctaatttttgtatttttagtagagacagggttacactatgttggctaggctggtctcgaactcctgacctcaagtgatccacccgcctcggcctctcaaagtgctgagattacagccatgagccaccacacccggcctatcctgtagtttttaaaaacagaccacccagccgggcgcggtggctcatccctgtaatcctagcacttgggcagccaaggagggtgaatcacctgaggtcaggcattcaagaccactctggccaacatgatgaaaccccgtctctactaaaaatacaaaaattagccaggcagtagtggtgtatacctgtaatccctgataggataatcgcttgaatgtgggaggtggaggctgcggtgatctgagatcatgccactgcactccagcctgggcaaaagagtgagactccgtctcaaaaaaaagaaaaaccagaccacccaattcttctaggccaaaagagctctggcaccatgcactgtcttaacaggagaataagctgaagttttctcagttcctggagacggagtacaaagtgaagatcaacccatcctccatgtttgatgtccaggtgaagaggatacatgagtacaagcgacagctcttgaactgtctgcatgtgatcacgatgtacaaccgtgagtcagccctgtagccaacaagcccccttgcaggtggaagcagcagactcagcataggtctcactgccctgaccgtcagctgtcttccatttcatccacttctccatctttttcaggcattaagaaagaccctaagaagttattcgtgccaaggacagttatcattggtggtaaagtaagttgaatctattcaatggggacttgagggctctaatctcttgccattcttctacttcatcatggctgccttctgtcaatgcgtttgaccttcttccccaaaggctgccccaggatatcacatggccaaaatgatcataaagctgatcacttcagtggcagatgtggtgaacaatgaccctatggttg

SEQ ID NO: 617 - DNA, 25228 bp, Homo sapiens
  source 1..25228: mol_type = other DNA
tcctggcggctgcgaggtttcactgcaggggcgccagtgggctcagtgacgctgcggcctccttctgcctaggtcccaacgcttcggggcaggggtgcggtcttgcaataggaagccgagcgtcttgcaagcttcccgtcgggcaccagctactcggccccgcaccctacctggtgcattccctagacacctccggggtccctacctggagatccccggagccccccttcctgcgccagccatgcctttaaaccgcactttgtccatgtcctcactgccaggactggaggactgggaggatgaattcgacctggagaacgcagtgctcttcgaagtggcctgggaggtggctaacaagggtgagcacgccaggcgtcggggcccttgacgagaaggacagtagtggatgggggcccggaactctgagttgtaggaggacggggctactaggggaacccttgtgacctgggcaaggaggctgtgtccttgaggaggggctgggaagccggaggtgggtgggagagggatggttcgtttgacttaagatgaaaggaggctggaagcccgggttctgggtcctagggaagagggcgctaaaatgagactcctaggtcctggaggcaggcttccgagagactagatacctgggtcctgaacagggaaggggatggggggatgggatttctgcgtgcaaacctgggaagctgccggggtttcagacctatgaccctaacagcatggtctaggggataaaactccagatttgagagagagctgactgggagataggaggcctgagcggcggtgggaggacctgaggatctggctgcttaagaataaagatgggacgggctggagactgtaatgaatgcctgggctttgaaggagctgagggcctgagctattagttcctaggagtagaggagcccatggcctgggacacatgcgtactggaataggggaaggctgggaagtcctaagttagtcagaggctgggccctaggatgggaggggctaggagcctgcatttctgtgtcttgggcttcagaaagctgaggttctggccttggagaaggctggggctgaaatccccaggaacaagccaatctcacacctcaaagagcagggtctggggggttgctttgctgggtcttggaggagaaagggactgtgtctcccaggaggagagggggcccgtgaacacccagccgggtatcgccagggcctgggctccaggatgggaggaggctgggggctggggctcctgggtctgggatagggtcatgggagaggcagagccctgcatgctggtgtccctagtcagggagaggaaattgggaggcaggtcagcaaggtccctgggggcagggaatgaccatgcaggcttctcttgggcaatggtgagaagctggattggccatgagggggtctccctcactgggttttggagcctggctgcgatttaaacccagctcctgtgagctgggaactcgggaacctgagtccgggtagtcagtcctcagctctgccatccttagagccccagtgcctaattccttcagaccaaggggtcccggcacccagccccttctctctcagacccagaagtctagcctgagccccctcctccttcagggtcctgaccccagcccccttctcccttagacccaggaggactgccctccagccctcgtgttcccctcatccaagcttccaacccctactccaaactatgggctcccagtcccctcttccccctgagctagaggtctggggcctgagtgccccctacatccccggcccaccccaccccaggccccagaactatggacctcggccggggcctgccctcacacgcttgggcccacagtgggtggcatctacacggtgctgcagacgaaggcgaaggtgacaggggacgaatggggcgacaactacttcctggtggggccgtacacggagcagggcgtgaggacccaggtggaactgctggaggcccccaccccggccctgaagaggacactggattccatgaacagcaagggctgcaaggtgggacgtggcccagcccagggcagaagcgggtggacagcctgccatcggggtgggagccacagacggagagggtgcagggtggacagccccagccagagagcgaggcaggcttggacacaggaaggaggcgtgataggacacccagacagatgcagggcctggaagtgggtgggtggatcccagacatgggcgaatggacagacagatggcaagtatgagacagactgagacggagatccaagaggccaaggtcctcagacccagagagaaagagagcaagatcgaaagacagcctggtcaacatggcgaaaccccgtctctaccaaaaatacaaaaattagctgggtgtggtggcgggtgcctgtaatcccagctactcgggaggctgaggcaggagaatcgcttgaacccgggaggcggaggttgcagtgagctgcgattgggccactgcactccagcctgggcgacggagcgagactctgtctcagaaaagaatgccagccagccaggcagagctggggagaagtgggcctgaggtcaggaaggagcaggattctggagcttgaagttcaagttcaccctccacttgctgcctgtgtgtccttggctaatggacatgctaatagcgtctaccttctagcggtgctgggaggaggaaacagttaataaggacaaagtggttagtagagttcttggcatgaaggtagcacattgtgtgggcggtgattgtcattgttatgatcatcgtcattattgttactaacagccaagcttggagagtgagggggacaggcagaccaagggagaagggtggatggagccacaggcaagagtaatagactggggacagaagagaggccaccagatgtttcagaaagccagtcctagaaggagagagaagcatggaatatcggggaagagaggagaggtcagtggacagacccacaggacagagtctgagatgggcagatcagggattagagaggagggggagttccagggccccagggtgaagacggaaagagacacgctgttgtccaaggagaaagccatcaggcggcacgctgttgtccaaggagaaagccatcaggcggcagggctaagggacagacaggtccaggctggggatggagaggcactgtggttcctttactcattcacagcctctggtttggggtggggtctggaatccattcaggtccgactgtgtccctaagggaacccagaacagcccagtcgcttcctgagggcagctgcttcccacgtgctgggggcctaagaatagcccccccccccccccagcaaaagggcagacaacagctgggagggggagggacctcagagcgaggctccaggcagcaaaaagccaggtcggcgaggagcggggctgcttctccactgctgtggcagcaggcccagaaccaaagccatggtctcagggaggaaaacagccaactggagaaatgtggcagaggcagaagtgagacagcaagtcttagaaacacggcagtggctagaaaaatgcagccctggggcacggacagaggatgggctatgttagaaatgtgtggcgtggccgagggcggtggctcatgcctggaatcccagcactttgggaggccgaggtgagaggatagcttgagcccaggagttcctgacccacctgggcaacatggcgaaactctgtctctactaaaaatacaaaaaattagccaggcatgatggtgcgtgctcgtgatcccagttactcaggaggctgaggtgggaggatgggatgtggaggctgtagtgagccataattttttttttttttttttcagatagaatctcactctgtcgctgagtctggagtgcagtggtacaatctcgactcactgcaacctccgcctcccgcgttcaagcaattctcctgcctcggcctcccaagtagctgggacctcaggcacatgctgccacgcccggctaattttttgtattttagtagagacagggtttcaccatgttgcccaggctggtctcaaactcctgagctcaggcaatccgcccgcctcggccccccaaagagctaggattacaggcgtgagccaccgcgcccagcccagtgagccatgattgcaccactgcactccagcctgggtgaccggagtgagaccctgtcaaaaacaaaaacaaacaaaaaaaaatggaagaaagaaagaaaaaggagagagggagggaaggagggagagagggaaggaaggaaggaaggaagcaaggaaggaaggaaggaggctgtggactacaaaatgggcctatggatagaggaaagaggtcgcaggtgacagatatgtgatgaaaggaacagaaacaaggcatcatggggaagaaaagtggcagcatgaacagtaagagaatcattacaggctgggtgcagtagctcacgcctgtaatcccagcactttggtaggctgaggccaggagtttgagaccagcctgggcaacatggtgaaaccctgtccttacaaaaaagttaaaaattagccgggatgtgataccttgtgcctgtggtcccagctacgtgggaagctgcggtggaaggattgcttgagcctgggagatcgaagcttcagtgaaccgtaattgcaccactcccttccaggctggaggacagagcaagaccccgtctctgaaaataaaaaagggcctgctttaggtggctcacacttctaatctcaacactttgggaggctaagcaagaaaactgcttgaacgcaggagttcacgatcagcctgggcaacatagtgagaccccatctccacaaaaaattaaaaaatcagcctggcatggtggcccacgcctgtaggaggtgaggtgggaggattgactgagccagggaggttgaggctatagtgaaccatgttcacaccactgcactccagcctgggcaacagagcgagaccctgtctgaaaacaaaaaagaagcatcccgtggaaggaattagcatcagaaagaaaagacagtgggagatgcagatggttggtaagagaaatgtggcagcaagtacagaaacaaggcagcaggtaggggaaatgatttgcagagtggccagacagggcagtgggggcatagacacaggacatgtgacatatgtggttataagcagagaaaggaggcagcgagtgggagaagggtagcagttacaggaattaaacaggaggctgggtgcggtggctcacgcctgtaatcccagcactttgggacgccgaggcgggcggatcacaaggtcgggaaatggagatcatcctggctaacacagtgaaacctcgtctctactgaaaatacaaaaaaaagtagccgggcgtggtggcgggccgctgtagtcccagctactcgggaggctgaggcaggagaatggtgtgaacccaggaggcagaggttgcagtgagccgagatcatgccacggcactccagcctgggcaacagagccagactccgtctcaagaaaaaaaaaaaattagccaggtgtgggagcgggtgcctgtaatcccagctacttgggaggctgaggcaggagaattgcttgaacccgggagacagaggttgcagtgagctgagatcgcaccactgcactccagcctgggccacagagtgagactccatctcaaaaaaaagaaagaaagaaagtaagcagggggcacggaaaatattgcaacagagatggaaaaaatgtgtagcaggaataaatcatgcaaatagagaagtaaggctaaggcagcaggtgagaaattagcagcagatatggaaacagaagataagagagctgaggcttaagtctatagacatctgcctgcaaatgggagaaccacggatgagtgaagatatgaggctgaagcccagagcctccctatggtgcctccccaaccccatcccaggtgtatttcgggcgctggctgatcgagggaggccctctggtggtgctcctggacgtgggtgcctcagcttgggccctggagcgctggaagggagagctctgggatacctgcaacatcggagtgccgtggtacgaccgcgaggccaacgacgctgtcctctttggctttctgaccacctggttcctgggtgaggtaggccccgtctgacacattccacccatacctgaaactacaatgaccatcagcccctgggccagaggatgggcttctccctgggcattctgggagtcatagggtcctttaatccaaggattagctctggcctttgaggacatgaacatccaagggcccaggctctactctcgatgccaacttcatttactctagtcttccaagcatagggattcttggaatcagcctcaaagtgaggctggcgggcttgcccgaggaattctaggagttgtagttctctagtgtgatattgctggactcagctctcagatgctgccctggatgctcatgaatccccagcctgacctggttttgacccccttctaggttttaagaggctcaagaagcttagtttccaggctgggcacggtggctcatgcctgtaatcccagcactttgggaggccgatgggggaagatcacgtgaggccaggagttcaagatggccaaacctcgtctttactaaacatacaaaaaaattagctgggtgtggtggtgggcacctgtaatcccaaatcccagctacttgggaggctgagacaggagaattgcttgaacctgggaggcgggaattgcagtgagctgagattgcatcacggcactccagcctgggccacagagtgagacactgtctcaaaaaaaaaaagaaaaagaaaaaaaaaaaaagaagcttaatttctcatgccctgggacaaataattgaggaactggctgctcctatggcattctgggagttgtagtccctttgccaatgttgggtgcagacagcgtacccttgagacaaggggtctttggaaactatgtccaggacctgggaacatgaaaacttcagtctgtccaatctaaccctgccaggacttagatggttggccaaaaaatcctcagttcctgtcaacccctgaggaggcagtcacttgagcccaggagttcaagaccagcctgggctgcctcagggatttacaggtccctgtccggttgggattgctgcagtgggccgctgcccactctgtgcagtagtggtgacagattgacctctccccgagtccttgtccctactggggattgccgattcttttcccaacactcgtggagacagtggccctgtccctgttgcccacagttcctggcacagagtgaggagaagccacatgtggttgctcacttccatgagtggttggcaggcgttggactctgcctgtgtcgtgcccggcgactgcctgtagcaaccatcttcaccacccatgccacgctgctggggcgctacctgtgtgccggtgccgtggacttctacaacaacctggagaacgtgagctgggaccgtggcagatgggggactgcgagtatgccaggaaaacccaaagctctggggggcccaaggggatggcaccccctcttctcccaggatccaggagtccaagtccccagacccctcctacctcagacccaggaatccagcccccagcaccaatttctcttgggaccccagtgtctggacctccagagtcttctccccaatccttctaaccggactgctgtcccctcccacccagttcaacgtggacaaggaagcaggggagaggcagatctaccaccgatactgcatggaaagggcggcagcccactgcgctcacgtcttcactactgtgtcccagatcaccgccatcgaggcacagcacttgctcaagaggaaaccaggtaggggctgggctgaagtccccagacgtgaatgaggtaggcagctgtctatgccaaagccagttgctcctcagcccaagaagcccactgtaagttgaaatagcataaaccgaaaacgtatttcggctgggcatggtggctcacacctgtaatctcagcactttgagaggccaaggcaggagaaccacttgagcccgggaatttgagaccagcctgggcaacatggcgaatccctgtctaaaatattcgccagacatggtgtgtgcctgtatccctagctactcaggaggctgaggtgggaggattgctcgagcctaggaggtcaagggtgcagtgagctgtgatcgtgccattgcatgatttgggtggcctggagagaccctgtcacagcctgggtgacacagtgagaccctgtctcaaaaaataaaaaaatgcatttaatacacctaacctactgaacatcatagcttaggctagtataccttaaatgtgcccagaacactttatgttagcctacgactgggcaaaatcatccaatacaaatctgttttattttatttttatttatttatttatttttgagacggagtctcgctctgtcgcccaggctggagtgcagtggcgctatcttggctcactgtaagctccgcctcccaggttcatgccattctcctgcctcagcctcccaagtagctgggactatacgcgcctgccaccacgcctggctaattttaatacaaacctattttataataaagtgttgaataggctgggcgcagtggctcacacctgtaatcccaacactttgggaggccaaggcgggcagatcacgaggtcaggagatcgagaccagcctggccaacatggcgaaactccatctctactaaaaatacaaaaattagccgggcgtggtggtgggtgcctgtaatcccagctactcgggaggctgaggcaggagaatcacttgaacccaggaggcggaggttgcagtgggccgagatcacaccactgcactccagcctggacaacagagcgagactccatctcaaaaaattaaaaaaaaaaagtgttgaatatctcatcaaaatccaaaattggactcatgtggatgtatgtaactttcacaccatcataaggttgaaaaatcataacttggctgggcacggtggcttacacctgtaatcccagcactttggaaggctgaggtgggcagatcacctgaggtcatgtgctcaagaccagcctggccaacattgtgagaccccctctctgccaaaaatacaaaaattaggtgggcatggtggcaggcgcctgtaatcccagccacccagctactcgggaggctgaggcaggagaatctcttgaacccaggaggcagaggttgtcgtgagccaagattgtgccattgcactccagcctgggcaacaagagcgaaactctgtctcgaaaagaaaaatcataacttggaccatcctaagtcctaagctggggaccatcagttaccatttttttacctaaagaatagagaactacagctcccagaaggctgtgggggtggtgacctgtatttgaggctctctgactatatactctggaggctaatgggaggtataatttctttcatattaatttcagatatgataaaattctgtaattggctaatgtagattggtcttatgaaagggaatggaagatcagtggactttgcttttgagaaaggttaggtcagaactgggcattcttcccagcccttagtatccgttctcagtgagtataaggtgagaactacaactcccagaaggcctttgactggttagctctatatgttccagaactttgccctaggcgctgatgggggttgtagtttttcgttgatatactttaatttctatgaggagaagaaatgattgggtccctgtaagaagcttggaagtagaggatatatcctaggagaagcaggactttggggatgtttaatcatttccatctcagggtgggctaagaggaaacaaaagaagtacaactttcccagaatcaccagtgtggatcagatccctgttagccatttgcagtagctgaggagacttatacttgtgcttgtgaacctaagcaagtaatattaggcaagaaggcatcttggagtcagggtaggtgtgtcaccaagggaactggccaggcatggtggctcacacctgtaatcccagcactttaggaggccagggcaggaagactgcttgaagccaggagtttgagatcagcttgggtaacatgacaagaccccatcactacaaaagtaaaataaataaattagccgggtgtggtagtgcacgcctgtagtgccagctactcgggaggctgaggagggaggattgcttgagcccaggaggtcagggatgcaatgagctgtgattgtgccactgctctccagcctgagcgacagagagaaaccctgtctccaaaaacaaacaaacaaacaaaaaaggtgggaggggggacctcataggaacgctcttgaaacaaaaaaattgcaaaaggcaaagggtgttttcttcatttattcattcaaccacaacattgatctgaatgaacaaataaaacatgggaccctcacccccaatcccagatattgtgacccccaatgggctgaatgtgaagaagttttctgccatgcatgagttccagaacctccatgctcagagcaaggctcgaatccaggagtttgtgcggggccatttttatgggtacgtggggcatatacctaggtcttaagagaggagggcgttgggagcctaaccatctaggtctgggggagggggcagctgggggcccagactcctgggtctgagggagggggcacctgggtattcggcctccttaattcttgagcgctggaacaatgggctcaggattaaaggaaatctccatctaaagagaagaactacaactcccaggaggccccgtgatgcctctgtattacctaagacatcctctgcccccccacccatagcttctgggatttgtagttttgaggccagggctagcgggtgagggctttgggctttaccgtgccttgtgggttctttaggcatctggacttcaacttggacaagaccttatacttctttatcgccggccgctatgagttctccaacaagggtgctgacgtcttcctggaggcattggctcggctcaactatctgctcagagtgaggcctgggctatgaggggacagggagggcaagcaaagcagtttataactagggagaacagccaggcacagtggctcacacctgtaatcccaacacttttggaggccaaggcgggaggatcacttgagcccaggagatggagaccagcctgggcaacatggtgaaaccccatctctacaaaaaatacaaaaattagccaggcatggtggctcacacgtgtagtcccagctactcgggagggtgaacggggaggatcacgcgagcccgggaggtggaggttgcagtgagccaagatcatatcactgcactccagcctgggcgacagaaaaagacgctgtctcaaaaacaaaacaaaacaaaacaaaacaaaaaattacagaacagaaacccaagaagccaggaagatgggggtaggaaagcccctgagtatggtggggggccgtgaggggagtatagagacccagaaagaaggtcagagtccaggtggggactgtcctataattctccttgacaggaatgggtatggcaggatcccagtggtcttgacagaaaggctggctggttccaggcttcccccacatgatcctggcctccccctcctttctttctgcgcaggtgaacggcagcgagcagacagtggttgccttcttcatcatgccagcgcggaccaacaatttcaacgtggaaaccctcaaaggccaagctgtgcgcaaacagctttggttagcagccctcgctccggcccctggcgcagcccactcccagatgcatgctttgggtcctgtgtttctcctagagtctcagttttttgttttgtttgtttgtttgtttgtttgtttttgagacagtctcactctgtcgcccaggctggagtgtagtggtgcgatcttggctcactgcaacctccacctcctgggttcaagcaagtcatctgcctcagcctctcgagtagctgggactacaggtgcacaccaccatgcctggctaatttttgtattttcagtagagatggggtttcaccacattggccagactagtctcaaactcctgatctcgtgatctgcccgcctcagcctcccaaagtgctggaattacaggcatgagccaccgcacccggccctcttttttttttttattttgagatggagttttgctctgtcgcccaagctggagtgcaatggcatgatctcggctcactgcaacctctgcctcctgggttcaagcgattttcctgcctcagcctctgagtagctgggactacaggggtgtgccaccacacctggctaactttttatttttattagagacaggttttcactatattggccaggctggtcttgaactcctgacctcaggtgttccgcctgcctcagcctcccaaagtgctgggattccaggcgtgagccaccacacctagcctttttttgtatttttagtagagatggggtttcaccatgttggccaggctgatcttgaacacctgacctcaggtgatccagccgccttggcatcccaaagtgctgggattacaggggtgagccactgcgcctggcttagtttctttttcttttctctgatttttttttttttttgaaacagagtctcactgttgcccaggctggagtgcagtggcgtaatctcagctcactgtaacctccgcctcccagcaaagctcagtttcttcatctgtaaaaccgttcattcattagcagagatactcactgagcatctactatgtgctagctaatttttatatttttagcaccgatgggatttcaccacgttgaccaggctggtcttgaactcctgacctcaagtgacctgccctcctcatgtattccaggtcctgggaatacagctgtgaaccagaaagataagatccctttcctcatggagcttgtattctagaaaatcctgtagacggaatttacttttgggcaaaaataaagcagaactggaatatgagacggggttgtcaggacaggccacactgagaaagtgttattgggcagagacgaggaaaggtgacgagggagcaagccctgtgggtatctgaggaacagcaaactcgaaggccccgaggcatgattgagacgcggtggggagtcccatggggctggagtgacatgtctcatagagaaggggtagaaagtgaggcaagatggagggcacctgtagtgccagctacaggaggcaggaggatcattttggccctggaggttgaggctgtagtgaggcatgattgcgccactgcactccagcctaggcaacagagtgagactctgtctcaaaaaaataaaaaagaagtcgggcgtggtggctcacacctgtaatcccggcactttgggaggccgaggcgggtggatcacctgaggtcgggagtttgagaccagcttgaccaacatggtgaaaccccgtctttcctaaaaataaaaaaaatcagcagggcgtggtgacacacatctgtagtcctagctactcgagaggctaagcaggagaatcgctcgaacccgggaggcagagattgcagtgagccaagatcgcgccaatgcactccagcatgggtgacagtgagactcggtctcaaaaaaaaaaaaaaaaaaaagaaagaaagaggctgggcgcggtggctcacacctgtaatcccagcactttgggaggctgaggagggcagatcacttgaggtcaggagttcgagatcagcctggtcaacgtggtgaaatcccatcggtactaaaaatataaaaattagccagatgtggtggcgcacgcttgtaattgcagctactcaggaggctgaggcaggagaatttcttgaacctagaaagtggccgagattgcgccatcctgggcgacagagcaagactctgtctcaaaaaaaaaaaaaaaaaaaaaaaaaaaaaaaaaaaaaaaaagaaaagaaaaaagaaaaagagacaaagaaagaaaaataaatgaggccagagctatgggaggattttaagtggaggagtgaccgtggggctgttgtgtgacactgctagctttacttgtgtgcctaagtggtcctttctcagaatcttactttcttttcgtataaaatggggcttagcattgccatctgcaggacaagtacaagtcctaataatagctgacatttctggaaggcttgccatgtgtactttttggcatgacatcattgggtcctcatcgcaaacctctgaggttgattctattttcatcctcctctgaaaaatgagtcactgcagtcagagagggaaggccacctgtccctgaccacacagctgatgtcaggcacgtgggtcctaagccttccagggcctgccccctgggtccccatcctccagcctggaggccccagggcacggcttccctgctcacacctcagtttccttgctatcctagaaacctaagggtagctgggcgcggcagctcatgcctgtaattccagcactttgggaggccgaggtggccaattaccagccagaggtcaggagttcgagaccagcctggccaacgtggtgaaaccccgtctctactaaagttacaaaaattagccgggcatggtggcaggtgcctgtaatcccggctactcaggaggctgaggcaggagaattgcttgaacctgagaggcagaggttgcagtgagccaagatcgcaccactgcgctccagcctggacgacagagtaactctgtcaataataataataataataataaataaactgctgggcacagtggctcaagcctctaatcccagtactttgggaggccgaggtgggcagattacctgaggttgggagtttgagaccagcctgaccaacatggagaaaccccgtctctactaaaaatagaaaattagccgggcgcggtggctcatgcctgtaatcccagctactcgggaggctgaggcaggagaattgcttgaacctgggaggcagaggttgcagtgagccgagatcacgccattgcattccagcctgggcaacaagagccaaactccgtctcaaaataaacaaacaaactaactaaagaagcctaacagtaaatggcagctggtgtgtatgtgaccctgttgctctgcttcctccagggacacggccaacacggtgaaggaaaagttcgggaggaagctttatgaatccttactggtgtgagtgccccaccctcagccctgtgccctcctaggccctgactaacccctctcattactccgttctcacatgcatgcccctgcttgccttgcagtgggagccttcccgacatgaacaagatgctggataaggaagacttcactatgatgaagagagccatctttgcaacgcaggtatggattggacctctgtgcagagagatagcagttcctggcagccccagaggcagcttgccaggccagctcagaccccagagattgctgggagtcctgctttctcctgcagccctttatgaagggatctattctgaggtccacagaagggcacgtgctgactcgtgcaacttcagttgctggaggcgaggcacttagggtgggctgttttctgtggcttattctgccacgagggttgctgggacgtgtggtttctctgggattctggggtcaatgagcaaaaggaagcttatttgtttatttatttttattatatttatttatttattttgagatggagtctcgctctgtcgcccaggctggagtgcagtggcacgatctcggctcactgcaacctctgcctcctgggttcaagcaatactcctgccttggcctcccaagtacctgggattacaggcacatgccaccacacccagctaatttatatatttttagtagaaacgagatttcaccatgttggccaggccagtctcaagctcctgacctcaagtgttctgtctgcctcagcctcccaaagtgctgagtttacaagcgtgagtccctgttcccagcccaaagggaagtttaaaaggaagtgtagaaatgtaataaagggccaggtgtggtggctcatgcctgtaatctcagcactttgagaggccaaagcaggaagatcacttgagaccaggaggctgaggctgcagtgagccatgactgtgccactgtacaccagcctgggggacagagccagatcccacactagccccccacccacccccaaaagaaagtcaaggcccagcttggtagctcacacctgtcagtattcccagcactttgggaggctgaggtgggaggatcgcttgagcccaggagtttgagaccagcctgggcaacatgatgaaaccctgtctctaccaaaaatacaaaaatgagctgggcatagtggcatacacctgttatcccagctacctgggaggctgaggccagaggatgccttgagctcaggaggtcaaggctgcagtgagctatgattatgccgctgcagtgagctatgattatgccactgcactccagactgggcaacagagcgaggcggacacatacacacacacacgaaagaaggaaaagaaagaaaagaaaaggtcaagacagccataaaagaattacaactctcagctctccttgggccttgctgcacacggctccacctctacccctaaaactgctgggagtggtagttttatcgggccactttagggacgcagtcaggaggtgagcaaaagcacccagcattctccagaaaacattgcaaactctcagcagctgcggtttcttatttccagaggctgtgtgttggtccccagacacccctgggaattgtagctgctttagatccctaacttcagagagaattggcatttataaaatgagaacttaccgtcattctattgagtctaggggcccaaaaaactacaactcccagcagcccctgctggctttctggggcattgacgcttcccttgtccagaggcttctgggagttagagttctttcattctctggggtccagggacttcagtacttgtggtctacattggggagccatttcctggggaatggaaacccagacagctaagttgtagaaacaaaacgtgaactgcttttggctaacctataatttccaatagtccctaaagcagcccacctcattatgaatgtttctgccatcgggatgctgggagttgtagtttctcgggcccctagactcagtagagtggtggtaagtaaaatctttaatgagctatgatggaacagttgctaagaactatacaccccagcagtcctcaggacttcctatcacactagctctgtcttgctccagagactcttggaaattgtggtttctttgggcctttgttagggttggaggtgaattttcttttttcttcttttttttttttttttttttttttgagacggagtctcgctctgtcgcccaggctggagtgcagtggcgcgatcttggctcacttcaacctccgcctcccggattcatgccgttctcctgccccagcctcctgaggcacccaccaccacgcctggctaattttttgtatttttagtagagacggggtttcaccgtgttagccaggatggtctcgatctcctgacctcgtcatcctcctgcctcggcctcccagagtgctgggattacaggcgtgagccaccacgcctggtggttggaagtgaattttcataaggaaactacaactcccagcagtctccaaagcttgctgccatattggcacagtctccacccccattgactggggatagttatatttcctttgggtttctttaataatagagcccagagtacagaacaaggtagctgcaactcctcatagtccttggaggtaagggagttgctaacacggctttgcctcaaagacagctgggaattctagttctttgaagctcatggtggttaagggaaggaaaacatttccaggccaggtgtggtggctcatgtctgtaatcccagcacttcgggaggccaaaacggatgcatcgcttgagcccatgagttcgagaccaacttggccaacatagtgaaaccccatctctattaaaaaaaaaaaaaaaaaaaattaggctgagcgcaatggctcacgcctgtaatcccagcactttgggaggccaaggcaggtggatcacgaggtcaggagatctagaccatcctgatttaacacagtgaaacctcgtctctactaaaaatacaaaaaattaaccgggcgtggtggtaggcgcctgtagttccagctactcgggaggctgaggcaggagaatggcatgatcctgggaggtggagcttgcagtgagccgagattgtgccactgcattccagcctgggcgacagagcgagactccgcctcaaaaataaataataataatttaaaagaaaagaaagaaaacctttacaggttgtactagtgggaatccacaactcctggtgatcacttgggtttgttgccccacgtccggtgcatttgtggtctccttggctcccccagggtccgcatggctcatgaggaagtagggagttctctgtcccttccatgaccccttacccttcttgtggctcctgcagcggcagtctttcccccctgtgtgcacccacaatatgctggatgactcctcagaccccatcctgaccaccatccgccgaatcggcctcttcaatagcagtgccgacagggtgaaggtgagggcatttggtcagggctgggttgggcacggcagagggaaggggttgggtcctgggcctcacacactccattcccctataagttttatcaaaggtattgctgtggttagaaagaaccctggcttctgaggcaggcagacctgggtttgaacattggtcctgccaaacacatgctgtgtgatgctagacaagctttttaccctctctgggccaccttgggatctcagggcttagctaaataaggcacttgggctgagtccttctttttcactaccaggtgattttccacccggagttcctctcctccacaagccccctgctccctgtggactatgaggagtttgtccgtggctgtcaccttggagtcttcccctcctactatgagccttggggctacacaccgggtgagtgtagtgggcaggggacagcgtggtcatggcatcctagtcagagctagcatgtcttggggcgaggcactggccttctctgagcctgttgccttctttgcaaaacaggaacaatggtaatcacctgttctgctacagcgcgtgcttttgtgatacaatagctcatgtattgagaaactagaagactgggttttgaggactagtgaactggatgtcacagttcacactgctttctcccagaaagcagtggccccccaaatagtggcaatgaaatgcacaattcacaaatacagccgagtgtggccaagtctcctcgtaagacgttcccagtgcccatcaactccaccttcctcttgttggttcacattagccagtgtttttaaagctaaataaggctgggcgtggtggctcatgcctgtaatcccagcacttggggaggccaagatgggcagatcatgaggtcaggagtttgagaccagcctggccaatatagtgaaaccctgtctctactaaaaatacaaaaattagccaggtgtggtggtacgcacctgtagtctcagctacttgggaggctgaggcagagaattgcttgaacttgggaggcggaggttgcagtgagctgagatcatgccactgcactccggcagtgctgtgctctgggtgacagagcgagactccgtctcaaaaaaaaaaaaaaaaaaaaattaaagctaaattagtgccatttcctaatttattagtaatttaacaagtcctgcaaactgtgcttgcatgataattaggagtcgcggtcagccccaattccctttttccataggccttgttttatagatagattgatagatagtactagtctgttttcacaccgctataaaaaaaaaatccaagactgggtaatttataacggaaagaggtgtaattgactcaccgttccacatgtctggagaggcctcagaaaactcagtcatggcagaaggggaagaaagaagcttcttctcatggcggcaggagggagaagtatgtgagggtgcaggaaaaacgaacatttataaaaccatgagatctcgtgagaattcactcactatcatgagaacagcggcgggggaaccacccccgtaatccaatcatttccctccctcgacacgtggggactacattttgagatgaaatttgggggggaacacagagtcaaactatatcataaatatatatttaatacattttactatttgtttcttttttgagatggggttattactctgttgccaaggctcacctggaactcctaggttcaggtgcttctgcctcagcctcttgagtatctgtcattataggtgcatcccaccatgcctgacagatgtattatatttagtgcctatttttgcagtttacagatgtttttaggaaaacttacataagaattatagatcaggccaggcatggtggctcacgcctataatccccacactttgggaggccgaggtgggaggatcacttgaggacatgagtttgagaccagcctggccaacatggtgaaaccctatctctactacaaatacaaaaattagctgggggtggtggcaggcacctgtaatcccagcccttcgggaagttgaggtgggagaatcgtttgaaccccagaggcagagattgcagtgagctgagatcgcgccactgcactccagcctgggcgacagagtcagaccctgtctaaaataataataataataattataggtcaggggcagtggctcacacctataatcctagcatcttggaaggctgaggtgggaggatagcttgagctcaggagttcaagaccagcctggacaacatggtgagaccctgtctctataaaagatttttttttttttttgagacagagtcttgctctattgccaggctggagtgcagtggcacagtcttggctcactgcaaccgcctcccgggttcaagtgattctcctgcctcagcctccagagtagctgggactataggcgcctgccaccacacccagctaatttttgtatttttattagacacagggtttcaccatgttggccaggatggtttttttttttttctcttcttgacctcgtgatccacccgccttggcctcccaaagtgctgggattacagacatgagccaccgtgcccggccttttttttttttatttttaattagccatgcgtagtgttgtgtgctcgtagtcccagcctcttgggtggctgaggtgggaggattgcttgagcctaggaggtcaaggctgcagtgagctatgatcaagccactgtcctccaggttgggtgataaagtgagaccttgtctcgagaaaaaaaaaaaaaaagcattgggccaggcgcagtggctcacacctataatttgaccactttgggaagccaagacggatggatcacctgaggtcaggagttcaagacctgcctggccaacatggtgaaaccctgtctatactaaaaaatacaataattaactgggcatggtggtgtgtgcctgtagtcccagctactcgggtggctaaggcacgaaaatcgcttgaacccgggaggtgaaggttgcagtgagccgagattgtgccactgcactacagcttgggtgacagagtgagaccctgtctcgaaagaaaaaaaaaaaagcataaaaatccatcaaaaaattataatacattccttgaactatttctcaaggttgttaaaggtattaaacaagacgtactagatgctctgtacacagggatactaataatgagagaccttatcttaccccccatcaaaatagactaagtccgtacaagatactggcacaagaaaggatcttacaggttgtgacaattaagtagaatgatggaccttggcccgatcctacaggttgtgagagttaagtcaaatggatattgggatgctcaataaattagcatccttatctcccaactatggactttcccgcatcttggagcaagagcaagtaattctcttttctgagcctcttagcgtcccctctgagaaatagggaaatgcacagcctggttgtgggggctcagcgacgctccgcacagcgcctggcacttggtacaggcgccagtagagggcggtgttgaggcgtctattgcgattaagacggtaggcgatgagggaagctaagtgggtctctctcctgccttcccgcagctgagtgcacggttatgggaatccccagtatctccaccaatctctccggcttcggctgcttcatggaggaacacatcgcagacccctcagcttacggtcagcgcccaggcccctgaggattctggaagggggcttgagaacagtgactcctggatcctgggaaggaggagcttgcacccttggagaccaggggcaccaggaaatgggggggctctcgggccgctgggagaggaggggtcctggtgccacagagtcctggagaccatgaagatctccccaggatgttttctgaacctgggtcctggcctccacaggtatctacattcttgaccggcggttccgcagcctggatgattcctgctcgcagctcacctccttcctctacagtttctgtcagcagagccggcggcagcgtatcatccagcggaaccgcacggagcgcctctccgaccttctggactggaaatacctaggccgggtaggacccccactttcctatcctctcctggcaaatcagcagctcctggctaggggtctttggtgcagggtgcagggtctcatcctacttgtaacagttgctgtccctttaagcaatgaaccaggccgatcgcgatggtggctcatggttgtaatcccagcactttgggaggcctaacaggaaggatcgcatgagctcaggagttaagagaccagcctgggcaacattttatttttactaaaaataaaaaaaaatcagccgagcgtgatggtgcgtgcctgtagtcccagctactggggaggctgaggtggtagggtcgcttgagccccggaggttgaggctgcagtgagccttgttcaaacccactgcactccatcctagagtaacagaacaagaccgtgtttaaaaagaaaaaaagaacattggtcaggcgttctcatttgcataagggtgtggccaaagaggagactcacttgagaattcggcccctgtttgaggggtatggctcagaaactgtccattcacaggtctgcttatctacataaggggtggagtcagatagatggattatttgtatggggtgcagcagtgtgctcatctgcataaagggtgtggccaagacccccatcatctgcctgggggtggggcctggctctcacatcctctgccccctctcctcctttcccctagtactatatgtctgcgcgccacatggcgctgtccaaggcctttccagagcacttcacctacgagcccaacgaggcggatgcggtgagtggaccctggatttctgcttagccaggagctaaagggctgggcttcggtggggtgggggtccctcctggagtgggaaggcctagaggtggctggatgcctgggtgggactgtgaggtcctcagctcaccctggtttgcacccacatcgccgtatgcaggcccaggggtaccgctacccacggccagcctcggtgccaccgtcgccctcgctgtcacgacactccagcccgcaccagagtgaggacgaggaggatccccggaacgggccgctggaggaagacggcgagcgctacgatgaggacgaggaggccgccaaggaccggcgcaacatccgtgcaccagagtggccgcgccgagcgtcctgcacctcctccaccagcggcagcaagcgcaactctgtggacacggccacctccagctcactcagcaccccgagcgagcccctcagccccaccagctccctgggcgaggagcgtaactaagtccgccccaccacactccccgcctgtcctgcctctctgctccagagagaggatgcagaggggtgctgctcctaaacccccgctccagatctgcactgggtgtggccccgcagtgcccccacccagtccgccaaacactccaccccctccagctccagtttccaagttcctgcactccagaatccacaaagccgtgcctttctctggctccagaatatgcataatcagcgccctggagtcccctgggcctggaccgcttcccagaggccaggaatctgccattactctgcggtggtgccagaggttttaggaaacctggcatggtgctttcaggtctggggcttttagagccccccgtgtggcttacaaattctacagcatacagagcaggccacgctcaggcccggcatgcgggccaccaagttctggaaaccacgtggtgtccctgcgaatggggcgatcaagtccagagccggggcactttcagagtttgaaggtaactgagagcagatggtcctccatttcaactccagaagtggggctctgggagggatgttctagccctccctggcatgtcagagccaggctctgcctggaggatccctccatccggctcctgtcatcccctacactttggccaagcaagaggtggtagaaccacttggctgctcattccttctggaggacacacagtctcagtccagatgccttcctgtctttctggccctttctggaccagatcctactcttcctttctaaatctgagatctccctccagggaatccgcctgcagaggacagagctggctgtcttcccccacccctaacctggcttattcccaactgctctgcccactgtgaaaccactaggttctaggtcctggcttctagatctggaaccttaccacgttactgcatactgatccctttcccatgatccagaactgaggtcactgggttctagaacccccacatttacctcgaggctcttccatccccaaactgtgccctgccttcagctttggtgaaagggagggcccctcatgtgtgctgtgctgtgtctgcaccgcttggtttgcagttgagaggggagggcaggaggggtgtgattggagtgtgtccggagatgagatgaaaaaaatacatctatatttaagaatccc

SEQ ID NO: 618 - DNA, 32742 bp, Homo sapiens
  source 1..32742: mol_type = other DNA
ataactacttggggacacggagcactgcgtacgccctgggtcatgtgggaaggatgaccgcaaagcctccagtcggcgcgcgggttccggggctgaggggctgaggggcccaaggcgataaccgggatccgctccggccgcgctcctcttgcctttgagaagccccggaagtggcccggctgttggccgcagcgggaggtcttcggaaagaaaaggccggaaccagaagatagactcaacagcgatgccctacccggaccccgccggcctcacaccccggccagccagccgccagtagtgcgcaccgcctcctccccaagccccgccctgcgtccaccccaggggttaactcgcacgcgcgctcttgtggcggaggtagagtgcgccgtccagggctagagcaagcgcggccccgcggcccggagccatgctgaggagctgcgccgcgcgcctccgcacgctgggggctctgtgcctgccgccagtaggccggcgcctgccgggaagcgagccgcgacccgagctggtgagtctgggcaccctcgggcatggggcgggagcaggactcagaaacacgcctgcggtaacagagccttcgattgttatccataccccaaccagccaatctcagaataaaagctcacctgggcaccacagggcagcataagcaacaggggcctaggaatacagtcctgagattcaaaccgttagaaaagggatggaaaggtgaccccgtttttttgttttttaagagacagggtcggcagggcgctacctgaactgcataatttagtctgtctatttatattttgacaacatctgtattttaccaataatatttgaggctgtttttatttttcaaagattaaagtgacgtgaactaaaagataccacagcttttatcttccctttaaaaaaatatttgatccaaacgcttatcttcctttaggtcaattaattagagatctttttatagacatcacacacaacacatatataactacacagacaggcagaagaaaacccagttgccataagatctttcatcacagggagagggatctatctgcttttaattcctggggttccatgaggaaaacagagatcgcccctcttatgcaggcattaaaagtggcaaggcaaaatggagaaaaataactcagtcgaccgcaaagaaacactttttccagcaaaataaggtccaagaaaaggaaaacataaaggccttataaatataattacaacttagatatctacttttaattaagctgagcactccttaagaaaattcttttaacacccttattatctaactttagctccaccaagcggccaatatttctggctttcaaactttacttaaaggctcagagaaaggaaaatccaaggtggttggtggagggcaggggaatcgacaaatagcgaaagggcatacagataccaaaccagaaaggactcattccctaagccaggatgaatctgggccatgccgggctaaacgaagctatgcaatggggttacaggccacgcccccaaggacgtaaaacaagatggaggcctgcagcgaagtttgctgtggagcatacagaaagacatgcaaaacacacagattggctacagcttacgacttacctcacaaatcctttcgcacaaaactttacagaaaatataaacggtaatcctcatcattcccaaaagagcaaaacgtcttccaaaaggaaaagaaaaacctcctttaaaagtatactgctgatgggttggagaggagataaggatgcctgggggaagaacctcttattcctatgcaaatggttcctccaccagagagaggagcttaattgctgtgggacagagctagactccctggaatggggagggggagactgcaggcacctggtagggaacgccagccagccatgccggcgccttggagcctgggcagtggctgtggctcatttatgccctgtgtggctactggacaccacacacacatgctgcagacaccaccatgcaccccagccagtaaagaagtggggccagggagctaccccacccaactgtcttgtgagtgcactggtgaccattggggtgggtgtggaccacctccagtatcgtaaaaagaaaaataggtgccgttgctgtccccccaaaaagaagaggaatgccataagaccaaaaggctcagaaatgaaagtgagaggttttgagtccccatttcactcatccttctgttgcaggaatgaaggaggactggagaggccatggggtgagacaggagaactttattgagtgcactcagacccagcggactaacatccaaaagctgggcccagaacaaagacagcacttgactttaatacacacttttaaaagggggtgggctagcttgaaacaagcttacagtggcgtgaagcatagtggcgtgaaagcaaggatacagaggcagcacaaaggcaattaattcatcaaattgtgacaggtgcataattcaggattacatactgtgtcggaattgatgggttcttggtctcactgacttcaagaaagaagccacggaccctcgtggtgagtgttatagttcttaaaggcggcatgtccggcgtttgttccttctgatgttcggatgtgttcagagtttcttccttctggtgggttcatggtcttgctggctcaagagtgaaattgcggaccttcgtggtgagtgttatagctcttaaggcagcacgtctggagttgttcgttcctcccggtgggtttgtggtctcgttggcttcaggagtgaagctgcagaccttcgcggtgagtgttacagctcataaaggcagtgtggacccaaagagtgagcagcagcaagatttattgcaaagagcgaaagaacaaagcttccacagtgtggaaggggacccgagcgggttgccactgctggcttgggcagcctgcttttattctcttatctggccccacccacatcctgctgattggtagagccaagtggtctgttttgacagggccctgattggtgcatttacaatccctgagctagacacaaaggttctccacgtccacaccagattagctagatacagagtgtcaacacaaaggttctcccagtccccaccagagtagctagatacagagtgtcgattggtgcattcacaacccctgagctagacatagggtgctgattggtgtgtttataaaccttgagctagatacagagtgccgattggtgtatttacagtcctttagctagacataaaggttctccaagttcccactagactcaggagcccagctggcttcacccagtggatctcgcactggggctgcaggtggaactgcctgccagtcccacgctgtgtgcccacactcctcagcccttgggtgctcgatgggactgggcgccgtggagcagggggcagcactcatcagggaggctcgggccgtgcaggagcccacggagggcgtgggaggctcaggcatggcaggctgcaggtcccgagccctgccccgccagaaggcaggtaaggcccagtgagaaatcgagcgcagcgccagtgggccggcactgctgggggacccagtacaccctctgcagccactggcccgggtgctaagcccctcattgcgtggggccggcagggccggctggctgctccgagtgcagggcccgccaagcccacacccacctggaactccagctggtccacaagcaccccgcgcagccctggttcctgctcgcgcctctccctccacaccttcctgcaagctgagggagccggctctggccttggccagcccagaaaggcgctcccacagtgcagcagtgggctgaagggctcctgaagtgccgccaaagtgggagcccaggcagaggaggcgccgagagggagcgagggctgtgaggacttccagcacactgtcacctctcactatgacccttgcttatgcagcccaggtggctgttatctaggcttgctcaaaagagccttgcaagtgcttatctcataatcttcactatggtgcccagacggccgcagcctaggcctactcaggcatgtcttataaccttcactgtgctgtttagataaaacagaatacttgaagttactagttacagaaaacaggaatctataaactcataaaacttgcagagcaaggtacaatcacacggaaggggatgggattcaagggggaactttactttttcttatccttttgttgagggagtgctggaagagtctccagagcacatcctttgagccctggtttctttgagaatgttatcaagactacacccgggtcagggctttgcctgttactgcctttgggatgagtcagcctcatatagaaagcttgtttttcactttttaaattttattttgctttcttcaatttcctgcctcacttcctcaggccccatatttgagcgccaaacacagttagggtgagagtgagactctgtctcaaaaaaaaaaaggactttcttctcaattcatctaagttcttgtcacacaatcaggaaagatcagtcttgtggacacagaagggtgagaataatggaatttattgggcaaaaaaggaaaaagagaaaaacctcagcagaggaagagggagctgctcctaccctgccacacaggaactcaagaggccaggctccttgcgtctgccaatggcatgaacttctgtggctccaccctgttctcccagtcaaaggctggtgggaggttctctggggagctctttttacttcgctgtcttaccactttataaatgtgtaaccaaagctcaagcaagacctttcctctgttcaggacaacaaaatataatcgttgtccctaacatttctacttcatttataatctatgctttgtctttacttcaggtatctcttagttttcacctccttgaactgaaacctttattatttctatttctacattattatagtgtccatctggagtaacaaattcaacccctgccaaactaaaattaatagttacactcctgttttctctctcctgatccacatgtgcacactaagaaaaacctttcttttcattctattcaccctagttttcaaagccacagctctagataatcattcaagactcttctgctttctctttcccagtcagtaactccccacatccctcagtcccaatgtcctaaatatcttaaaactttacttttcattactcagtacctagttcagattctgaccatatctgacctgggcctttgcaacagtcttttaactggtttccctaccattgcatttcaccattttaattcattcgttacaccagatggagctttctaaaacctatgttcatattactcccttgcttaaaactccttaagtctcctcataaaggaaaaacgtgctgtatcattcaagtgctttcatgattctttaaagacgccacttctttagttaacttaatcctatgtaataacattggtgaaatcacgtgtgagttttctacttatgtccttttataatatatgaatatattttgttatattttaaaatacatatatttttgtccttgtgccacctaaaatcatttttcatgctggtctttggaaatactgacctagaagttgaaatctaagccctatggtgtgatccctctagttcttcacatcttgctgctcttctctttccaccttacatatatgaaggctgaaaccctagcagttccccaatgtgatacgtttatttcaatctcctatgccttcgcttggagcaggccccctccccattctctccttaatgaactttttatccgtaggaaatcactccatcatttcaaagttttccctgaaagtcatccgttctatgcctgtatctatttctcttgtagtatttttcacatccaaggctgctaacacttgaaggcagggtctaagtcttctctctgttttacctgtccctcacatagaaccagggcatgtagtaggactcaaaaaaagtttcttggatttaacggaatcccagactttaaaagttaaaatcaggagaacccacagttaagggagtcattctaattcctaaaagtatttaattagctctgtatccataaaaggacagtggaactgatggatcctagtgttacttgtttaagatgagaccagtggctaatgagatgagttcaaattcataactccaaagcttatacatactattctgcctctcagttgacatgttttggtcaatacatagtaatctgtgatgaattgtcttgttgggttacttctagattcatgtcctttaaaagttacataatcaggactggattctaaggaaataatccaaaatagaggaaaagctatattcataatgttccagtggacattttcatttagagcagcaaaagattggaaataatttaaatatctaccttaatggctaattatatagtatatcagtttaatggactatttttctgctattgaaaatggtggtaactgatattacggagaaagtgaacactaaataatttcaagtggtaaatgtagaaagcaaaattgtgggatttttaaaattttgtttgtttttgtttttactgagattacaagtatattaggaaaaattatatttaaaaaatttggaggaaagaaaatttgccattaattatattaagagggagagatgggtgggtttaaaactttttcttttctttctttcccaaattttctgagctgggttctggaaggatgaaccaattaaaaaatatatatatatggaaaaagattacaaatcctgggctaagggcaaagtggtttcaaccctgatcatgtatccccaaccctctgatactccaaagtcaggacttcctttttttcagccaggacgtttttattctgtagagttttttgtttgtttgtttttgagacagaatctcactctgttgcccggactggagtgcagtggtgcagtcttggctcactgcaacctccacctccctggttcaagcaactcttgttcctcagcctcccaagtagctgagaccacaggcacacaccatctcgcatggctaatttttgtattttttgtagagatagggtttcaccatgttggccaggctggtctcaaactcctgacctcaagtgatccacccgccttggcacccccaaagttctgggactgcaggtgtgccaccacgcctcagcttccatagagtttagttttgatctgttttgtttaatttttattttttaattttatttttccataagttattcaggtacaggtggtatttggttacatgagtaagttctttacactagtgatttgtgagatattggtgcacccatcacctgagcattatacactgcaccatatttatagtcttttatcccttatccccctcccattcttccccccaagtccccaaagtccattgtatcattcttatgcctttgcgtcctcatagcttagctctcccatataattgagaacatacaatgtttggttttccattcctgagttacttcacttagaataatagtctccagtctcatccaggtcactgggaatttgggttggttccacgattttgtgttgggcatttgggttggttccatgatttgcaattggggatgatgctgctataaacatgcatgtgcaagtatctttttcgaataatgacttcttttccacactgttttccatagcagctatactagtttacattcccaccagcagtgtagaaatgttccttgatcactgcatccacagcaacatctactgttttttgagtttttttattatggcaattcttgcaggagtaaggtggtatcgcattgtggttttgtctgtttgtgctctttcagactttttgaggtaggcatttagggctatgaactttcctcttagcactgccttagctgtatcccagaggttttgataggctgtgtcattattgtcattcaatctgaagaattttttaaatttccatcttgatttcatttttgacccagtgctcattcaggagcatggtttttttgttttttttttttgtttgtttttttctgagacagagtttcgctcttgttgcccaggctggagtgcagtggcacaatctcagctcactgcaacctctgcctcctgggttcaggcagttctcctgcctcggtctcctgagtagctgggattacaggcgcatgccaccactcctggctgatttttgtatttttagtagagactgggttttgccgtgttagtcaggctgatctcgaactcctgacttcaggtgatcctcccgcctcagcctcccaaagtgctgggattacaggcatgagccacagcgcctggcctatttgcatggttttgaaggttcctttttggagttgatttccagttttattccactatggtctgagagagtgcttgatataatttcaattttcttaaatttatggaggcttgtttatggcctatcatgatctatcttggagaaagttccatgcactgttgaatagaatgtgtattctgtggttgttggatgaaatgttctgtatgtatctgttaagtccatttgttccaaggtatagtttaaatccattgtttatttgttgactttctgtcttgatgacttgtctagtgctatctgccaagaccagctcagttatggagaccctaacccagcagtgctagagaaattaaagacacacagaaatatagggtgtagagtgggaaatcaggggtctcacagccttcagagctgagagcccctaacagagatttacccacatatttattgacagcaagccagtgataaacattgtttctatagattatagatttactaaaagtattccttaggggaaacaaagggatgggccaaaacaaagggatgggctctggctagttatctgcagcaggaacatgtccttaaggcacagattgctcatgctattgtttgtggcttaggaacacctttaagcggttttctgccctggttgggccaggtgttccttgcccttattccggtaaacccacaaccttcagcatgggcatcatggccatcacgaatatgtcacagtgctgcagagattttgtttatggccagttttggggccagtttatggccagatttgggggcctatccccagcagctgtcagtggagtattgaagtcccccactattattttgttgctgtctatctcatttcttaggtctgttagtaattgttttataaatttgggagctccagtgttaggtgcatatatgtttaggattgtgatattttccttttggacaaggccttttaccattgtataatgtccctctttgtcttttttgactgctgttgctttaaagtttgttttgtctgatgtaagaatagctacctatctctgcttgcttttggtgtccatttgcatgaaatgcctttttccaccctttaagtttatttgagtccttatgtgctaggtgagtctcttgaagacagcatatagttggtttgtgagttcttatccattctgcggttctgtgtcttttaagtggagcacttaggccatttacattcaatgttattattgaaatgtgaggtgccattgtgttcattgtactctttgttgcctgtgtactgtggggttttttttattttttgtttttgctttttaacttgtatttttgttttataggtcctgtgtgatttatgctttaaagaggttctgttttgatgggtttctgggatttgtttcaagatttagagctccttttagcagttcttgtaatggtggcttgataatggcgaattctctcagtatttgtttgtctgaaaaggactgtatctttcgttcatatatgatacttagtttcactggatacagaattcttggctgataattgttttgtttgaggaggctgaagatagggccccaatcccttctggcttgtagggtttctgctgagaaatctgctgttaagctgatagattttcctttataggttgcctggtgcttctttctcacagctcttaagattctttcctttgtcttagctttggataacctgatgacaatgtgtctgggtgcagatctttttgtgatgaatttcccaggtgctctttgtgcttcttgtatttgcatgtctagatctctagcaagaccagggaagttttcctcgattattcccccaaatatgttttccaagcttttagaattgtcctcttcctcaggaagaccaattattcttaggtttggtagtttaacaaaatcccagacttcttggaggctttgttcatattttcttgttctttttctttctctttgttggattaggttaatttgcatttctaaaagtgtgtccaaaatttcctgaattttttattgttttttctttaagctatttccttgaatatttctcccttcttttttttttttttttgactcactctgtcgcccaggctggagtgcagtggcacaatcttggctcactgcaacctccacctcccagcttcaagcaattctcctgcctcagcctcccgagtagctggaactacaggcgtgtgccaccatgcccagctaatttttgtatttttagtagagatggggtttcaccatgttggccaggatggtctcaatctcttgaccttgtgatctgcccaccttggcctcgcaaagtgctgggattacaggcgtgagtcaccacacctggccctcccttcacttcttgtatcattttttggatttccttgcattgggctttgcctttctctggtatctccctgattgccttaatagctaacctcctgaattctttttcagataaatcagggatttcttcttggtttgaatccattgctggtgaactagtgtgatttttggggggtgtcgacaagccttgttttgtcatattacctgggtaggttttctggttccttctcatttgggtaggtagactctgtcaaagggaaggtctagggctgaaggctgttgttcagatttttgtgttccacagggtgttctgctgatgtagtactctcccccttttcctgtggatgtggcttcctgtgagctgaactacagtgattgttttctctcttctgggtctagccacccagtgagtctgcccagctctgggttggtactaggagttgtctgcacagagtcctgtgatgtgagctgtctatgggtctcccagccatgaataccagtgccttttctggtggaggtggcagagggtgcagtggactctgtgagggttcttagctttggtttaatgctctacttttgtgctggttggcctcctgccaagaggtggcactttccagaaagcatcagctgtagcagtatggtgagggaccggtggtgggcggggccctagaactcccaagattatatgccctttgtcttctgctaccagggtggatagggaaggaccatcacctggggctggggctaggcacatctgagctcagactctccttggggggatcttgctgcagcttctgtgggggatggcagtgagattcccgggtcactggagttgtgtacctagaagaattatggctgcctctgctgagtcatacaggttgtcagggaagttggggaaagccggcagtcacaggcctcacccagctcccatgcaaaccgaagggccggtctcactcccaccatgcccttccaacatccccgtgtctgtttccaggtggagggcaagacgggcttgaaaacttgtctgaggctttccacctcccagctgcaaaagaaaagggctttagttcttccccgacctgtgaagtctgcaagccgggttcatgccctccccgagttctggccaggaagcttctccccagttcaaactgttacaaagttcagccgcagaatttcttctccctgtggaattttaccccctgctcctttggccaccctcctgatgaatccctgtggtgccaggcaggtatgggctgcttggggacccagtgagctcccagggcctttctgctgcttcccttaccctgtatttcgctcagcttagctctctaacttgactcagctccaggtaaagtcagaaatttctcctgcagacagaccagcttctccagtaggggtgtgtgttcaggagaggagggtctttctttcccaattccacagttggggcactcacagtatttgggatgtctcccggtcctgcaggagtagtccgcttccttcagagggtctgtgggtcctcttgggattgctggttcttgcagtcaatcttgaactaaaattcacaatacaagcctccacatgctcagctaatacgattttgaagaaagttggaggaatcactctgcccaatccaacacgtattatgttcctacaataattaagaacgatcacaaggtcccacaataggctgtctgcaagctgaggagcaaggagagccagtcagagtcccaaaactgaagaacctggagtccgatgttcgagggcaggaagcatccagcatggaagaaagatataggttgggaggccaggctgtctcttcttccatagagtttttgagacaggttctctgtattcttcccaccaagccagcattggagccagcccctgtcagcagaaagctggttctcccatcatactgtgacctccccgttttggttttatggtgcagtgtgtgtattgtaggtacattaaatctgaatgaattgataagggtggctgaaagtagaatgccatggagttaatagcttctgtgatcctacatgttccaagataactgcagcagtccaaaaagccagtttcctttctggtgtttgtgggcatacactttgttctgctcctgagtaagtcacactttgtcttccaggtcctctaggatccctgcaatgttccatttgttgcctgggcattggagtaatagcagtgcttggtgctacagaaatagatggatggaagttgtggttactgtgacaccaaaaacttgtcccctgagctccctactcctctttctcctatattttttggtaattggctctgtcattcacctcactgcaggattcagaatcctggtactgggtcttgtatttctctttttcccttaccctccttatccaaattgtcaccaagttctgcttcatgctctcatgatttctcacctgagttaccctagtagcttccaaatagggccctctgatttcaaccttggacactcccactatcttttatattatggaaagatctaatcatgttaccccccatttaaaatccctcagagagcactgcagatacaattcaagccagttagcttagtgttaaggttttacatgcatttctgcagccatctgcccctattcttgcaccctaataatgccaaacttcttttaggccttaatttcatcatctgcaaaatgaggataataaatagtacctacttcatatgattgtaataaggcccctcaaaactgtttcatgcctcttttgcccactgcattaggctgttctcacattgctataaagaaatgcctgaggctgcgtaatttataaagaaaagaagtttaattgactcacatttctacaggctatacaggaagcatgatggtggcatctgcttggctgctggggagggctcagaaaacttacagtcagccgggcacagtggctcactcctgtaatcccagcacttggggaggccgaggtgggcagatcacctaaggtcagaagttcgagaccagcctgtccaacatggtgaaacctcatccctactaaaaatacaaaaattagccgggtgtggtggggcggcacctgtaactccagctactcagaaggctgaggcaggagaatcacttgaacccaggaggtggaggttgcagtgagccaagattgcgccactgcactccagcctggacaacagagtgggactctgtctcaaaaaaaaaaaaaaaaaaaaaaggaagcaagaaaacttacagtcatggcagaaggcaaagcaggagcaggcacttcacatggacacagcaagagcaagagtgcaaggcacaaggtactatacacttttaaacaaccagatctcatgagaactcactatcatgaggacagtaccgaggaggatggtgctaaaccgtccatgagaaattcacccccatgatccattcacctcccaccagggcccacctccaactttggggattacatttcaatatgagatttgagcgggaacacacatccaaactatattccagtgttttttttttttttcctgtaatactttttccagctggctaatttctgcttatctaatcaatattcaagtcaaagaaccccttcctgaacccctaatcctagatgagtacttctcccttatcccctaacttcctgtgcatagccactggaagcactttcaacatggaagataatgcctgttcttaacctccatctccagtgtgctgggcttacctgtgcttgattaaagtctggaaaaaaagaatggaatcagcagacctgagcataatcctggctctgtcaatagctcgctgggtgatgttgagcaaatcattttccctctctcagtctctcattttcccaaggaggttggaccagatgatccctgaaattcccttccattttgaagtgacaagcttatggggagaagaaaagcagcaagataatcttagaaattgggagaatatgttatgaaatagaatgcacctcccattacttacttttctttttcttctgtcttttagaggtcattttcttctgaggaagtcattcttaaggactgttctgtccccaaccccagctggaacaaggacctaagactgctctttgaccagtttatgaagaaatgtgaagacggctcctggaaacgtttgccttcatataaacgtacacctactgaatggattcaagacttcaaaacccattttcttggtagaaacagccactttcccattaatatatctgagcatcaaatataaagctaagaacagattgaagtactagttactacctgaaaaaaagaaagaatataatgcaggattatggttctatagtcaccaattttatagaccagaaatcacaataaattttgcagattggagagcataaagcctattgtcaagaataagactgctcccaccctggcattcttatcaccattagcaagagtgaagaaagggccccagagagcttccaccctcctacaacctcatcacctctccgtcttgaggctgtcatctaatctcatttcaccctttatcccatatctggttatatcaccctaagaagcttagaacactcaggttatacccacatctcccagtatctaaatccccagggcaacccacccaacacccaaaacacacacatagcaattcctatccttctgtgtttttttactaatatacttttttagcattataattttatagaaaaattagcctaaagtacagagagttcccatataccctttatcccctccccacccctaatttctcctattattaacatctcacattactgtggtgtatttgttacaattgatgagccaatattaatatattattcttaattaaggtccatagtttgttttagggttcactcttcgtattatgttttccgtgggttttaacaactgtgtaatgacagatatccatcattatagtatatttgaatcattcacagatatttctgagttactcattatcttttaatcatccaaacacatctttaggtggtggttggttttttttaactgacttttaagaaggcccttgggccaggcaccgtggctcatgcctataatcccagcactttgggagactgaagcgggcggatcacttgaggtcaggggtttaagaccagcctggccaacatggtgaaacctcgtctctactaaaaatacaaaaaaaattagttgggcctcgtggcggggacctgtaattccagctacttgggaggctgaggcagaagaattatttgaatccaggaggcagaggttgcagtgagctgagatcgcgccactgcactccatcctgggcaacagagtgagactgtctccccccctacaaaaaaaaaaagagaaaaagaaggctctcaatattgcccaacaaccatacttcatgtttccctagtttattcactctcctcccttactggatgagtattttctgcctttttctttcttcttatgcctctaatactttcccttctcaccctcagttggtctcgcttcctatctcactaagagaaaataaaagcagtcagaagagaactcccagtctcccattgcctcacatatcctcccccctgcatctgtgcctgatgttctgcttcttcctgctgtgagtgaaccatccacactcttagggagaccaagccttccatttgtgcgctgcattccattttctttggcctactgaaggacatccatctctgctagatgtttcgtatcagcatataaacatgccacaactgcatttctctcttcccagtctctctctctctctctcttttgttttgggtttttttgttttgttgtttttttgttttttttgtttttggttttgagaatgagtctcactgagtcactcaggctggaatgcagtggcgtgacctcggctcactgcaacctcctcctcccgggttcaagtgattctcccacctcaacctctcaagtagctgggattacaggtgcatgccaccacacccagcttatttttatatttttaatagagacagggtttcacaatgttggccgggctggtctcgaactcctaaattcaagtgatctgccccaccttggcctcccaaagtgcggggattacaggcatgagccactgtgcccagcctatcttgaacccactccctcaaaacagctcttgccaaaggtaccagtgaccttcatgttgctgagtccgctaacctctcagcttttggcacagctgttgactcctttctgtttgaacataacttctaggacaccacattctccacttcactggtgcctccttttcagtttcttgggctggctcttccccatcctcaaacccttcatgttggggtgccctcaagtctcagtccttagtactcctctcttctccacactccattggtaatctcatgcagtctctcagctttagagaccatccagaagttgacaacttcttaattaaatggttgaaatttagtgcctgggttcaaattctggttccacaatttaaagctgtgcaactttgagcaaggcactttacctttctgtgcctcagtttcctcatggtagatactttagtatttgctgaaggaatgaataaaacaaaaataaaactaatcaagaaaaattatagagttcttaagtttctttgcagaatctctgatatatctcgagggaagaattattctgttttataaatgaagaggaaaaatgtgtagtttgtattacttattctcttccaactgttagcacatcacacaactgactgtccttatcccagcacaatctggcttctaccctcacagctctactgaaatgtcttcattgaagccactagtgacggaagtgccaaattcagtgtgcattcttcagcacttactgtactagacctccctgtctcattctcattgaaacattttcttttggctttcataaacctttcagaccaatcttccctcctccttctacttgctccttaaatgtcaatgttttccagggttccattcctacattttgctcatttcttcatccaaccctcattcgctcttgactaaaatttgaccctctcagaatcaagaggagtttgagatcctctttgctacccacacttgttttcaaaccattacttcccctcatcttaaaaagccctctgggctgggcacagtggctcaacactttgggaggccaaagtggcagatcacttgaggccaggagtttgagacaagcctgggtgacagagcaagattctgtctcaaaaaaaaacaaaaacaaaaaacctctgtttctttgagtttataccatctaactttgtcaccctcctcttcttctcctccttgttgctgtcatctgtcaacctctccctcagtgttgagtatttcagcagctggtccgctatctacccaactccattcagcatcctcagcaactcgagcatctacacagtggctcctcagtttatgtgcttcctcatcacctatgaacttttcttatcccccagccccagccacacactgccatgaacatctcgagccttatcttcagacagtacacagcctccaaatgcatacatttaaacatcctgttttctgatgacagcatttttcctttcagcagcttacttgttcaaaggcccctcagaaacaattgttatttcattaagaccttctgagttcattgaatcctttactttctcatggtccaatagccctcatctatctgaacttttgtagcccacctaacctaggaaaaccccagccctggatgaatccaaccatctgccatctttactttgaactggctttcacatagttaagcattgctagagaaaatcaccccatctagcagataagtttggtgattgtgatttttgtagtttcatctcctgtctccattcttatcctcctcaaagcccttcttccactcaactgtcagaatgattcaaaatgcaaatctcatcatgttattccaatgctattttcagtgctatcccatttcttaaaatactcttgcctttcagacttaaaaatgaatatgaagcacctaggaatcttgttaaaatgcaagttctgcttcagaaggtcagaagtagaacctgagattctgcatttccaacaaacttctttcaccatcacaaaggacaaacacatcctcttgagagtagtagcttttggtctttattttgaaatgacctacattttaactcaacccagaccttatttttctcatttttatgaaataagctcaaggtttgccaatctagaccagaaatctcaaactcctaagtaaaacaattataagcacttaacacctatcttatcctgaagtcctggaatgtcagagttggaagagatcttagagctcattttgttttatctcctcattgtatggataaagtgtagtgcaaaagagtgagttctaggccagaggtaggccaataatttaattttcccaactcacgggccaaggttctttccactgcaccataatactgatccccaattttaaggttccttgtctgtccttctaaaccatcaattcactcaacaactgcttaagtgtatatagtatgtgcacatctgtgccatttgttgggtatgcaaagtctaaaagacagggtgcctgccctgagatgctcatgacctaattcaaatgcatccttcctgtccctctccccacttctcctggatcttctcatctgtatctttttccacgtttgtaaatataaattcaatagaaataaacagttttatatatggcaaatcatgatgagctatgaaagaaaggtgagtagggggattaaattttaaaatagatacaaaaggataaatgcactatttcttgagagcaatggctttcaatctttattttgaagtgacctatattttgattcaatccagttcccccaacttgctcacaattgtgtaagtgaaaaaaaactgtgtctaaacaagtgcactattacttacccagagtatatggttctgttaactaagtgttctgtttctttttaaagcctggttaatggccgggcgctgtggctcacgcctataatcccagcactttgggaggccaaggcaggcggatccctgagttcgggagttcaagaccagcctgaccaacacggagaaaccccgtctctactaaaaatacagaattagtcaggcgtggtggtgggcgcctgtaatcccagctactcaggaggctgaggcaggagaatcgcttgaacccgggaggcggaggttgcggtgagctgagatcacgccattgcactacagcctgggcaataagagtgaaactctgtcaaaaaaaaaaaaaaaaaaaaagaagcctggttacaacccacaatctgatttcatgaaccctaatggttctcactgccagttttgggggcttagagtcacaatcacttgagtgttgggctgaactgaccctgttgctgattcagactcaactcatgtctgccagggaaacctcctttctgttacattttttattttctgtaaattgcatttaaaccacagttcttccaagaaggatttccgtctttaccgtaccattttattcagtatattgttagcgtttatatactatattcctgattgccatgtgtgggtacttcattttgatttcatgtctgtttactctgtccccagttggactgttaattccacaagggcaaagatcctatcttctgtttcattgagacgctcccattcctttcaattttgcaccctgtggacatttgaatcaatcatctattgacatgtgattctagcagggtacaggtgcttggctctgccatggcatttctctcacccttgtttctcatttgccatccacctcattttctatagacccaaagcttatgaaagaagaacaaatgtcacaggcccagctcttcaccagaagctttgatgatggcctgggctttgaatacgtgatgttctacaatgacattgagaaaaggatggtttgcttatttcaaggaggcccttacctggaaggaccacctgggtaagaatgatagcctgaaagtgtggatctaaaagatttttatcttacactgcccccatgtgtcctgtacatggactacaataaagattttcaaatggtcacatagatgtatatttattgacatggaaagatgtttataatacattattaaaggacatcttatctatattattaatattgattaaatatttttatatatgagcattataatattatagggcatagggcaatagagtataatttgagagcatatcattaatgtgttaacagtggcttgtcactgactaggtgggtagtattatgggtcctaaatttttttcttttttttcatatttgcattacctacatttctaaacaatgaatatgtatagtttgttttgttttgtgagacaaggccttgctcctttgcccaggctgaagtgcagtggcataatcatagctcactgcagcctcgaactcctgggctcaagcaatcctctcacctcagtctcccgagtagccagaactacaggcacatgacaccacacttgactaataataaaaacataatataaattttctaaattacattttagctttttgcttgcttgcgatctggttactattaagttctggttttattacaaatacttaagactatattattatgctgtgaacaaaacaaagttggggacatagatagtatttggcattcagtacactgaacatgggctaagtggacctttcataagtaaatagtgtgaagatgcttggataatttttctctttcaagaggctctctatcttcagaacttctgaaaacatttctcctccactcctgttgtaactagattcattcatggaggtgccattgcaaccatgattgatgctactgttggtatgtgtgcaatgatggctgggggaatcgtcatgactgccaatctcaacatcaattataaaaggtaaattcacagtaattctctatttatccttaggtgttgttaagtcaggttcccagttgcagatcttgacaccataatttgtgttcaagtgattattaaggaagtgctcccagaggagactagcaagggagtgggagaagcaggacggggaagatgaagaagtgtcaaccaaggctgaactctcaaaagtccagcaaagcatagctttagccagatcatacaagagagctctagaatgaaatttatgcctcagaattgtctccatctcagatgagggagctagagtctttatactctcgcatgtattggtcataggatcagggccatcccagggaccataaatttccaagtacttctaagggtctctgtgtttgagcaaagcagactctagagaaaataaccaaaacaagtgaagaaaggatccaaggggctctgggtggagcaccaacatctactacataacaaaattaattttttaaaaatttagctgggcccagcagtgcacgtctgtagtcctagcttcttgagaggattgcttgagcccaggagttcaaggctacagtgagctaggatcatgccactgcactccagggtgggcaacaagaccccaactgtaaaaaaaacaacaacaacaaaaacacacacacacacacaaaacaccgagtcttttcagtccacaggcacagatgtctttccatttatttgtgtctttaatttttttcatcaatgttttgtagttttcagtgtataagacttttgctctttggttaagtttattcctatgtattttattctttttgatttttttatttttaatttttttattattattattattattttgagacaaagtctcactttattgctcaggctggagtgtggtggcatgatctcagctcattgcaacatccacttcccaggttcaagctattctcatgcctcagcctgccaagtagctggtattacaggcatgcaccaccacagctggctaattttttgtattttcagtagagacagtgtttcactttgttggccaggctgatctcaaactcctggcctcaagtgatccgcctgccttggcctgccaaagtgctgggattacagatgtgagtcactgcacctggccttaattgttttcttaatttcctttttggattagtcattgtttgtgtatagaaatgcaactgctttttctgtgttgattttacatcttgcagctttgctgaatttgtttattcattctaacaggtttttgtggaatctttaggattttctatatacaaagtcatgtcatttgtaaacagatctttgtacttcttcctttccaatttgaatacctttgatttctttttcttgcctaattgctctggctaggacttctagtaccatgtagaatagaagtggcaaaagtgggcatccttgtcttgtttctgatcttaaatgaaaaggttttagtcttttaccattcagcatgatgttagttgtagggttttcataaatagcctttattatgttgagagagtttctttctattcctagttgtgccttagatttttaacctttaaacccagattgtcattgtacctccttttaacaattttaatagcaattacattgattctagagattaatttggggaaagttgacatatttacagatggtcaatatttcatattagttataactataaattagattctagaaatctgggttttcttaacatgttaaagaatatattaaaaattaaattttttatatttttccatgtcccatgtttttaaaaatatttttccatgttcaaataaagttgaataatgaagtataacatcgttcctaaaaaaataaatgtaaacggttactttgaaaacaagctgaaacaaagtatttagattgctgtttatctcaaaaagtgtttgtgtcttaagcacatactcaaatgcaaaatgggaaacagaacctgccaaactctatgcttagtgtttgtcccacccaataaaccatccacaaaaatcagttgcattgctgttcatttgttccccacaattggaaaacatactgaaaagaagttttacctgaagtcatatggatagagagcaatttagtcagaattagaactcacatcttatgacaccaaatctgatgctcttcactacaacacacagcctccattgtcttctgttagttgatgactaaagaccagaataaagtattggattttataagtagtttagaatttaatatttatcactctctgtttttttgtatacagttatttaggttcataataatagtaataatattaaatttaatatgattacttgacagtccttcaagatgctacaggtaacaacctgggattatattttaattgaaaataatttgcagtgtcaattaatcatcagatgccttaatctaccttacttcctttaagaagcaagattattccttaatgatttcaaataatttccagccctctgatccaaatatcccacttgatttatttccttgtgcctagcacattaagataaatagacaaagcaggtcaaactagtgatgacaagccagctgaaagggtaaatatctcagcatgccaatgacccattcatgacacatgagttgagaagctcctgattcgatttcttcatgcaacatggcaaacaagaaatgctaaaggacattcctccttcaaaacaagtagatcctgtaccaaatacacaaggaaagaaactaccaagggtgactatcaacagaaacaataaataagatttagacctcagggatctaagatatgatgataatcaaatacacaatataaatgaataaagtatgagatgtttaaagaaataaaagatgaggctgggcacagtggctcacgcctgtaatcccagcactttgggaggccaaggcgggtggatcacctgaggtcaggagttcaagaccaccctggtcaacatggcaaaaccctgactttactaaaaatacagaaattacccaggtgtggtggcacgtgcctgtaatcccagctatttggggggctgaggcagaagaatcgcttgaacctgggagatggaggctgcagtgagccaagattgtgccactgcactccagcctgggcaacagagcgatactccatcagaaaaataaataaataaataaataaataaataaataaataaataaataaataaaagatgaaatcacaaaaagagaaaacaatgataaactataaaaattattaggcaggtttgccacagaacctaataaaactttgagaaatgagattgtaggccgggcatggtggctcacgcctgtaatcccaacattttgggaggctgagatgggcagattacaaggtcaggagtttgagactagcctgaccaacatggtgaaaccccgtctctactaaaaatacaaaaattagctgggtgtggtggtgcgcacctgtaatctcagctacttgggaggctgaggcaggagaatcacttgaacccaggaggcagaggttgcagtgagcagagattgcaccattgtaccccagcctgggcgacagagtgagactccatctcaaaaaaaacaaaaaaaaaacaaaaaaaaggaaatgaaagtgtaattgtttaaaaacaaaaaaatacctcagtgaataggttaaaggactatttaaacacagctgaaagtgaacagaaatatagaactgaagaaattaccctgataagatggtatgctggtaaaggtcagaacatttcctctgaatttgctagaaactcaaaagctgtggaatgtcatttctttctctccattttcctattataactaccccgccttgtgggcagtctatatagaaaggtttctttgatacctgactgatgtaagaacaagaggggtaaatgtgaattcttatggatagataacacaggagttacttctaaatatcactccactgcaagaatttaaaagaaagctttaaaaatacactcaatagttttcttgaaaagggaaaatgacaatccctaggcttctgggttttgtttgctttttagagtttcgattgcttttcattctgtattttttttaatcagaagctcacatcactttaataatcttgtggcactgtgtttctaatttgtagccaacacattctggaagcttcttccttccttcctttatttatttatttatttatttatttatttattattttgagacagagtctcactctgccacccaggctggagtgcagtggcgcaatctcagctcactgcaacctctacctcctgggttcaagtgattctcctgctttagcctcccaagtagctgggattacaggcataggccaccatacccggctaatttttgtatttttagtagagacgaggtttcaccatgttggccaggctggtctcaaactcctgacctcaggtgatccacccacctcagcctcccaaagtgctgagattacaggtgtgagccatcgtgcccagtgcttgttcctttaaaatgcacagttaaggccaggctacttgggaggctgaggcaggagaatcgcttgaacctgggaggttgcaatgagccgagatcatgccactgcactccagcctgggcaacagagtgagactccatctcaaaaaaaaaaaaatgcacaattaaatcctttattttcactaacaatttagttagacattttataattctgatatggtttggctttgtgtcgccacccaaatctcatctagaattgtaatccccatgtgtcaagggagggacctggtgagaggtgactggatcatgggggcagtttcccccatgctgttctagtgatagtgagttcttatgaaatctgatggtttaaaagtgtttggcaggctgggcaccgtggctcacgcctgtaatcccagcattttgggaggccaaggtgagtggatcacctgagatcaggagttcaaggccagcctgaccaacatggtgaaaccccatctctactgaaaatgcaaaaaaaaattagctgggcatggtggtgtatgcctataatcccagctactcaggaggctgaggcaggagaattgcttgaacctgagagttgcagtgagccgagattgcgccagtgcactccagcctgggcaacagagcaagactccatctcgaaaataaataaataaataaataaataaataaataaataaaagcatttgacagatccccccttgcactctctctctctctctctcctgccaccatgtaagacgtgccttgcttccccttcccctttcccttcacctttgccgtgattgtaagtctcttgaagcctccccagccatgcagaactgtgagtcaattaaacctcttttctttataaattacccagtctcaggtagttctttatagtagcatgaaaataaactaatgcaaactctcatgatttttataatctcacagcccagtaaaccttcaaatcatttctccctacaagttattttccccttccattgaaatttaatcaagagttcatttgtcagatccatatgctcggtgatggtggtggtggttgtattactaaaaacactaaattagtcaccagctccattgttctagtgcggtgttgagatatatcccataaatacatcaacatgcccacctcaactaagtcatttggcagataaaacaagctcaaatgcaaaatgggaagtagaactttgaatcagactgttggggatttgaatcccatgtgtgccaccaaatagccatacagctttagcaaattacctaacctctctgggcctcagtttcctcatccattaaccaaagacaataatacttttcttaaagagatattttgaggatcacagttaatgtattcagagctagcagcttaatatgttaaatgaagcttttttttttttttttttgagatggagtctctctgtcacccaggctggagtcagtggtgcaatcttggctcattccaacctccgcctcctgcgttcaagcgattctcctgcctcagcctcctgagtcgctgacattacaggcacatgccaccatgcccggctaatttctgtatttttagtaaacatgggtttttgccatgttggtcatgctggtcttgaactcctggcctcatgatccatccgcctcggcctcccaaagtgctgggattacaggcgtgagccaccatgcccggcctaaatgaagctttttaattattattttcagatctatgtttagcagagagagagagaaaaaaaaaattaccctgaatccagcacagagaaaaaaggaaatgggaaatatagagagcataagctatagtggacaaataaaaagatctaacatgctctaattagagtcctagaaaaatagaataaagagaattgaagagatccagtatttaaggaaataatgggtcagcatattcaagagctaaagaaaatcatgaattgacaatatagaaagcaatctatatcaagctaggttttaaaagtatatctagagacattatagagaaattggagaatacttaagacaaagagatcttaaaagcagagctaagatagagcagccattacaaagcagtcttgctttttagaagcaagagggcaccattacactggcagtaaacctctcaatagcaacagtagaagccagaagacaataaaacatctgccaaaagaaaatgtcgatctaaaatcatgctctcagcaaagctaaagttcaaaaatgagcgcaaaatgaaggtgctgtcattcaaacaaatggagagaatttatggaacagcaggacaacacccagggagctcctaaatggtggactttagaaagaaggaaagcaatcccaacaggtgggaggatgaaaggaggaatcatgagcaaattaattggtaaacatgtagataactaaaatctaaatagagtctataagtaatattgatgtctaaattctgaggattggtgtgttgcagtggctcatgcctgtggtcctagctacttgggaggttgatgcaagaagatcgctagagcccaagagttcaaggttgcagtaagctatgattgcgccactgcactccagcctgggggacagactgagaacccatctctaaaaataataaaaataaaaatttacaataaataaattatagtgattaacaaaaggacagctaaaatactggataacaatagcatgtagtttgggaggagatgaacagagttaatgttgatacatcctcatatttttcagtggagagaatgattaaaataagagaaaatgagtgtataactaatatctaaaacaatacaagatcaaacaagtagtaaaactcaatttttaaaaaggcaaggaaaaaaagagggttagaaaaagcgagtcaaataataagccaaaataagatgatagaaataagtctaaataaatcagtaatgactctctataaatagaccaaaccatcagttcaaagacagattataatattgaatttttaaaagtaaaaaactagaaactatatgagacatatttttgaaatgacaccaaaaagtttaaaaggaagagaaaatatgctacacaaaagttaaccagaagaaaactgggatcagaaaaaataatgaactgtcaaaaaagtaatattggggatagagaaggctacttcatagtaataaaagattcagttcaatagtaggtaataataactaaatcaatatgcgtctaataaagagtataaattaaattgatataatcatagggagaagttgactagcccacctttatatagtgggagattccaacacattgttctcaatttttttttttcaagacagagtctcgctctgtcacccaggctggagtgcagtggcgcgagctcagcttatggcaacctccgcctgctggattcaagcaattctcctgtctcagcctcccaagtagctgggactacaggcacccaccaccatgcctggctaatttttttctatttttagtagagacagggtttcaccatgctgaccaggctgctctcgaattcctgacctcgtgatccgcccacctcggactcccaaagtgctaggattacaggtgtgacacagcacccagcctgttctcaattattgataggtcaagcagacaaaaaaaaaaaatcagagccaagtgaggtggtgcacatctatagtcccagctatttgggaggctgaggcaggaggattgctttagtccaggggttcaaggctgcaatgcactatgataactcctgtgaatagccactgaactgcagcctgagcaacatactgagaccctgtctccaaaaaaaagaaaaaacaattagaaaatggaggatttaggccaggcacggtggctcaagcctgtaatctcagcaccttgggaggccaaggtgggtggatcatgaggtcaggagattgagaccatcctggctaacatggtgaaaccccatctctactaaaaatacaaaaacttagctgggcatggtggcatgtgcctgtaatcccagctacttgggaggccgaggcaggagaatcgcttgaacccaggaggcggaggttgcagtgaaccaagatcgcgccactgcactccaacctgggtgacagaacaagactccatctcaaaaaaaaaaaaaaagaaaagaaaagaaagaaagaaaatggagaatttaaacatcacaagataacaagtatggtttattagacaaacatagaactctgcatccaataattagaaaacagcacactttctttttcccagcacacatttgcaaaaattgatcatgtattggcttataaattaagtcttaatagattttacagaaccagaaccttacaagccaatgttctggccacattgaatttgaggttaaaaaaaaaaaaagaactttttaaaaaaaatctatagtaaattagagtaacattagctagtgtaactcctacatttcactactttaaacctataggcttttttggtttacctaatagtctcatgtggttatcctggtcagtgagggtaaccccatgaagtgattgagagacccagtctcgtttcagagtgagactcctccttccgcttagtgcctcagtgtcttctttattcaactattcaggctttctaatcattttcttagttttaataaatttttgaaatttttttctatttcatctgcattttcaaatgtattgacataaagttattcataatattcacaatattctcaatttttaaaaaatttcagctaaatctatatcctttttggccccaatagtatttatgtatgctctctctcattgtcttgatctgtcttgccagaaattattagtcttttcaaagagttatcttttggctttgttatgcctttccagtgtgtgtgtgtgtgtgtgtgtgtgtgtgtgtgtgtgtatagacatatacaaatataataaaacaaatttttttatttttaaatgctgcttttatctttgttatcacttttctgcctctaatacaaatctaattaagtgttctagctaaacgaaggaaaacaagctaaagccagtttcctgtgccaaccaaactgatctgtgcctaaatattagttacatttagaaaattacactgtatagttgttgcattattttgtattttctgaaacattttctgttagtctctttactaatctaggactttctgttacaagggcaactcttaactctcactagcttaagcaaaaaagggaatatattggcttgtatggttgagaagtcaggtgtggctgagtgcagatattcagtgatgtcattaggaatctcagccacattttcttctagatctgcttcatccttacgtagcctttcccagtgtagtggcacaatggccaccagccaggccagccaggcttatgtcttgtaagcctagcgcctcagagaaaaagaacccagccccaagggctacagcacaagttccaggattgactatttcagcctgtgcccacccccacaactggtcactatgtgtgtgtggagtggagggatcattattcaatgccagtcaacctacatgggctaagaatgagggagaggtggttccctgacaaaaggggtacatgagtatatcaaagagagagatatgaagagaatgaagggagggtaggggatggataaatgaagagagtcatgttagtagaaaagggagttgctgggcaggcgagaacacctaatgtcccctgggtcttagtaaatgttgaattgactcaacaaaagagcaaaggaaaagctaatgggagtggaagtattaaaagttcattgaaaggaaaactgggcagagagatcatcacagtgataacttcctttctacctggggtagttccatcatctgcttggtagtaccataggagcacgaaacacgtttccgtgctctaccttctgtttcaaccaactgaaatttcacttttaaagagatatcctttcattgtgatatgtttctccaggattcccagaaacgtctgtagccactagtcacatgtagctatttaaagttaagtataaattaattcaaattaaataaatttaaggactcaacttctcagttatgctagccacatttcaagtgctcattaggcacatgtggctaccaggttggacagctcagatatggaacatttgtatcatcacagaaagttctattggacagtactgacttagagcagtaagctgttatcagcaatttgttgttattaggtgtctttctagtgaccattactcagaattgaatgagaaatgttgattatgacagaagaaatgagagaagctgcctgggaccatctgttggccctattttcacttctttaaagcatttcagctcccttaggactttgcagtggatctccagatgggatagtctctgccatcacagagctggaattcctgatgatccctttgaaacaagcccagagagacatccagggactgtagcccaggagccacctgagagcagtggtgcttgggagagggggagcttgagaggctgttggtgtcagagtccttgaggaatgtattgtctaaggcagtcagtgctcattgttgtcaggtgtcataaatttctatcccttgtcatgtacttgatcatcttttaatgttatataagtcagataaaaactgatttttttcctt

SEQ ID NO: 619 - DNA, 6596 bp, Homo sapiens
  source 1..6596: mol_type = other DNA
agcctcgcctagctctctgaaagaaagcctgcaacagaagggagagaagcggccccaagtgcagctgaaagcactccttgggagtcagccaagaccctccatccaagcagggctggatccttgcacttggccatgataaggagatgcttccaggtggcagcaagacttggccaccacagaggccttcttgaggccccccgtatcctgcccagactcaaccctgcctcagcatttggatcctccacagactccatggtgagttcccagctcagccagatgggcagtgttttcccaggagcctagggcttaaggagcaccccaaatctcctcttcccagcccatggccagggcaggtgggcagtgttcggaggagctatttgatttggcaaagagaaagtgctctgggataccaagttgcccccattcaaaactaaaactaccaggagacctgcatctggctctgtgtcttgtgtggccaccaacaaatgactttcctcctgtgggactcagactactgcagcaaagctggggtatccccagacagaggaccccatctgtggcattggcaagcagctcacatgctgtctacagttgtgactggtgtatgagcaggtgacgctacagaggacttccttacgtcacacagatgggcacatagtctgtgccccagccatggcaccacacctctgtgggggcccaaatgtgtttcaaaggagccaccctgcccaggcaggcccacagcagtgggcagagctggagtagcccctgaggtgggggttgctagaatggtcctcaacaactgtgaccctgccctgcagaggagacagcatctagtgcgaccaccagctctcacagtcacatgcttggcaaccttggccgtattccctcagtttccccatctgtacagtgaggctaatatgagcagttgtcaactttaaagaactgctcacatgttttaagcagaacaagggtaaggcaccacatcgagcagcatgcccatcatctctggccccactccctgcccgcccttcccttgctctttagcatccttatgccccgtcacccataggggtccgcagcccccctgcaaggaatatgggccctttcccttggatcgatactctggcagaagggattgagaagccccagcacccaggaacagctgtttagaggtcccgagcccaggcagcagcccccctccaggatgctgtctagtcattctgatttttcctgcccagttctcaagattcttgccagagaagacagacttgaaggattatgctcttcccaatgccagctggtgttcggacatgctgagcctgtaccaagaatttctggagaagactaagtctagcggctggatcaagctgccctccttcaagtccaacagagaccacatccggggactcaagctcccatctggactggcagtttcctcaggtaaggacaggaccatgagtacacacaccccagccgcccttccctgtgttctaagactgagaagcaacttcacagaccgccttccagttctcagcgagttcttcctgctgtccaactccacccctgatgctgcagccccaggcaacaggcggcgggtgtcctctcaggtctccagctcccctcctcccatctgaagcagcacaccctggtgggcccaccttcgctcccagccaagcatgtccccactggaggacagccagcccagctcctgccccgacttctcactgactgcccctccctaactatcaagcctcatcccaagccttccgccccaaccccatgaaagcccttggaccccacaccccttccactgaggccctgcacatcatccctgctgtgcggggtctggagcagcactcctgaaacacctaatgatcctaatggatcctaatgatagagcttccaccttcttgtgtgtgtgtgtgcactcgtgtgtgcacgcatgtgtatctccctgtctctctcactcatatatgttgtcttcctgcctagtgatgaaggagtggtacaggggacagactacccttgggtttatggcacaaacaaagcaggaataccaacataattttttttcaaagaatttgatacttccaaaaaaggatgtagtagtggtagctgtcttggaaaaaaaaaatcagaactttgatggacttttctgctcttattttactgtttactattattcttttgaattatatgtgagttacatgagtaattacattttcaattttcaatgcttatggtctcttaaagtcttgccctggccctgatcctatctccattctcagccagggcacttcctgcatgtttctgccctagacagaaaggctctgtgaggacagcaactgtgcctctgctcccagagggaaggctccctgggggtggacctggtgtcctctggttttctctccttaatcttgtaccagaggcaagactcaaccaaatggtgctgcatcctgaccataccctcccttctccggctgcaacactgcctatctctccccagacaaaggtgactgtcgcatcttcaccaggtgcatccaagtggaaggacaaggctttgagtatgtcatctttttccagccaacccagaagaagtcggtctgtcttttccaaccaggctcctacctggaggggcccccagggtaaggtcactggtaggaccttggctgcctcctgggcttggctcagcagggcaggttcagcacccaccaggctggccctggagtctctatctttctctaaggggtgaggaagggagtgtggggcactaggcttcagcctcacaataccaggcctggaaggacacacagggttatctggcctaatccccagtgtgcagatatgggcttctcatcaaagtctcaaaattttctggacaaaagacctgagaggccactttgagaagaatgtggtacacttggaagagggcaagatccggaatctagactctgacttggtgtcctgcctggctgctgctggctgtgggactctgagcaagcaattgacccctggtctttagtcttcttacctgaaacctggggcaataatatctacctgccagggtgaccagagatatgatattatgggcctatgtgtgcgtgctcatgaaccgtaaagcacagtacagctatcagacacttctacccaaaacccatgttctatccatggggaaatggagatgcacacagctaaagtaacttgcccgaggcagcaccagcaatcaaagtcagatccaggactctaatctgggaggtgagattccaagtccactgttctctccactctactctgctgcctccagacttggaacagacctcaggaggaatgcacactgggcataaatgtgtccacaagggaaatcaggctgaccgtgggtcaccaagttcatggttgtcccccttctcttccatccggatgcctgctccagacagtcactgaaggctggaggtggtgctggagctcctgcaagggagagacaagagagggcaggagtggctttagggtcctgaagcctgagaggggcttaactggggttaaatagaatccagagtgctaaatagatgtcagggcctccagaggctgtggatgccaactgcagccctcagtcaccttggccatcccaaaggagtcctccacagggacactgctccacacactaggctgtgcagatactagtgaattgctcagagccctgcccaggccatggactccctcctttctgaagcatggctgacttttatttaggggctgatggaagtgaggccaaagaggcagaggaggaccatccaacactaaggccagtcagtggattgaggggttgggggtctagagaagagattagtatccaccaggcccctagaccatggggagtgggaaggaggagttactcgttggccaagagctactctgtagatccacatactggccaatgggtccccaggctggccagtgaggacaaggaggagagagttggtttcgagttctttgacaccaactcttttcactctctttcaagcaatttgggaggcagacagggaagtgcctaagaagtgtgtaaattatgtttgcaaacatttgtttatttaatctgctgagatcagaattgtgaaattcatggtggaaaaactaaggctcagaaaggtttagcaatttgctcaagatcaaacatgtagtgagctgtgggacaaggagtccaactgggtggatagagactaaagaagcagggagggaagggtctggaaaagccactggtcacagcagcaggagggtaacccatggcagtacagtgtggacagctgatctggctctgtggagaatgggctgtgcttttgaaaatcaggaactcaaatctgcttggtgttatttgaattctaaaatgggtgcctattttcccaaattagccaaccatgaagtagctgacataaagcttgcaaaagcaagaatgaacattttacgcttttttttttttttttaattttgagacagtcttgatctgttgcccaggctggaatgcagtggcacaatctcagctcactgcaacctccacccaccgggttcaatcgattctcatgtctcagcctctcgagtagctgagttacaggcgcttgccaccacacccgtctaatttttatattttttagtagagacggagtttcaccatactggccaagctggtctcgaactcctgacatcaagtgatctgcccacctcagcctcccaaagtgctgggattacaggcgtgagccactgcgactggccattctatgcattctaaataaagcaaatgtctgcggcatttgagcatttcagctcaatttcagcattgagcctgctgaagcaggcgctctgctttctgtggcaacgctgctcagaagtgtgtcatgccagcccttgataggtcataagttatgtttcacatttacttatcttgagatgtgggccccgcactggctgtagtgactggtaaggtgagaaacagcccagggttgtgcctcaaagactgagtcaaaaagttcagggactttttcatttcctgtatatgcccatccttccaaattatggcaattattgccagcaattaggtaatgaaccagaaaaatgttttctattaactttatcagaaaaaaacaatttccctgatgaaataaaatgttgtatcattggctgcaaacgcatgctgaagcaaaacagaaaagctcagttgattttgacgggtttgatcagatgggatgcagctgtttccttctttcctatttggctgccctgaggctgaacgtctgtgtttggaagggtctagggaaagggaaaggtaggatcaccacaggagggagggaaggcccattgagggggtctgcccagcagccccagcccaggccttgctcctcaccttaccccacccccaggtttgctcacggcgggtccctggcagccatgatggacgagaccttttctaaaactgccttcctggctggagaggggctgttcacactaagtctcaacatcaggttcaaaaagtaagtatgggcccctggggcattggccaaagtcacagaccttttcatccctggaagtggccatcctcggcagctggggtgtaggagccctgcctgccactctccttccccagcccactcccaagcaattcctctagtccctggccaggacacagcctctgctgtccaactttgggagctgacaaaaaggccctgagcccagggccacttctgagtcctcgaggccgggagggatgaagagagggaagaggacacagagagtgaagggatggggaaccgggttcacatgagagatgggctaagctgcctcgtctcccagcttgatccccgtggactctctggttgtaatggacgtagaactggacaagattgaggaccagaagctttacatgtcctgcatcgcccacagcagagaccagcagacagtttatgccaagtcctcaggtaaaggagcccccagcccagccccaggccccgtcccaccaccacccacccccagaacaaacaggaggaagaaaagatgccaatgattcatcccaagctgcggtccagcttctttaggggtgggatagggcacctactagggacacagatgaagcaagggagagcagaactaggatttttttttctatatatgagttatccaacctgtaacgaaaggacaggacccaggtaatgggtaatttgcagccaaatgctcagagtgtccatcaagctccagccatctcagtgcagctcttgcagctcaactcacccttctcttgcaggtgttttccttcagctgcagttggaagaagagtctccccagtaacagtcactgtgcctgcaggagagccactgcctcccctgcctgcctcctgcctcctgcctcccctgcctgcctcctgcctcctgcctcccctgcctgcctcctgcctcccctgcctgcctcctgcctcctgcctcccctgcctgcctcctgcctcctgcctcccctgcctgcctgggacccatcaaagagcagggaggggtcctcaagcagcaattggtgaggcgagggaaaggacccttttctctgagtaaataaagtctcacagtccc

SEQ ID NO: 620 - DNA, 32746 bp, Homo sapiens
  source 1..32746: mol_type = other DNA
caaatatttaccgccgcgcggagagtgagggcccaagtccgccctgctccgccacttaggccgccccagacgcttccctcggggctgccaccgggtcgggcgcggctgccgcggctagcgggccttccccgcaccggcgcggcccaaccgccaccgaaccttctggaagcggcggctgcctgggcccccacgccgccagaatcgtacgcccgcgcgagctctctgcagccttggcggcctgggaggcggggctcggggtggggccggcgcgggggcggggtcggcgcggggaggccgcgttcgattgcccccggcgcgcaggccccgcctcaccagccccatcgctccacctctgccctccccctttatggcgcggcccgggctcattcattccgcgccgggcctgccagacacctgcgcccttctgcagccgcccgccgcatccgccgccgcagcccccagcatgtcgggcccagacgtcgagacgccgtccgccatccagatctgccggtaagagagggcccgcgcgcagcctgcagcggccaggcgcgccggtcaccgccccaggcctgccccgcttggctctgtggtccccacccgccgaggccgcccccgcccgccgattccccgcacggccttccgcgccgccgccccggacgcccgcccggccgggatgcgactcgcgatgccgcacaagccgggcggcccccgcccgcctccagccggctcctcctggccgcatctccagggcggcggccgcgccacgggccgtttgggcgagaaagccaggcagggacggggcgggcggaggtcaatgcacagctccagagcccggcgaccggcgcccgtgggccgccccgcctcgggcctcgcccgagcatcccggagcctcagccccgtggtcctgcttagcctcctcgaggattcgggatcattacctcggcggttgtgctgcgctaaccaaagcccccagaggtggaggggaggtgcccagagccgcgcgagcccctcggtgggtgcccctgtgggaggaggttgcagagctaccgtcttcagtgcactgcttcggtttgggggagggcaggtgttgaaaggaagaacagataatactgtctacctctaacagtttactatgaagaaaagggaatcagtggtctgttgggcctgaaagcatcttacacaatagaggcaaagggttgtccttctagagcaccccctcttcttccaccaggtactgagtagatagatgcaggcccccagaggaagctggaggctggagatcatgaacaagctcatttcccataggaggtggggagggcagcctgaaggttactctgcagttctcttcggcagaatcggaagcagcaggctggcatttgtgcatgagctaagtgaggacaaggagtctaggttttcagccactgcacacaggctctgtggcctgcgaccggtcctatcctgcttgatgaactaccaggagtgagagctgctttctgttttggtagtgggttcctcacatttgggggttgggcatcacagactgaccttgggctcaagccaagtccaatagaagcaagttactttcctgtagatgttgacatctccaggaaggctgggcatatagcaagtcctgggtctatggcgattcttgactctcagtctcatcttctggcctggtcgagggcctctccttacctcaaggtcggttttgacttttccagagggggaacgtctttgggggagccctgcccctttgactttggctctgtggctgttctggtcccatcgactctggaggtggggaaagcggggcaaaaaaaaaaaaggaaataactggagacagacagcctgcatcaggttcctgaatcagctctgctgagtattggctgggaaacttgggctccatggtttgcaaagagcttatacctgtctcatcccacttggtttgcccaattccctgggaggttgatggtcggtagtgccacccttacctgtgtggaggaggaaatggcagttttgggagttgagtaactgtgtaaggtcatcctgctccaggagatccagggacagcccctgcccaagtcttctgactccagatccagtattcttcccacccctctcctgaataaaggaaaccttgatttaaatcttcccgtggaaggctggccttttatttacttcttcagggtggtgaatagccaatttatacatgttgtcttttttcacccagcttctaacagttactagattttttgttttttgagacagagtctcactctgtcacccgggctggagtgcagtggcccgatctcagctcactgcaacccctgcctcctgggctcaagtgattcttgggcctcagcctcccgagtagctgggactacaagagtgcgccaccacgcctggctaatttttgtgtttttagtagagatggggtttctccatgttggccaggctggtctcgaactcctgacctcaggtgatctgtgatctgccctcctcggcctcccaaagtgctgggattacaggtgtgaaccaccgcacccagctggaaaaagttcttgtgcctcagcctcctgagtagctgggactacaggcgtgcgccaccacgcccagctaatttttgtatttttagtagagatggggtttcatcatgttggccaggctggtcttgaactcctgacctcaggtgatcctcccgcctcagcctctcaaagtgctgggattacaggcgtgagccactgctcctagcctagttactagatttttgtatagctttagacacttccatacagtaagtgtgtgctttttgtttgtttgtttgtttgtttttgagacagtctcgctctgtcacccagactggaatgcaatggcacgatctcagctcactgcaacctctgcctcctgggttcaagcgattcttccacctcagcctcctgagttgctgggattataggtacccgccatcatgtctggctaatttttgtatttttagtagagacggggtttcaccatgttggccaggctggtcttgaactcctgacctcaggtgatctgcccgcctcggcctcccaaagtgctgggattacaggcgtgagccactgcgcctggcccgtgtgtgtgctttttcttacccactgtaaaccaagtctgctatctcaggttcacaattgcatattgtttctttattttttggagatggagtctcactctgtcacccaggctggagtgcggtgacacactctcggctaactgcaacctctgcctcctttgttcaagtgattctcctgtctcagcctcccgagtagctgggactacaggcgtgcaccaccgtgcccagctaatttttgtatttttagtagagatggggtttcaccatgttggccaggctagtctcgaactcctgaccttagatgatctgcccgcctcggcctcccaaagtgctgagaattacaggcatgagccaccgtgcctggccaattgcatattgtttctaagtggctgccttggccagacgactggtgaggaggatgcttggctgcccctgctcatgagtgagcaggtgagcctcaggtgcagagcgtgactgccaaaggagtaggcgggagtggtggtaggggtaggcctgtgaagagaaggctgtggttccatcggcttgactcagagaaaccgcaggacactggagagtgactgtactaggatggggagccctttaaggacatctgagctgacaccccaagttgaaagaggagcctcctggcctagcacagccaagcccatgaatttaacaatgctttactggacactgccaagaagcatagcaccaggagggaaacgtgtggaaaatgtggcccctgccttaaggggtcacagtctagcaggggtgagaacgtccaaattcccaccatcttagacacaatggtcacatgttctcagttcagacattgttgaagggataggggcttttttttctttcttttttttttttttttgagagggagtcttgccctgtcccccaggctagatgccatctcggctcactgcaacctctgccttcgaggttctactgattctcctgcctcagcctcctgagtagttgggattacacacgcccgccaccacgcccagctaatttttttgtatttttttagtagagatggagtttcaccatgttggtcaggctggtcacgaagggaacagaatttttaattgcatcaatttaaattcaggtgggtagccacctgtggctggtggctatcttttggggagtgcaatatgtagagaaatttaaacatcaatttactagtaggtctgtggggggcagggtgttcctaaaggaagctccaaggctttctggggactgtagccagctctggaataaccatgctgatggagggggaccttggcatggacaccacccagcaggcagataacttggcatgctttatttataggtagatgtgtgaaatctacaaggtttttttgtgttttctttgcttgccatgctcttagatgcagatctaccaggaagtttcctgagatcaggaattgtgttgtaccatgtggtaccatgaatgcctagaatagtgtctgaggtctagttgacaggtcaataaacagcagctgagtggctatgagtttcagtatgttatggggttagaattatttcccccaagggaaaagacaaagaggggctctacctttgtcttttttttttttttttcttgagacggagtctcactctgttgcccaggctggagtgcagtggcgcgatctcggctcactgcaagctccgcctcccgggttcacgccattctcctgcctcagcctcctgagtagctgggactacaggcatccgccaccacacccggctaatttttttttgtatttttattagagatggggtttcactgtgttagccaggatggtctcgatctcctgaccctgtggtcctcccaccttggcctcccaaagtgctgggattacgggcgtgagccaccgcacccggcctttttttttttttttttttaagagagtctcactctgtcacccaggctggagtgcagtgacaggatcttggctcactgcagcctctgcctccccagttcaagcaattctcctctcctcagcttcccgagtagctgggactacaggcacccaccaccacactcggctaatttttgtatttttagtagagacggggtttcactgtgtttgccaggctggtctcgaactcctgaccttaagtgatctgcccgcctcggcctcccaaagtgctggaattacaggtgtgagccactgcaccaggccgggctctgtctttggttttataatggaattaatgaaaagaaagaacctggccaggcgctgtggctcacgcctgtaatcccagcactttgggaggcccaggtgggcggatcacgaggtcaggagatggagaccattctggctaacacagtgaaaccccatctctactaaaaatacaaaaaattaggcgggcgtggcggtgtgcgcctgtagtcccagctgctggggaggctgcaggcaggagagtggcatgaacccgggaggcggagcttgcagtgagctgagatcccgccactgcactccagcctgggcgacagagtgagacttggtctcaaaaaaaaagaaaaaaaagttagctgggcgtagtggcgggtgcctgtaatcccagttacttgggaagctgaggcaggagaatcgcttgaacctgggaggcggaggttgcagtgagccgagattgtgccattgcactccagcctgagcaacaagagcaaaactccgtctcaaaaaaaaagaaaaaaaaaaaaacaaagaacctgatttacagaagccacactcagagcttgtattctggagcattccgcaaaatgatttacagtgctggctctcttgctgctgggatgtgtggaccctgggtgaagatgcagtctttgtaacccagagagcctgtgcgtggggaggcctttgtctacccactgtccaacctcacgctgtaagtgggccacttagcctggcattgccctggaattggcacctgcagctagctggctccccagttctggtcagaccagaagtggctttctcctgtgtgacccacctggcctgtgtagcctgcaccagggggtgaccccataggctgtcttgccatcccaccccttggcctctcactctcagagccctcctggggagggggatcaaggatgtgcctccccatccttggacccctgcatgggaataactggggaagtctgttacaaatatgggttttctgcatgtgaacagtacttcagcagagagtcaacaagatgaagattgaggagataatggggaaacttgaatagtcccttgataatgattttaaggaatcactgcttttttttttaaggtaggataattgttttgtagtttgcttttttaaaccagctttattgagatagatttagaatgcatacacaagaatatttgaaacgtacagtttgctgagttttgatgagtgtgcacactgagtagtggcgggcccagttgtgatgtcgaatatttccaaactcccaaaattcccctactgttggcccctggcaaaaagatctgctttcactcactcgctgtgcctcttctagaatttcgtgtcgatggaaccggatcgagctcagtgctgggcctcgctcctgtgtccccgtagccctgtattaccctgttccctgcacactgcagtttctcttcaccaggccacagagacttgggatcttgtgaatgaagttcacaaatgcagatttcaattcatttaggacagaaacgtgaagtcacttgctatttaatgatattaggaatttggatgatattttagatgagatctttgttttgtggtttttatttttatttgagacagggtctcgcttagttggccaggcaactaagtggtgcagtggtgcaatcatggttctctgcagccccaaccttctgggctcaagggattctcccacctcagcctctcgagtagctgggactacgagtgcacgcctctgtgcctggctaatgttaaaaagattttttgtagagacatgatctcactttgttgccgaggcaggtcttgaactcctgggctcaagtgatcttcccacctcggcctcccaaagtgctggaattgtgggcatgagtcaccatacccctcctttaggtttttcacaaggagcttttatctttgagaggaaatgcagacatatttacgatgtcgtactgggaaatccgggatttgctgcagaataacctggcatggggagcaggtgggagcagagaccagaggtgccctgagctgactgttttggggctgcttgatggggacataggggttcactccctcctccctctactcttgtaagcatttgatgtttaccacaatgaagaataaaaagaaaaccaggctcctgagcctccaccccagagctactgcctctaactccaggggcggggaaggtcagggaggggtaggcccaggaatctgcattttcctcggccctcctggagcttgagggccactgtcagaggagggccaggcacctgccgtgttgtgcggtgtgttggccttcctcggcttccccgcagccttccagctctcccggtgcctgtgagccaagacctctctgcccaggtggaactccgcccaggtggaactcattcttctacttgcctgagggccagcctgagtggtgcgaggtttaaggtcctggaggtgggaacccttatgagtgttgcttgtggccccacccagttcatcctctcccgcagaggggtggtggccctgtcctgtttccctgtctgtgagttcaggccgagtcatggattccttgcatcactggtcttttgtagagaacatcctgtgatccagttccggaagccgaggaggcggcttgccgggggctggtgggggaggggcggtcctaggaggagcaggagcctggtgctttctatcagggagggatcacaccggctcactgctgagccggccaggcagacacaggcttgggctctgctgggcatcatacttgtcactgggtaaacagtttgcccacttaccgcaggatgaagctgcttgccagggctctccggctctgtgagtttgggaggcaggcatcttccaggaggctggtggctggccagggatgtgtggggccccggcgagggtgctgcgctcccgtccaggtggttgggcccagggctgatctcccaccctgtggagcctgcattactggaaggtaggatgactgggaatattttgtgcccatggtgtctcacttgcgacgccgactgggcagccagggccttgggccgcataacttggaggagttttggggagggtagtagggtcgggtgttggatgagctgtgtgttttgctggattgaaagtgcccacttaagtggccaccctcagtggagacctggcatgttcttcccctagggacgagcggaacacccgggctttgttggaggaggtgacctggcaaccctgggctgtgggaatctgggcctctgcagatcaaggctcctgcaagccagcagctgtgctggctcacagctggcagctggcatccgtgccctgctttgtccctaggctggatgttgagctgtgattttagaccagaaggttggtgcagggccagagggagctgttcctgcacgattggctgatcctaacagtgcagtgttgagctgcttacagatggcttttgcatactttatttctcctaaactttacagaaactctgttgagtgggcatacatacctccccctttgtgccagctttattgggttatagttcacatgccatacaattcattcactaatgtgtacaagctagtagatttcagttttatgttcacagagctgtgggatcatgacctccatcaattttgaaaggggtggtaggaggattttttgttctcctgacatggagctccccaagcccttgggacctttgtagtcctaagagtgtctagtatgctaatgagagaactggtggctgggggccctagatatagcttcaggatgggagctggtctccagaaaggccaagggaggattagcgggttagcgctttcaaccttaccttcctataccgcagaaggtagtgccagactttacttgaattgtaggacacccacctagtgtcggagagttggagaagtggggttgaaagagacacccatgtttgttattaaaagcatgagtaaaaacagctcgcctaggaatataatttttgggtcatatggtaattttgtggttattctcttgaggaattaccagactgtttccaaagtggctgcaccatttcacattcccaccagcagtgtaaaaaggattcaatttccccatatccttgtcagcacttgttattatccatcttttgaattctagccatgctagtagatgtgcagtggtatctcactgtggctttgatctacatttccctaatgagagaagatgatactgagcatcttctcatgtgcttattgaccactgtgtatttttagagagctgtctagtcaggtctttcctgtattttccaattggtgtaattgtctttttgttgttgagtgatgagagctctttatatattctagatgcaagtcccttctcagataaaattttttaattaagaaaattttccaattcaaaaaagttgtcagcctgggcaacatagcaagatctgatctctattaaagattaaaaaattagccagatgttggctgggcgtggtggctcacacctgtaatcccagcactttgggaggccgaggcgggcggatcacgaggtcaggggatcgagaccattctagctaacacagggaaaccccatctttaccaaaaatacaaaaaattagccgagtgtggtggcgggcgcctgtagtcccagctacttgggatgctgaggcaggagaatggcttgaacccgggaggcggagcttacagtgagccaagatcgtgccactgcactccagcctgggccacggagcaagactccgtctcaaaagaaaaaaaaattagccagatgcagggtaggtggggtgtgcctgtagtctcaaccactcaggagattgaggcaggaagattgcttgaacccaggaagttgaggctgtagtgagcttattgcaccactgcaatccagcctggacaacagatcaagactcttgtctctcaaaaaaaaaaaaactgtgttaaaatacacataatatataatttaccgttaaaaaaatctgccatcaggccgggcgcggtgactcacgcctgtaatcccagaactttgggaggctgaggcggatggatcacgaggtcaggagatcgagaccatcctggctaacaaggtgaaaccccgtctctactaaaaatacaaaaaattagccaggcgtcatggtgggcgcctgtagtctcagctacttgggaggctgaggcaggagaatggcatgaacccgggaggcggagcttgcagtgagctgagattgcgccactacactccagcctgggcaacagagcaagactccgtctcaaaaaaaaaaaaaaaatctgccatcttagccgggcatggtggctcacacctgtattcccaccactttgggaggccaagctgggtggatcacctgaggtcaggagttggagaccagcctggccaacatggtgaaaccccgtctctactacaaatacgaaaaatagctgggcgtggtagcccacgcctgtagtcccagctacttgggaaactgaggcaggagaatcacttgaacctgggaggcggaggttgcagtgatccaagatcgtgacattgcactccaacctgggtgacaagagcgaaactctgtccaaaaacaaaaaaaaaacaaaaaaactgccatcttaatgatatgtgtatatgtatatggttaagatggcaggttttgttttgttttttaaattgagacagggtgttactctgtcttctggggcgcatgtggtggtgcagtctcggtcactgagcctctacctcaagtgatcctcctgcctcagccacccgagtagctgggaccacaggcatgtgctaccatacctgggtaatttttgtagtttttgtagagacaggatttcgccatgttggccaggctggtcccaaactcctgagctcaagggatctgcccatctccgtctgcctcctaaagtgctgggattacaggtgtgagtcacagcgcctggctaccatatacgtatttgtagccatattttcttgctctgtcacccactacgtctcactatgtttcccaggctcattttaatcatttttaaatgtccagctcagtttttttgttttgttttttgtttttgagacagagtctcgctctgtcgcccaggctggagtgcggtggcacaatctcggctcactgcaagctccgcctcccggattcaagcgattcttctgcctcagccccccgcgtagctgggactacaggtgcccgccaccacgcccagctaatttttgtatttttagtagagacggggtttccccatgttggctagaatggtcttgacctcgtgatccgcctgcctcggcctcccaaagtgttgggattacacgcgtgagccaccgcgcccggccaagtcttgcactttcgcccaggctggagtgcagtggcgcaatcttggctcactgcaagctccgcctcccgggttcatgccattctcctgcctcagcctcctgagtagctgggactacaggcgcccaccatcacgcccagctaattttttttttgtatttttagtagagatggggtttcaccgtgttagccaggatggtctcgatctcctgacctcatgatccacctgcctcggcctcccaaagtgctgggattacaggcgtgagccaccgcgcccggctcattcccttccttttaaagactgaatcatgttccatttcatggatggaccacattttgcttattccatcatctgtggatggacacttgggttaatcccacattttagcttgtgaataatgctgctatgaacacagcagagaccccgtttttagttctttaggatatattcccagaagtggaattgctggatcatatggcaattctattttaaatctttaaagaaacgaccatactgttttccacagcggctatgccattttacatttccaccgacagtgtacatgggttctggtttctgggcatccttgtcaatacttgttattttctgtttttttttgatagttgccatcctaatgggtgtgaagtggtgtttcattgtggttttgctttgcatttccctaatgtttagtgatgttgaatgtcttttcatgtgtttatttgtcaactgtattttttctttgtagaaatgtctactcaagttgtttgctgatttttgaatcaggttttttttaaaactgaaaattaaatatattgctaaactgtttgtatatttattcatatacttgaacatagacatgtataggtgtatatattatgtgcatgttatatacatatccttgtgtatctatataagtatccatgtatatatttttcaaattttcatcagtattctgaaactgaagactatagcttttggtgtttgagaaagtccgtgtccatttttgcttctattgtttttgacacataataattgtacatatttatgggtatagtgtggtattttgatacatgaatgcaatgtgtatggttggtttttttattgttgcgttttaggagttctctatatattctggacactaatccctcatcagatatatgatttgcaaataatttctcccattctgtgggatgtgtttatactctgttgatattgtctgttgatgcacacattttaaagttcttatgacatacaatttgtctgttttcttttgttccttgtgcctttgatgtcatagccaagaaatcatcaccaaatccaatgttgtaaagctttagccttatgttttcttctaagagttttatagttttaggttttacttttcggcttatgatccattttgagtttttttttttttttgtatatgctattaggtaaaggtgcaactcattcttttgtgtgtaaatatccagttccttagcaccatttgttgaaaagattgtctttccccattgagaggtcgtcttcttgttttttttttttttttgagacggtcttgctctgttgcccaggctggagtgcagtggcgtgatctcagctcattacaaccttcgcctcctgggttcaagcctcagcctcctgagtagctgggattacaggcacatgccaccatgcctggctaatttttgtatttttagtagagacggggggtttcaccatgtcggtcaggctggtcttgaactcctgacctcgtgatcctcccacctcagcctcccaacatgctgggattacaggggcgagccaccacacccggccgaaaggtgtttatacccttgtcacatagatcatttgaccatatatatcatttgagtttatttctgggctctctgttctattgattcttatatctgtctttatgctaatgccatactgttttgattattgtagctttgtggtaagttttgaaatcagaaagtgtgaatcttccagctttgttctttttcatgattgtttggctatttccgatgtgatttgcaaatatttttttccactcactgggttgtctttttactttttctttgctgtgatgcccaggctagagtgcagtggcatgatctcagttcactgcaacctccgcctcctgggttcaagtgattcccctgcctcaacttcccaaggagctaggactacaggtgtgcaccaccacacctggctaatttttgtattttttttccagcagagacagagtttcaacacgttggccaggctagtcttgaactcctgacctcaagtgatatgcccacctcagtctctcaaattgctgggattataggccaccacacctggcctattttctttaaagagttttataggatagatgctgtggctcacatctgtaatcccagcactttgggaggtcgaagtgggaagactgcttgagctcaggagttcaagaccagcctgagcaacataggaagaccccatctctacaaattaaaaaagttagccaggtgtggtggtgcatgcctgtagtaccagctacttgggaggctgaggtgagaggattgcttgagcctgggaagtcaaggctgcagtgaagtgagttagagaccacagcactgcactggggcctgggtgacggagtgagaccctgtctcaaaaaaaaaaagttacatagctttagctcttaccatttaggtgtttgacctatcttgagttaattgttatgtgtgatgtgcggtaggggtccagctccatttgcacgtgtggacacacctctttataggctggggagcaggcattagaggtggagctacttgcttgccgtcacagctggcaagtggaggccaaagacagccgctgcatcctttctttgaactcttatacctgagggtcatttatctctgacctggaggacagaaacagaaagcccttgagcaggctgagcgcagtggctcacgcctgtaatcccagctctttgggagaccgaggtgggcggatcatgaagtcaggagatcgggaccatcctggctaacacggtgaaacccctctctactaaaaatacaaaatattagccaggcgtgatggcgggcgcctgtagtcccagctacttgggaggctgaggcaggagaatggtgtgaacccgggaggcggagcttgcagtgagccgagattgcgccactgcactccagcctgggcaacagagcaagactccgtctcaaagaaaaaaaaaagtccttgagcaataataaaactaggactctagggacattacttctcaggggcaggccacgccgtgcacctgtccacatctgtttccctccccttgctgaacaccagcccctgccctcgccagcctttctgtcctccttccctcctcctccccctaaatgttcatctgtggcttttgcctgtcccatggcacatgataggctctcgctgtctgggcctccctgggggtaggtccccacaggagaccttaccagggccatgccagacagctcagatgtctctgtgccctgccttgaatcctttggcctcagggctggaggttcagctatggcaggtcaggggctggcagctgagctgtgtgaggctgggagcttctctgagccttgggagagtaaaggaaaccaagtccctgattcaggagggccagagcattcctcttgctggctgtgtgcccatgagcccgggactgggagaaggcccaacggtacctgcccccatgggacttgttggctgggacctgggaaggcccgtggtctgtgtgctttgctgtaaaatgtatcactgggggactggaccatctgccgcagtctggcgctatcgaggagcaccccggccaccagcagagggcatgctgatcatagacactgcccctccctccctcccctcccgacaatctccaggccaccagttccagtcttaccttgagccactacctctcgggcacccagggctgctctggtggaattaatttgaacagtggtggcattgtagcgagtggatgctttggccttgtaactggtgccgttgtttgtttgtttgtttgtttgtttgttttgacgagtcttgctctgtcgcccaggctggagtgcagtggtgcgatctgggctcactgcaagctccacctcccaggttcacgccattcacctgcctcagcctcccgagtagctgggactacaggcgcctgccaccacacctggctaattttttgtatttttagtagagacggggtttcaccattttagccaggattgtcttgatctcctgaccttgtgatccgtccgcctaggcttaccaaagtgctgggattacaggcgtgagccaccgcacctggccattgtttacagtaagtgccaaactttgatgtttgtgtgtttctttgctgttttgttgctgtgttcactcaggtgtcgcttgtatttagaactcagcttttacaatggaattgcttttgatactacactttggtgtctcaggaaactacatcctgcatgattgatactctgtgcttcctttaatgacaggcaaatctcaccttgtcttgtaccttataaaagccaggctcttagaagtggtgacactcataaaccagcctgaagttgctgaattgacccatgttatctgacacctattaagattctactaagattcttaattcacccatatccagcttgaatttttacttgattttgcatttaattgcttccatgtacctactaagtttttacataatgtatttttttattatttaaatagagatggagtctcgctatgttgtccaggctggtctcgaactcttgggctcaagtgatcttcccgcctcagcctcccaaagtgctaggattataagcgtgagctaccacacttggcctttacatgtatttttttaatgtctttaatggaatataggattgatttaattgaagagtacatttagctttgtacaaaactgccaaactgtcttccaaagtggctgtgccattttgcattctcaccaacagtgaatgagggctcctgtgctccacatcctcaccagcatttgatgttgtcagtactttgggtttaggccattctgacaggcatgtagtggtgtctcagtgttgttttaatttgcagtttccaaatgacataaggtgttgagcatcttttcatgtgcgtatttgctgtctgtatatcctcttatatcaggcatctgttcgggtctttggccctctgccgccaccctcccaccttattattatttatttttattttttattttttagacagagtctcactctgtcgccatgttcgctctgcctcccaggttcacgccattctcctgcctcagcctcccgagtagctgggactacaggtgcccaccaccacgcccagctaatttttttttttttttttttgggatggagttttactcttgttgcccaggctggagtgcaatagtgccatctcggctcactgcaacctccgcctcccaggttcaagctattctcctgcctcagcctcccaagtagctgggattataggcacatggcaccacgccatgctaatttttgtattttttgtagagatgggattttgccatgttggctaggctggtctcgatctcctgacctcgtgatccacccgcctcagcctcccaaagtgctgggattacatgcatgagccaccgcgcctggcccctcccaccttatttttaaagagtcttgctctgtcaccgaggctggaaagcggtggtacaatcacggctcactgtagcttcaacctcctgggctcaggtgatcttcctacctcagcctccctagtagccttgactacaggtgcaccctactgtgcctggctaatttttttgttggtttgtttttgttttagaccaagtttcttgctgtttttcctcaggctggagtgcactggcgccatctcagctcactgcaacctcctgactcccaggttcaagtgattctcctgcctcagcctcctgagtacctgggattaaaggcgcctgccaccacgcatggctaatttttgtacttttaatagagacagggtttcaccatgttggccaggctggtctcgaacttctgaactcaagtgatccgcctgccttggcctcccaaaatgctgggattacaggcgtgagccactgcgcccagcacctggctaatttaaaaaaattttttttttttttttgaggtggagtctcgctctgttgcccatgctggagtgcagtggcacaatctcggctcactgcaagctccacctcccgggttcatgccattcttctgtctcggcctcccgagcagctgggactacaggtgcccgccaccacgcccggctaattttttttgtatttttagtagagacggggtttcaccgtgttaaccaggatggtcttgatctcctgacctcgtgatccacccgccttggcctcccaaagtgctgggattacaggcgtgagccactgcgcccggcctaaaaagtttttttgtagagacagggtctccctatgttgcccaagctgatcttgaactcctgggttcaagcgatccttctggcttagcctcccaaagggctggaattaatctccaagcagggattgcaggcatgtgccaccacacccagctaatttttggggtttctctacgttggccagactggtctctaactcctggcctcaagtgatccgcccgcgtctacctcccaaagtgctgggattataggcatgagtcaccgcgcctggcctcttattgttgagttttaagatttctttgtatattttagatacaagttgtttatcggatatatgttttgtaaacattttcctcagtctgtggcttgtctccattatctttttttttttttttttgagaggagtctcgctctgtcgcccaggctggagtgcagtggcgcgatcttggctcactgcaagctccgcctcctgggttcccgccattctcctgcctcagcctcctacaggcgcccgccaccacgcccggctaattttttgtatttttagtagagacggggcttcacagtgttagccaggatggtctctatctcctgatcttgtgatccgcccgcctcggcctcccaaagtgctgggattacaggtgtgagccaccgcgcccggcctgtctccattatcttaacagtgtctttctcagagctgaaatctttaaatcaataaagtgggaacttcagccatgtaactgatcaggatgaacaggggaagccatcgttttcagcagatgccaaacttggtttttctcctctgactcttgacgtggttgttcccttcaactggccgagacctaggggctcactgatgccggggtttgtcctaggttagacggggagtctgtggaatagtgtagggtgtcccagccacggagaactctcagcttggcagtttaccctccatttacaggtgaagacactgaggccctccaggcgcagtgacctaggggtgtgtggcaggtggggcagggaccccagtagagtgcagacctcacctccttggccatttccacctgcccctcatccaccatgtggcctgcaggtggtgcgtggcaggttgtggtgcttgatctccaggatgttgggcaaggcagagtccttggcccccacgctgtggagctcagcttctccccacaggccccaagcctgtgtgttcagggcatcctccttgacatttggagagtgagactcagggtggccgtactgacccactggccccatactctggaagtacttagggcctgctggtctgcccactgagggacatgccttcagtccccatgggcctgtgggagggctttaaccagtgcctggctgggcagggctcttagtcttagtgactccctaactggagctcccagggccatttggccacctccctcccgcctctgtttgggctgagggacgtgggcgcagctgccagcatggggaccaggcctctgtcctcaggtgacttcatcgcacctgctgccaccttcccttgcagaaattggcagaattccaggaaacttgcccagagtaagtgcctcaagtagaaacaagcccaatgcatttgccatggatatttaattctctaaaaggcagaggtgggaggtgaaagagatacttatttaaacagagttatacaggaataatttctataactgcacatatggaaagtattcagtttgatcagttttgacctaggtacagacagacttcctttcattgcactttgcaggtcctgcatttttttttttttttttaagatggagtttagcttttgttgcccaggctggagtgcaatggcacgatctcggctcactgcaacctctccctcctggattcaagcgattctcctgcctcagcctcctgaagggctgggattacaggcgcctgccactgtgcccagctaatttttgtatttttagtagagacggggtttcaccatgttggtcaggctggtctcaaactcctggcctcaggtgatccacccaccttggcctctcaaagtgctgggattataggcgtgagccactgctcccagccaggtcctgccttctttacaaattgaaagtttggggcaggcgtggtggctcaggcctgtaatctcagcactttgggaggccgaggcaggcggatcacctgaggtcaggagttcgagaccagcctggccaacatggcgaaaccccatctctactaaaaatataaaaaattagctgggtgtggtggcatgtgccgtagtcacagctacatgggaagctgaggcaggagaatcacttgaacctgggaggcagaggttgcagtgagctgggatcatgccactacactctagcctgggcaacagagcgagactccttctcaaaaaaaaaaaagtttgtggcaaccctgcattgagcaagtctattggcaccatttttcggccagcctgtgctcatgtagtgtgtctatatcatattttggtaattcttgcaatatttcaaactttttcgttatcatttttgttatggtgatctatgaccagtaatttttggtgttactagtgtaattgttttgagacatcacgaaccacgtccatgtaagacagcaaatgaaattgataaatgttgtatgtgttctgactgccccactgaccggctatttccccatctctctcccttttcgtgagctccctcattccctgagacacaacaattttgaaattagaccaattaataccctacctctagtgttccagtgaaggagagagtcacacatctctcactttaagccaaaagccggaggccaggcacggtggcacatgcctataattccagcactttgggaggctgaggcggttggatcacttgaggccaggagttcgagaccagcctggccaacatagtgaaacgccatctctactaaaaatacaaaaaactagccaggtgtgttgacatacgcctgtagtctcagctactcagaggatgaggcagaagaacctcttgaacccagaggtggaggttgcagtgagtcaagatcgtgccactgcactccaacctgggcgacagagcgagactctcaaaaaaaaaaaaaaaaaagccaaaagttagacatgattaaacttaggaaggcatgttgaaagctgagataggctgaaagctaggcctcgtgtgccaaacagttagccaagttgtgaatgcaaaggaaaagtccttcgaaggaaattacaagtgctgctccagtgaacacatgaatgataagaaagcaaaacagccttcttgctgataacggagaagaagaattttagtgatttggagagaagatgaaatcagccacaacattcccttaagccaaagcctaatccagagcaaggccgtaactctcttcaattctatgaaggctgagagaggtgaggaagctgcagaggaaaagcgtgaagctaacagaggttggttcatgaggttgaaggaaagaagccacctccataacatgaaagtacaaggtagagcagcaggtgctgctggagaagctgcagcaggttatccgaatctggctgagatcaccggtgagggtggctacacaataggttttttcttttttttttttttgacacagagttttgctctgtcgcccagggtggagtgcagtggtgcaatctcggctcactgcaacctccacctctcaggttcaagagattcttctgccacagcctcccgagtagctgggtctacaggtgcacgttaccacacctggctaatttttttatttttagaagagacaggatttcactatgttggccaggctggtctcgaactcctgacctcaaatgatctgcctgtctcagcctcccaaaatgctgagattacaggcgtgagcccctatgccctgcctaggttttcagtgtgggtgaaacagctttctgttgaaagaagataacatctaggactttcatagctagggaggaaaagtcaatgcctggcttccaaggacaggctaggtctggtgactcacgctgtaatcccagcactttgggaggctgaggcgggtggatcacttgaggtcaggagtttgagaccagcctggccaacatggcaaaaccctgtctctactaaaaatacaaaaattagctgagtgtggtggcacttgcctgtagtcccagctactcaggaggctgaggcaggagaatcgcttgagcccaggaagtagaggttgcagtgagccaagattgcacctgccacagcactccagcctgggtgacagagtgagattctgtctcaaaaaaaaaaaaaaggacaggctgactctcttgttaggggcttatacagctggtgactttaagttgaagccaatgctcatttactattctgaaaatcctagggcccttatgaattatgctaaatttactctgcctgtgttctataaatggaacaacaaatcctggatgtcagcacatctgtttatagcatagttttctgaatatttttaagcctgccgttgagacctactgctcagaaaaaagatttctttcaaaataatactgatcaggccgggtgcggtggctcacgcctgtaatcccagcactttgggaggctgaggcaagtggatcacgaggtcaggagttcaagaccagcctggccaagatggcgaaaccctgtctctactaaaaatataaaaattagccaggcgcagtggcaggcgcctataatcccagctactcaggaggctgaggtaggagaatcacttgaactcaggtggcagaggttgcagtgagccgagatcgcaccactgcactccagcctgggcaatagagtgagactctgtctcaaaagaaaaaaaaaaatcaaaataatactaatcattggctgtgcgtggtgactcatgcctgtaatcccagcactgtgggaggccaaggtggttggattacctgaggtcaggagctcgagaccagcctggccaacatggtgaaaccccatctctactaaaaaatatacaaaaattagttgggcatggtggtgcatgcctgtaatcccagctacttgggaggctgaggcaggagaatcacttgaaccagggaggcggaggctgcagtgagctgagatcgcaccactgcactccaggccaggtgacagaacgagactccatttcaaataataataataataataataataataataataataataataataatactaacactgctcattgacaatagacctgataaaccaagagctctgatggagatgcacaaggagattaattttgttttcgtgcctgctggctttagtccatttgtgtggctgtaaaggaatgcccgaagctgggtaatttatgaaggaaagagctttatttggctcatggttctgcaagctgtacaggaagcatggcaccagcatcttcttctggcgagggactcaggccacttctacttacagcagaaggggaagggaagctggtgtgtgcaggtcacatggccagagaagtgagagagaagggaggtgccaggctccttttaactattagttctcccagaggctaataaagtgagaactcactcatgaccacgaggatggcaccatgcccttccagagggatccatcctgtgacccaaacacttcctattaggtcctgcctccaacattgggattgaatttcaacatgaggttagggatcctcatatccaaaccatagtggataatagcacctattaactcaacatccattctgcaacctatggatcaaggagtaatcttgactttcaagttgtattgtttaagaaatgcattttgggcctgtaatcctaacactttgggaggctgaggcaggtggattgcctttgttcaggagtttgagactagcctgggcaacatgttgaaatcctgtctctacaaaaaatacaaaaaattagccgggcgtggtggtgggcgcctgtagtccaagatacttgggaggctgaggcaggagaatggcatgaacctggaaggcggagcttgcagtgagctgagatcgtgccactgcactccagcctgggcgatacagcgagactccatctccaaaaaaaaagaaaaaaaagaaattagctggacatggcaacatgtgcatgtagtcccagctactcaggaggctgaggcaggagaattgcttgaacccaggaggtggaggttgcagtgagctgagattgtgccattgcactccagcctgggcgacagagtgagcctccttctctacaaaaaaaaaaaaaaaaaaaaaaagaaatgcattttgtggggctctggctgccatagtggttcttctgatctgggcaatgtaaattgaaaaatttacattggaaagcattcactattctagaagccattaagaatatttatagaccaggcgaggtggctcacgcctgtaatcccaacactttgggaggtcaaagtgggtggatcacctgaggtcaggtgttcgagaccagcctggccaacatggtgaaacctcgtctctactaatacaaaacgtagctagatgtggtggcatgtgtgtgtaatcccagctactcaggaggctgagtcacaagaattgctttaacctaggaagtggagaggttgcagtgagccaagattgtgccattgcactccagcctgggcaacagagcaaaaaagaaaaaaaaagaaagtggtttcttaagatggaatgtagtcttggggaagatgccatgaacattgctgaaatgacaagaaagtaatggcaatggtgggccatctggagcaacccctgccctcacgccaggtgcagtggggtggtgcaagcagtggtggcaggagcagctgtgggagcagcagtggcagcagcagtggcagcagtgggtcccctgtgccctgcattccccgggcagctgactgcaccgcccccatccttgcacagccaggcaggacctgctcccaggcctggagccttgccgctccagaccctggctcagtgtcagagctcttacccgctctcactgtggggaggggtgtgcagaggaaatagtcagtccctggagtctacccctgggagtctcccagagcccactgccctgggagccaccacaacggggccaggctgagttgcctgctggtggggaagcagcatgattgggcatggaggtgcgggcagagaggggccccaaggtggagctgggcctggggtgatgctgcacctgcatatggagtgtgggggctgggcctgggatgcagagcttgggttatgcttcagggccctggggcgggaagtgggagcggcattcactttggggacctggactgcggtgcagccaccgcacccaccctgctgatggtgcccttcagactttgggcaccaacaggcatgggagggaggccaagtgggggctgaggataggctggcacaaacagcctggatgccatgaacagtggcgagagacagacaggctcctgggtagaaggggtctggtccccagtgaagcctcaccttcaaactggggagggcctgaagcctgggggttggctggccagtcccgaggaccagaggggaagcttgtggtgctttttgctggcccacccatggaccagtcaacacacacttcctccactctgaggcccataaaaaccccggactcagccagactagagcagaggacagaaagatgacaggatgaccagctgcaaagaagagctaccctctctgctgagagctgaacactcactgggatgacctggctgtgactcaataaagctcctctttgtcttgctcactctccatttttctgcgtacctcattcttcctggtcacagggcaagaactcgggacctgccaaatggtgaggctgaaagaactgtaacacaaacagggctgaaacatgccccttcttgccacgttgccagtgaagggaaggaaagaagagctgtggccctttggggagtccagacctgggagctccctgagtcagggttgtgactccctctttggggccctgcagttcctggcgtcaccaagcttccaggcaccacagcattcccgtgtgccaaccaggcaagctgcttgaggtgcgcttggtccaggtgcagccttgcagagaaccagcacctgtgccagcatctggagctgcctgccctgcagcagcagctggcatgtctgactgtgcagtggccgtactccatgctcactcacacactgctcgctgctccacaccaggcttgtccttggcaggcatgggagctccaggctggtagcatgagccaagcgcagcctgccaggctgagtgggtggaataagcccagtgggccccagcaaaacttaggcaaaggtgccacaagacacagaggtttctggccagaaaagggataccccaaagatcccataacaaaaggatttagaatattccataaacttagttgataaaacaacataggttttaagaggactgactccacttttttttttttttttgaaatggagtctcgctctgtcgcccaggctggagtgcagtggtgcgatctcagctcactgcaagctctgccttctgggttcacgcaattctcttgcctcagcctcccgagtagctgggactacaggtgcctgccaccatgcccagctaatttttttatatttttagtagagaaggggtttcaccatgttagccatcatggtctccatctcctgacctcgtgatccgcctgcctcggcctcccaaagtgctgggattacaggcatgagccaccgcgcccggcctgactccacttttgaaagttctactgggctggtctaggagatcgagaccatcttggctgacatgttctccccatctctactaaaatacaaaaaattagcctggtgtggtggtgcacacctgtagtcccagctactcaggaggctgagccaggggaatcacttgaactcgggagacggaggttgcagtgagccgagatcatgccactgtactccagcctggctgacagagtgagactctgtctcaaaaaaaaaaaaaagtaagttctactgtgggtaaaatgctatcaaacattgcatgctacagagaaatctttttttttttttttatttgagataggctcccactctgtcacccgggctggagtgcagtggtgcaatcacagctcactgcagctttgacctcttgagctgaagggatcctcccacccttagcctctcaagtaactgggaccacaggcaagtgccaccatgagtagctaattttttaatttttatttttagagacagcatctccttatattgcccaggctggtctggaactcctgggcacaagcgattctcccacctcggggtcccaaagtgctgggattacagacatgagccaccgtgcctggcccagagaaatattttgtggaaagaagggtcaattgatgtggtcaatgtcattgttgtcttattttaaggaactgccacagccatcccagccttcagcagtcgccatcctaatcagtctgcaggccgggcggtaatcccagcactttgggaggctgaggtgggcggatcacctgaggtcaggagttcaagaccagcatggccaacatagtgagaccctgtctctactaaaaatacaaaaaattagctgggcgtggtgacgcgtgcctgtaatcctagctacttgggaggctgaggtaggagaaccacttgaacccgggaggcagaggttgcagtgagccaagatcgtgccactgcattccagcctgggctatagaatgagactgtctcaaaaaaaaaaaataaaccccaaaacaatatgaatcagtctgcagccatcaacatcgaggcaagactctgccagcaaaaagaataccactcactgaaggctcagatgattgttagcattttttagcaataaattttttttttttttttgagatggggtcttgctctgttgcccaggctggagtgcagtggtgcgatctcggctcactgcaagctccgcctcccgggtttacgccattcttctgcctcagcctcccgagtagctgggactacaggcgcccactaccatgccgggctaattttttgttttttagtagagatggggtttcaccgtgttagccaggatggtctcgatctcctgaccttgtgatccacccaccttggcctcccaaagtgctgggattacaggtgtgagccaccatgcccgattgcaataaagtgtttttaaatgaaggtatatacttttttttaaggcataatgctattatacacttaatagactacagtgtaacttttacgtgcactgggaaaccaaaaaaatcatgtgacttattataaagtgcaatgtgtgctttgttgcggtgatctggaaccaaacccgtaatatctctgaggtatgcctgtgtgagcctgtgaagccttcaccacaatcaagaccgagactgtgaacagacctgtcaccctgctgaggccctctgcttctctggtccctccctgcccccaggcaacctctgatctgctttctgtcactatagtttgtgtttcctccaagtttataaacatggacttgcacagttctctttttgtccagcctcccttgctcagcacgattacttggagattcatccacatggttgcatgtatcagttattcattcctttcctttttttttttgagacggagtctcactcttgttgctcaggctggagtgcagtggggcgatctcagctcactgcaacctctgcctcccgggtttaagcgattctgcttcctcagcctcctgagtacctgggattacaggctcccaccaccatgcctggctaatttttttttttttttttttttttttttgagatggagtctcgctctgtccccaggccggagtgcagtggcgtgatcttggctcactgcaacctccgcctcccgggttcaagtgattctcctgcctcagcctcccgagtagctgggactacaggtgagcgcaaccacgcccaactaatttttgtatttttagtagggatgaggtttcaccatgttggccaggatagtctcgatttcttgacctcgtgatctgcccacctcggcctcccaaagtgctgggattacaggcgtgagccactgcgccaggccaaatgctgggcttttttttttttttgagacagagtctcttgctctgtcaccctggctggagtgcaatggcatgatcttggctcactgcaacttctgcctcccggcttcaagggattctcctgcctcagcctcccgagtagctgggattacatgcatgcaccatcacgcccagctaattttgtatttttagtagagatggggtttttccatgttggtcaggctggtcttgaacgcccgacctcaggtgatccacctgccttggcctcccaaagtgctgggattacaggtgtgagccaccacacctcgccgataattgcttttagatgttacttttgtattttcctaatgtctaatgatgttgaatatcttttctttttttctagaggtggagtctcgtcttgttgcccaggccggcctggaattcctgggctcaagtgatcctcctgcctcagcctcccaaagtggtgggattacaggtgtgagtcactgcatctagccttttttgagacaaggtctcgctctgtcatccaggctggaattcaatcttggcccactgcagccttgacctcccagctcaagtgatcctaccacctcagccccctgagtagctgggaccacaggtgcagctgggaccccctgagtagctgggaccacagaaaacccacagggtcggtggcttttctccccatgtggggagatgagagattgtagaaataaagacacaagacaaagagataaaagacagctgggcccgggggacaactaccaccaagatgcagagaccggtagtgtccccgaatgcctggctgtgctgttatttattggatacaaggcaaaaggggaggggtaaagagtgtgaatcatctccaatgataggtaaggtcacgtgggtcacatgtgcactggacagggggcccttccctgcctggcagccaaggcagagagagagggagagagagagagacagcttacgccattatttctgcatatcagggacttttagtactttcactaatttgctactgttatctaaaaggcagagccaggtgtgcaggatggaacatgaaagtggactaggagcgtgaccactgaagcacagcatcacagggagacaggcctccggataactgcgggcaggcctgactgatgtcaggccctccacaagaggtggaggagtagtcttctctaaactccccgggggaaagggagactccctttcctggtctgctaagtggcgggtgtttttctttggcactgacgctactgctggaaccacggtctgcctggcaacgggcgtcttcccagacgctggcgttaccgctagaccaaggagccctctggtggccctgtccgggcataacagaaggctcgcacttgtcttctggtcacttctcaccatgtcccctcagctcccatctctgtatagcctggtttttcctaggttatgattatagagcgaggattattataatattggaataaagagtaattgctacaaattaatgattaatgatattcatatataatcacgtctatgatctagatctagtataattcttactgttttatatattttattatactggaaaagctcatgcccttggtctcttgcctcggcacctggatggcttgccacccgcagtgctcaccaccatgctcggctaatttttttggatttttggtagagatggggtctcaccatgttgcctagaagagtctccagctcctgagctctagccatctgcccacctcagcctcccaaagtgctgggattacaggcgtgcacgaccgcgcctagccaaaggtcatttgtttttttcacattgagctctgagagatctttctggagcctggatgtaagtttctgaccctaccagcttcctctagcatgaggcagtgagtttcggttggggagagggatgtggcctcccattctagggcatgtcgttgcggagttctccttgaattctctcttccgagtgccctctgatgagctgggctcagtgtgcttttgagttctaggtgcctgtctcatttcctaccttctttctatatgcttggctgcctgggtaggtatgggagggatgggggaagaggtgctgccatctcttgacttttttttttcttttttttttttgagacggagtttcactctgtcacacaggctggagtgcaatggcacaatcttggcccactgcaacctctgcctcctgggttcaagcgattctcttgccttagcctcccaagtagctggcattacaggcgcccaccaccatgcccggctaatttttgtagttttagtagagacagagttttgccatgttggccaggctggtctcagactcctgacctcaggtgatccgcccgccttggcctcccaaagtgctgggattacaggcgtgagccaccatgcccagcccacctcttgactttttagcttccagatgcctttgaaagctgcagaaaactgggtcttttccccagaaaagtagaaaccagacacaacctcgagcatgtttttagggatgctcacagcctactgagccagttctactttgttttgggttagagatggatgccacatctgcagatctctgccaagctgtgtgtgtttttctttagattttgggagtgcctttctgtggcaaaggtaagagcgtttcgagggctcctgccatgtgtcacccacatggccagtgcttatgtagggaggggccacagcttctggcatccagttgttagtagtttatttatttatttatttttacagagtcccgctctgttgcccaggctggaatgcagtaacgcagtgacgtgatcttggctcactgcaacctccgcctcctgggttcaggtgattctcctgcctcaccttccctggtagctgggattgcaggagcacaccaccatgcctggttaactttcttttcactagtggtggggttccaccgtgttggccaggctggtgtcaaaactcctcacctcagatgatccgcctgcctcggcctcccaaggggctgggattacaggcgtgaactactccaccctgccttgtttgtagtttataacagctttcctgagctataactctattgagtctaccctttttgattgtacaattctgcgtgaaccttaatggattcacaaggctgtgcagccaccagcacgatttaattccagaacattttcatcacccccggaattaacctgcacgcattagcagtcactcccatttcccctcctccagcccctgccccccaccagctgactttctgtttctgtagatctgcctgttgtggacatttaatatacatggaatcagatggcgtgtgaccttttgtgattgacttctttcacccagggtggtttcaaggctggtccgtgcattactgtggatctgtaggtcttcattttttatggtcagataatatctcattgtatggatttatcgtattttgtttacctacccatccgtggtggacaccgggttgtttccatccttgggtggttgtgaataatgctgctatgaacatttctagacatctcg

SEQ ID NO: 621 - DNA, 32742 bp, Homo sapiens
  source 1..32742: mol_type = other DNA
gcgactgcgcgcatgcgctgcagggccctgcgcggcttccgtcctggctgagatggcggcgcccgggatcctgtgtagcggctgcagagggtgccgccgccctaggcgaagtagggccgtcctgagcgaaagaaccgcccccagcaggagcaccaccacggcttagcaaagaatcccagaccccgcccgggaaggcagccgcaccatggagtcttccagttcatctaactcttatttctccgttggcccaaccagtcccagcgctgtcgtgctcctctactcggtaggcgcccagggaaaagaggcccagagcggagccgcgcgaaatagtacccctttctcccagtccctattcctccggcccaccacccttgcccaaaagagctggcccctaggctcccgaggaggggttagttggttggattggtttccaggacaacagtgtatcgctgtgtgtctgtgtgtgcatgcttttggaagtttctacggattatggttcctttggttcctttccactttttccttctctttctttctatcaggccctggggccttcagaaagctcctggacacgagaatgaggaatgagaattggagtctccccatctctagcgagggcatgtcgagctaccttttgggcaaacctgagaaacttgcgggtttgacccgccctgagatagcctgtggctccgcaccccgccctatgctgctgttatattcctgggagtagagcacttggcttgtatgtgggaatagagttttaaacacttcaggaaaatttagaacttctagacatttttattgcctgttcttgtcttccagtcattattgtaccttttccacaaatcattttggaggacagccagcgccacccagcttctctcccgcttgtctttttttcctccaaccccctcttcctctcttggttttaacgggtctttttggctggcagatgttggtcacccacgattttcatgaagaaattatgagatgggagctttatagccttcaggattgcacagacctggggcaactggtttggtttttgtttgtttcttgttgtttttaaccactaaattagtttttagctactttaggagaaaatgaaagaattcattttaaaagcatattagcatatcctggtgattactgtccaattttggcttaaatgtagtgttcatttgtgcagaaaggtcaaaacagggataacacagcagagcaagataaacaccccagttttgaaagagaatatatgggttccttcaaattgagacaccaatattctttggaacatggagaaacttctgttccctctctatcaagacctttcggtttctgattgctaactgcctataagccttattatttagatatatctcttcattgatcttatcttccccacagttctgtggtggatatcaactttgttttctgactctgctactccagagcaggcacgaagggaagagggttgctgtgcagatccagcttttaacatgtagctttttaagctcccaactggtttgtgaattggttggaattttccttttgtacattaaaggaaggagttggttttgtttgtttgtttgtttgttttacttcccctttaccaacggttctttaataagacttgagtccactttttcatgtgaaaaactatggcagttgtatctgagcattctgtagttctgatgctggacagcaacccactctttactggtagttctcactactgttttgtgactggataacctttacttccacggtaaccttactttttcttagtacttcaggctgtttttatttccccagctacgctgttattgtgtaatattctgatctaaaagtagcactttagaagcgtagaagatactgctgattgcagcaaacattaggaatatatacagtatcctactcattattctcagtttccaagatatagaagttacagatgcaggctctgcctttaagggcacaaaaagtcataaaagtaaacaaacaatcacagttaagtatggtaagggcaatgattgaagcatgcacagcgtgttgtgggagagacaagaaggggcacctgaccagtttgggaacttggagaaggtttctaagaaaaggtgatatctaagctgatcttccttttttgtttttgtttttgtttttgttttgttttggagacagccttgctctgttgccaggctggagaacagtggctcgatcttggttcactgcaacctccatctccggggctcaagcgattctcctgcctcagcctcccgagtagctgggattttaggcacacgccaccccgccctgctaatgtttgtatttttagtaaagacaaggtctcaccgtgttggccaggccggtcttgaactcctgacctcaagtgatctactcacctcccaaagtgctggaattacaggcatgagccactgtgcctggcatgagctgagtttttgagctgtgaatggcagatgagggagaggaaaactgtcctagatgttgatgtaaaaaaaactactcccttgcatatttggggttagaattagttagatttgggtggaagaaaggagacatgagaaacaaagtaaggaagtaggcagatatttcctaaagaaattttatgtgtcgtgtttacatatccttagggataaaatcttaactttatgggagattttaatcttacatctatgtgtgtgtgtgtgtatacacatatatatataaatatatgtgtgtatatgtattttttttttgacatggtgtctcactctgtcacccaggctggagtgtaatggcacaatcttggctcactgcaacctccacctccagggttcaagagattctcctgtctcagcatcccaagtagctgggattacagttgcctgccaccacacccggctaatttttgtatttttagtagagtcggggtttcaccatgtcggccaggctggtgtcgaactcccggtctcaagtgatccacctgccttggccttccaaagtacatttatatttttgaaagtctgagaagactataggtttctggtgtgattatctgtataggtaacctgttttgcctaagtagagactgtaggaagagaatcaggttgggtagggaatctgatgcataaaagtggagatcagttagaatgctattgcagtaatccagagaagtaatgaagcagtaacagtgagcccaggaagaagggaaattgatgaatttatgtgatatttaggacagtaaatcatcatcctttggaaccatttgaatgtggtggctaaggaaaatagcatagtctgaagttcactgttgggtttctatgatttggcaactgggcagatgatgatgcctttcattgataagaaatatggggagaggagcaggtttggtcagggtaatagaattcagtttggggtgtgttcagtttgtgatgtaagagagaaatataatgatttttaacttgtggattatcatgttatgagccagatacattccatagtgtttggaagagatccaagtagggttagaaatatggtgccagagcaagagagggggtctggcctaaatgtatagatttttcagcatgtaggttgtatctatagcattcggtgagcctgaaatcattcagtgagaccctagaatgaaaagaagactgaggatgggtaaccactggtgtgccataatccagatgatgacttcctgttaaagtccaagtgaaagatgcagatgccttactacagtgtcccacaagactgtacatgatctcttaactgctattgctctgactttactaatcttcttgttcactgggctttagccaccctggccttctgtttctcagacagtaaaatgctcttccctcgaatgctcatagtcccttctgtgtggcatgctatgttttctcagaagttttattgctggctctttgtattattgaggtcccaactcaaatatcacttcctcagagaggccttccacaaccattgaatctaaaacagctatccaatcactattcctcattttcctcattagttgcctaattttctttttttgttgttgttaatttttggctttttaattaattatttttagagccaggatcttgctctgtcacctagagtggagtgcagtggcatagtcatagctcactgtgacctccaactcttgagctcaagtgatcctccctcctcagcctcccagtagctaggactgtaggcgcataccaccacgcctgactggtttttttttttattttgtgtagagacagggcctcactatgttgccaacctggtctcaaacttctggtctcaaacgattgatcctcttgccttggcctcccagatcactgggattacagagtgagccaccatgccctgaccgcagctttattttccttatattctctttccagtggtgtgctacagcagtcttctattggcttgcaagagctgattgttaaattttcatgaagtttgtgagcccattcttaaaacacagccattattaaaaattaaatagccgggcgctgtggcttacgcctgtaatcccagcactttgggaggccaaagcaggcggatcacctgaggtcgggagctcgcgaccagcctgaccaacatcgagaaaccccgtctctactaaaaacacaaaattagctgggcatggtggcacatgcctgtaatcccagctactcgggaggctgaggcaggagaatcgcttgaacccgggaggtggaagttgcagtgagccgagattgcgccattgcactccagcctgggcaacaagagtgaaactctgtctcaaaaaaaaaaattaaatattaaattatgtaaatttacgattaaatcctgtttttaaaaaaggtaataaatactgataacttaacattttctcattattgtactattacctgtgctcttgagattatttgtctatcgtgctggaaggtggagatcctgtatcctgtataactgtgtgctactgctcatttctccccagctttgcgtttgctggggtcagattggaagctttaaatctgccctggtgggagcgtatatcccacaaaaattgacaaatgctataactcagagctctcccatatcaagcgttaaatggttaaacattgaccaacatactactggtggtatcactaaatgaatttaccttgtttatttgttgtctgtctttccataaggacacgtaggctctcagtgcagtccctgcctgccttgttcatgctgtattcacagcctgtaaaacagtgcctggtacactgtgagctctcagtcactatctgttgaatgagtggatcctccagagcagttaaaagggaggtataagaaaggcctatttcactaacagtagggagaggcctgctctactaagtaagatgggggagagatagttcccctaaggcttacttgggttcttctttgtgttatgttcctgagtgagtagccatgtaaatttacttacttaatgatagtaaaaacttctcaagcatggtatagggaaggccaattaatgagcaggaacactcaaccctagctgcacataggaatcacttggagtatttttaaaaagaatttggacagctgagcagcactcacagaccaaattaatcagaaatctctacaggtggaacctggatatcagtatttattttgaagtgcccccaggttattttaatgtgcagcctgagtttaaaaccactggattcggccgggcgcgttggctcacgcctgtaatcccagcactttgggaggcctaggcaggtggatcacgaggtcaggagatccagaccatcctggctaacacggtgaaacctcgtctctactataaatacaaaaaattagccgggcatggtggcgggcgcctgtagtcccagccgctcggcaggctgaggcagaatggcgtgaacccgggaggcggagcttgcagtgagctgagatcgtgccactgcactccagcctgggcaacagagagagactccatctcaaaaaaaaaaaccactggattcgacatcgggtaagggccagaatggggagatttgagccttatactgtgaatactgaggagccatcatcgatagggttcaaaaagtgacttcattctgtaatttattttttcattctacagtggcttgagttcatactagaaactgggagtacagaaatgtataggacaccttatctaccagataagaagttcacagtcttgtaagggaggcaccaaatacgagtttaatgaagtgttttagagaccatcttgaaaatccgattattgagggttcagtgaagactgaaaggaaaggatgacctgttcaatctaggtaaaggggagaaccagaatatgggacacagaagaggtaaacacaagctctggttgatggctaaatatttcccaggtgaacagtgcggaaggagcatttgtaaatgcccctctcaataactggtaccaccatccaccttgttcttcataaaagagactgtctctctcttgatcaccactatatcctcagcacataccacagtgtcaagcacataggcattcagatatttgagaatgaatgctattctgtagagggagcaacttgaatcagagatctgggaacacgtagtgtgtttagggaactgcaggtcttggcatagctggactattggattaagaggaatggtcatgaggcaggaggtggggggtcatgaagagcctggggtcatatgctaagacaggtggacttgatgtaagtccaccttgcaagtaacagaaccacggaaggattgtagatgatcgtatttggcaagctttttcaaagtatacatgcctgctagtttcccttaggggttcttatcctgaagactccctcgctcccatacatgtctgtgtttatatatgtacagttgacctttgaacaacgtgggagttgggggcaccaaccctctgcacagtcgaaaattcacaataactcttgactctccaaaagtttcattagtagtaacctactgttgacctagctgataacataagcaattcattaaggcttattttatatgttatgtgtattatgtactgtattcttaataaagtatgctagagaaaagaaaatgttactaagaaaatcataagagaaaatatatttactattcatcaagtgggagtggatcgtcattaatccacttcatcctcatcacttcacatcgagtaggctgaggaggaggaggaagaggaggggttggatttgccctctcaggagtggcagaagcagaaaatcctcatataggccaggcgtggtggttcacgcctgtaatccagcgctttgggaggccaaggtgggaagataatttgagctcaggagtttcagaccagcttgggcaacatagcaagacccccgtctctattgaaaaaaaaaaaaacttaaatgtaaaaatcctcatgtaagtagacctgtgcagttcaaatgtgtgttgtttaagggtcagctatatatacgtataaacacacacacaaacacacacagagtcacatgatgcataacaacgttttagtcagtatatgatggtggtcccataagattataatatcgtatttttgctgtatcttttttgtgtttatatgtgtaaatttgtaccattgtgttacaatcacttatagcattcagtacagtaacatgctgtacaggtttgtagcctaggagcaataggctaaccactatactatatatagcctaggtatgtagtaggctataccatctgagtttgtgtaaacacactctgtgatgtttgtacaatgatgaaattgcctaccaatgcatttctcagagtgtatctctgttgttaaacagtgcatgactgtatatgtgtatacatatatccccagctgattctgatccttttctccttccactcccaggaccactaaatgggaagttcttgtttttaagccctaaaatgatataatggtagttggctgcagtctatagagcgcaaactgatacaactatatatttattaatgagaaatgtgggatttgagaaggttttccagccttataagcaagagtatttattacaagggttgcaactttacatgagaactccaacagtgaaaagacctttccttcatatagtctctctatatatggacataaaaatgttcatgtttgtatgtttcacctgccacccttttataaactcctcataaatgctatttgctgccacttatattcttatgccaaattgtggtctcagttaacattctgtattttcttctattacctcaacatttcatctttcagttattgagttcagttattgaccaattatgctatattccaaataaaaccagatgttggaaatacaaagagaaaatgaactttcctaccttcgagataatttcattttagtagggagacagacatgcatacaattacagtgttgtgggatacataccataataggtgtagttagtgggaaaagaagtgacagggaaaatatgaatgattccattcgggactctgggagagctttcatagaggagtggtgcctaagcctctaaagcatttagaatgcgcctaacactttagtgtcagcacatatgacaagtgtcctgactctttgtaagcagttatacgtgttagctttaattattatcattactactacttttgtaatcagaaaagtactttttaaaaaattaacaaatcagaagtcattggtagacgtgtaaagagcagtttcaggggctggttggatagaagctgaatggcaggggctgaataagaaataaaaaatttgtcacaggccaggcacaatagctcacacctgtaatcccagcactttgggagaccaaggtgggaggattgcttgagccaggagtttgagaccagcctgggcaacagagcaagactgtacctctttattattattattattattattattattttattttgtagagatggggtcttgctatgttgcccaggctggtcttgaatgcccggcttcaagcaatcctgcttgaagtgtggaggattgagattagcctcccaaagtgctggaattacaggcatgagccaccatgcccagccaagactgtctctacaaaaaaaattaagaattaactgggcttggtggtatgcacttgtaatcctagctactcgagaggctgaggcaggagggaggattgctttaggagttcaaggctgtagtgagctatataatggtggcactgtactccagcctgagcaagagaataagctcttgtctcgaaaagaagaaaagaaagttatcacagccatatactgctcaacagtaccttttattggagcgcttgtttcttgaatgatttttccttttatttgcacccatatagttttgttttattttatataatttgggtttcaaatgtttgttttaatgtaatttttaaagctaagtagaggcaaatggaacaggtttgtcagtgtggcaggtgaaaccatgtgaagttgatcagattactctagggcttaatgtctcatctttgctgtcttcattaaatttcccaaagagatactgacaatgatagcaatcagaaatataataaaatattatgataactcagtatcaatttattgatcctaattttctttacatctcttttttttactatatgaaaatctaacatcagaacactctgctcctgttcacgtcatagagtaatattttgtcaaagatgaaaccttaccaatgtagtctttaatctgtcctgatttattttacagtatgtgctcattactttcttgccttatccacagaaggagctcaaaaagtgggatgagtttgaagatattttagaagagaggaggcatgtcagtgacttgaaatttgcaatgaaatgctacacacctcttgtctataagggaattactccatgtaaaccaattgatattaaatgtagtgttctcaattctgaggagattcattatgtcattaaacaggtaagtgattccctcttcaaccatggccagatttgttcattgtcaacaagttcttaattctataacttattttgctactttaatatatccttttaggctgagctgtattcatcacatttatcaaataattactgtatccgtgtgtgttagcctcttgctagacactagactagaggtctaacagtgagcgagttgagcgtaagtgaaatatgtcgtctgggcataagtgaaatatgatacgagacatgctagtgggagcccagtgtgcaggggcgctaattaattataggggcaactcatttggtgtagagagtcaaggaagtgattttttttaatgaggcctaaaagataattagagatgttgcaggtgaagtggggaaagagtattcaagccaaacaaataacttattcctgtggttttcaaacctccacattagcattacccagggagcttttcaaaatccccatatcatccccatgccaattaaataaaaatgtcagggaagggaatatcagtagtttttaaagaagcccaggtgattccaaagtatagcaaagtttgggagccactggcttattttaaggaccgaagccttgaaaagacttgtacttttctcttggagaagctatcagttttctctggtaggagataggttgagcctattccattaagtgcattcaagtttcctcatcaattagatgctaacaacagtggttctcaacactggcttccccttagaatcacctgtagaacttttgcaaaaagtttactttcactgtactgaaactagttcagtatgacgagaccaaagagcaaagaagggatgataataagaaataagcctagagaggtaagagggtcatgttatgaaggactttgtaaaccatgttggattgtattttatcctagtacagtgcaaagatgttgaaaggtttcaagatacagtgtgacacaatcggctaatgttttagaaaaaccattctgctaaaactagacaggaagtctgcttgtgatgctcttggaataatccctttgtgcagtcatagttgcctagactagggagtggttgtagaaacagagaaatggacagatttaagggatttgagaggtggggtctacttcatttatgaccagttgggtgtaggaatggaaggaaaagaaagagtcagggatgataaagccattcactgaaatagggaacttaagagggaaccagtttgggagggaaacttaagttctgttatagctgtgtgatttgaagacatcaaaatgaaggtatttggtgggcaggagctccctgatcgctagccctccacgtcatatcacccaggtgcttgtatggtcataggcccacaggtggataaatggatgcattgcaggtgttgctagcctggggcttggtcccgcccagatcctcttcatagctttgggagtgtggcaaggaatgactggcctcatttttgctagcagcagtctcctattgctccatgccctcatttttttcctggtcagaagagaaaatattcttaagaaactcctctaaggaatatgctctctccttttttttttttcttttggtcctctataaatgtcttaaaggaaaacaagcatgtatgcaactagtgtgtttttgtaaggagagtgaactcattcagaattgcagtattcttgcttgatgttggttaccaaatattaacatttgacgctgcctctttatttgtgtagattgtggctcactctcgtcttccccatagacagaactgactccgttcatgtttaaggcctctccctgactttgcctgttacctccagtttttttgttttattttgttttgtttttttgagacggagtcttactctgttgcccaggctggagtgcagtatcgcgatctcggctcactgcaagctccgcctcccgggttcatgccattctcctgcctcagcctcccgagtagctaggactacaggcaccagccgccacgcccggctaattttttgtattttttagcagagacggggtttcaccatgttagcaaggatggtctcgatctcctgaccttgtgatctgctctccttggcctcccaaagtgctgggattacaggcgtgagccgccacacccggcctacctccagtttttagtagagatgtcttcagtcttgtctttaggagtattgccccagacttcaagttataccatatttgttctgcaacttcctctctgacctcttggaatctgctctggtttctaattagtgaagaagaaagacagttgtcaagctttaaattcgcctctaatgctctaaggctggcctgtagagatcttgcttttttaacttttaactggagtttattcaggtttgtggccttgggaacatttttatctctgctctctgttttctggatttggacatatgagctgtgctcctattcctttgtttttattggccttacatatcctggagaggctatcagttttatcaggttgggcctatttcataagtgaagtcaagtttcctcatcaattagatgctaacaacagcagttagttcttccttatagaagcacttggagaacttttgcaaaagttactattattatctactaggaggtaaactccatgaaggcaagaattcctgtctcttttttcactgccgtattcccagtgcctaacacatagtagacattcaatcaatatttgttgaattagtgaatttttaaaaatgaggccatggtcccatctacagagattctgatttaactggtctgggataggacccaggcatctctctcccgagtagctgggattacaggcgcctgccaccacacccggctaatttttgtatttttagtagagacagggtttcatcatgttggccaggctggtctcaaactcctgacctcaggtgatccgcccacctcggcctcccaaagtgctggattactggcatgagccaccatgcccagccttctgcttttctttaaaactcctcaaataattctaatgcacacccaggttaagtgttaccaatttaaaagatcttattcaggccagtgtttctctgacttggctgtgctgctgagaaaaatcacataaactaagatagattggaatcgtacaaattcataattaggcagcacaactgggccttccatattccccagtaattctgtttccctagtgaactgtttttcattctccaaaatgacagttttagcagccccactctccttgaacttccagccctgcctcctcttcttactctcagcagatggtttttcttccagtgtcacagtgaaaaattttttttttttttgagacggagtctcgctctgtcacccaggctggagggcagtggcgcgatctcggctcactgcaagctctgcctcccgggttcacaccatcctcctgcctcagcctcctgagtagctgggactacaggtgtccgccaccatgcccagctaatttttttttttttgtatttttagtagagacagggtttcaccttgttagtcaggatggtcttgatctcctgacctcgtgatccacccgccttggcctcccaaagtgctacaattataggcgtgagccattgcgtccggccgaaaaaaatttttttttttttttgcgacagagtctccctctgtctcccagactggagtgcggtgcacaatctcggttcactgcaatctccgcctcccaggttcaagtgattctcctgcctcagcgtcccaagtagctgggattacaggcacccaccactgcgcctggctaattttttgtattttcagtagagatggggtctcaccatggtgaccaggctggtcttgaactcctgacctcaggtaatccgcccacctcagcctcccaaagcactgggattacaggtgcgagccactgcccccaaccacaaagaaaatttaaactattgttagtgctctctcaacttcctgtgatcaaatctaccaatttacctgcatccagtactcattattttctcctgttaaaatagaagaaatcccttctcctgtttgagtttaatccctaccctattcctttgttctaaattccaccctctccctcatcctcaggaactttgctctcctgactatcccttcttatttcttcaactacttctttattagctcttctcccatcagcatttagcatatttacttctctcccagtttaaatagacctacatcctttaaccccatgccttctctagttactatctctttcttccccctcgtctacctctctcctcctcttttaagaaattgatttgtgttattctttagagacaggatctctctgtcacccaggctggagtacagtggcatgatcatagctcactgtaaccttgaactcctgggctcaagcgatcttcctgccccagcctcctaagtagcttgaaccccagacatgtgccaccatgcccagctttttttgttttgttttttaaaattttttgtaggacaggatcccgctatgttgcccaggctgagcttgaactcctgacctcaagcgatccttctgccttggcctcctaaagtgctgggattacaggtgtgagccactgtacctggctcaaaattggccacgttgtccatgcttaccatcacacctcctcatccttcatttactactcaacttgctggaatccagtttctcatccactgtcatggctctttctgaggttgtaaatgacttccttatgggtaaattctacctgtttcaaagctgtaatagtcgttggctcttgctctttctcctttcttttcatgacaccataccatcaccctaagccccatgtctttttaatcattcctcatttgcttttatgggcttttcctttgcctgtctctttaaatgatggaatgcgtcaggattttattccagcctctggttttattctacccagtcactgggcagttttattaattgccagaattttaagtactttccttatgctgacatctccctattataaataataacataataagaacatggataaataatatctattccttcagcccagatctcttttgagtttcatgtatctgtttttatatgtctactagaatatccacttggaaattccaaagcacctcaaattcaagatgtataagtcaaactctttacccctcccacccctacccctgagccaggtgtctaagatatattacctcctacccccacccagttttccctgtctccaggaatggcccctccatgcactggttgaccaaaccaccacaaatctggatgccatcttcaacttcttgcttttctttcatacgctgtcagtcactaagactgctaattttctctttttttttttttttttttttttttgagagggagtcttgctctgttgcccaggctggagtgcagtggcgcgatctgggctcactgcaagttccgcctcccaggtttgcaccattctcctgcctcagcctcccaagtagctgggactacaggcacccaccaccacgcccagctaattttttgtatttttagtagagacgaggtttcacttttttagccaggatggtctcgatctcctgacctcgtgatccgcccgcctcggcctcccaaagtgctgggattacaggcgtgagccactgcgcccggccaattttctctgttaaatgtctcttcctgtctatgtatctccacctctgctgccacctttctaactcagtctgcctttatctcacagaatacaatagtagccattgaaggggtcttagccaaggaaagatgtgattacttttgcatttaagagatgtctcaagtttataatgtggagaagagactgaagagtcagaaaaatgaagcgaggagttagttataagactattgctcatctgttaagtcttatattaggtttctatgaaggtgtatctgctgggcaaatgaaaagcctaattgcatagagtaagagatcagttgtcttctgctctgctgcagtcacggagaaagcatttccttcaagcaagccagcctgttcacctgtgttgttgatctattcatttcgttctaattcccaagggtattgtctttcctacctgtcagccctttccactggctcaagatggcatgatgattttccatccaggggaaagtcctcccttggccatgtattctgcctcgtttccctctttccctacttttcctgcttctcagaagagtgggctacatgtggtgtctgccttttccattcaggtcccaattttagcagattgctgaagcttatctagtaaaggttaccatggatctccaacgggccccttcatctccacgttgtcttttgctgtgtcttttattgttacacactctcttcttcaggatcatcttaccttgacttctgtgacatctggttttattctgtgacatttcatgttagatggtcctcattgatctctttcataagttcttctgtctgccccataagtgcttctcagagttgaaccttcacgcttcttacctccctgctgctgtctccctggtccattttatccatcattctcatcatttcactttccatctatagcttggtggtatccagtcaatagctctagctgttcctagattattggggttcagactttttatctccagctgtccagttctctgctggacatctaatctgtatgtcccacatacacctcagaatctgtatagctaactaattcttagcccctgtactttactgccttccatccctaagctgtggtgtctatttcagggctggccccaccacccattctgttgcccaaaacaaaactgaaccatcaccctgccctgcccttctctttagcacctgtcattacccttgtttggctctgtaccatctctggcttgaactatttccataggtttacggttatacttcctttcatggctgtgtttcctgaaattcatccctcttaccagtcccttgattcctctattttcccttggttctgccctctgccctctgccctttcttcctgtccagctgttattaggattatctgagtaactgtttcaccaacccttaattctcctttgcaatctttccttccagactgaccaggaaaaaaagcagcctggaatctgccaactcaccttctctgttcctataaccaggtgtctggctgctcctgggagagtgggtgagttatacagatccacattctgcagcctcaggatcccttcttccatctgtcccttttagtccagtctcagagaaaaggcgcctgctctcctggtcacagctagccacacccctgtggtcggaagtcatcccgtccagcctcttctgagacctttggcatgcatctgctccctttcctctatcttcagcctttctctcaggggacttcttctatttggtctataaacaggtccgaggctttaacaccactgagctgtatacttaaaaatggttaaaatggcatattttatgttatgtgtattttaatgcaatttttttttttttttttttttttttttgagacagagtctcgctctgtcgccccggctggaggcagtggctctatcttggctcactgcaagctccgcctcccaggtttacatcattctcctgcctcagcctcccgagtagctgggactatagtcacccaccaccacacccagctaattttttttttttctattctttagtagagacggggtttcaccgtgttagccaggatggtctcaatctcctgacctcgtgatccacctgcctcggcctcccaaagtgctgggattacaggcatgagccaccacgcccagccaacacaattttttaaaagtggaatgctaattaataaaaacaaaaaaacaggtccaggacttttgcatctagggagagcattttttgctttaattcatatcatccctttacttctcattcaaactttcccattattctgtggccactgtctttagttcctcagcagttcatttagtcttcagtccattcagtatgagttctcttctgactatatttataaacttttttttttttttggcacaatcactgtttcaggtaacctgagtaaaacaaaggaacacaggtaagaggaaagagtttatcccagttcctccctgttgaactgagccccccaaaagataggatatgcagcaagatagagatggtggttgcacaacatttgtgaatgtacaaaataccactgaatagttcactttaaaatgattaatttggccgggtgtggtggctcacgcctgtaatcccagcaattttggaggctgaggcgggcggatcacctgaggtcgggagttcaagaccagcctgaccaacatggagaaaccccgtctctcctaaaaatacaaaattagctgggcatggtggcacatgcctgtaatcccagctactcgggaggctaaggcaggagaatcgcttgaacccgggaagcagaggttgcggtgagccgagattgcaccattgtactccagcctgggcaacaagagcgaaactccgtctcaaaaaaaaaaaaaaaaggttaattttatagtgtgtgaatttcacctcaatgaaaaaaaagggtaagatacttcttcactacatgtaattggggtgccaacacctgtcctctgagcttctgagctcatcctaaagcaaagcactctcctttgggaagcataaggattacttatcctacagacttcatttcaaagtgcttgtttaggggacaatgaaaatgggcaaatcagggcttcctcaaggatagaaactgacttgctcatctccaggcccttgacagtcccagcacacagcaaacattttattttctttacaaaagagctagagggccatgtgaataaaataagttccgttgtgagattctttatttcactaattatcctttgatagcttgggactttgtgtgcctgtgacttgatagatctgatgtagtctgagtcggtaatttcaatgtgatcttgtatattaccttgtaatagcattgagccagctggtggagcactgcagcaatacactgagagaagccactatttgctaggacactagaccatgggcagcaacttattttagagtttggatataaacttattaacaaaccaaatggaaaggtgaagtgttttcttcactctaaaatgctatcctagaaagccatttttcttttaatttctggcctttaaacttctttaaataggctcatttatctactatgactgtgttgggaagttgtcaattaagaagacactatctttgagttatagaagattaatccatttggaactagtcatactggtttgagtaaagctttctgacttttctgttattgttgttagaaattattcctgcttttcctttccttttagctttccaaggaatcccttcaatctgtggatgtcctccgagaggaagtgagtgagatcttagatgaaatgagtcacaaactgcgtcttggagccattcggttttgtgccttcaccctgagcaaagtatttaaacaaattttctcgaaggtgtgtgtaaatgaagaaggtattcagaaagtgagtattgattattaaaaaaataaagaaataaaagtctcatcttaaaattaaacaaaaaaaaaaacagtctctttttcaacccctcacaatttaatcaactcaaggacagctcacttggtcaatcaaaagcctagggcctaatcatcaggcctccagtctaggcagaagaggatgtgcatctctgaaggttgttttctgtttttttgtttccttttaactgcagacctacaggcttcagactaacttagtcaagtaagacttatagactaacttaatgccagatattcagtaacgttacaaaagaaatacaaagaattcctgtatatacttcacctagattcccttacagcatttcctttatccttttcctaatactctgctgtgtttttcctataattaagggcattatcttatggtacaagtatcaaaataaggaaattaacattgaacaaatactagtaatactgacctgactcatatttcaccagttgtcccagtcatgtcctgtctagctaaagaaaatcgtagctcatgtgttgcgctagaaatcctagaaagtgttcaactttcttctgtatccacttccatattagactcttttaatctaaaataattccttagtatctgtatttgtgtttcatgctaattttttttttttttaaagaacaggctaattattttgaagtgtgaaatggtttgaatttgagtgatgttatctcagtattgggctcgggttgtgtacctttgctaggaacaccccggaagcgatgcattcttctcagtgggtcgtgtcagcaatgcatggtgcctgtcggtttcattactggagatgtttcacttccatcagttggttatcgttatgactgccaggtttctctgctgtaaagttattattttttccctttataattaatgaatatcttgtgaaaagactctttgaaaatggctaaataccctgttttgcatcatactttaccccactcgtttttgcacccactgatgatttttgcctgaattaattattatgttaatgattgccaaatgatgacttttctaatttcataaagagctttccttatgaagagtatttttacttatttgtgttttatatttttttcttctaggaaagctcttaacttcacttgccttcctcctcatcccttttaatattttgttttaattcagtcatttactttcctgtcaaatatttcttcttcctactgactgttttcgagattgctgacttataccctgaatctgtcagagaatgttacagtgtttgggaccaagggtggtggtgagccatttcttaagtgatgatcacagattacctggcctctgttacatttagatttcaaaaaaacagataacacatggataccagtgaatcttgagattgatggcctgaggagtatatttggaaactcaaattatccctcccagccacatgacacccattcaccctggcagtgagtccagcacatagagaaataccattcttctcaccttgtcctatgaatttgtagattttttttaatctctccaagagaagctttgttttctcttactacaaccaaccaattcaatacagtggttaacagttggctttttaagtcagactgacttgggttccattcacagctctgccatttattggatgcatgaccattttacaaacaagaaagctaaggcttagaccttgttaattatgtggtattaaacaaagcacgtaagataactgtatataaaatgatgctaatatagtgcccaactaatatatgttagcgatcatcactgttattattctgatccataaaaatttacatttttaatattcttgcattatgtgaaattgtttaactagaaacagtacttttaccttatcagagcaaatcgtttatgtgtatggcaaaaaggcagaaaaagaggatgggtattccctctaaatatagacttattcttccgttttctgatttgagatgtgatttgataacatgacaactgaaattattcaaaatgtaacatttactttcaagctacaaagagccatccaggagcatcctgttgttctgctgcctagtcatcgaagttacattgacttcctcatgttgtcttttcttctatacaattatgatttgcctgtgccagttatagcagcaggaatgggtatgtattgtttttctgtttttttaactgtaaaaattaaaaagttcactggcatattctagcagtactgaggtatttgaagatgatgatgaaaatagcctctcctcctttcttccagtcctagcactgaataacttgagttatgtcctttgtcctgtgctttactgtgcctgaacagacatctgcaggagttcatgcacacagggttctttggtgtaggcttaaaaaatgagactgcactacttacaggtattagctgccttttgctttttttatttgataatatattaatggctacctctctaggcaataaatagatctaactttttaaagtttatttttaattgtgataaaatacatataacatcaaatttgccatctaagtcatcttcaaaaatatagttcagtggcattaagtacatttacattgttgtgctgctatcaacaccatccatctccagaactcttcatcttgcaaaactgaaatggtacccattcaacacactccccgttctaccctccccctgaccctgggcaatcagcattctactttctgtctctgtgaactactctagatgcttgatataggtggaatcatacagtacttgtccttttgtgactggcatatttcacttaacagaatgccctcaaggttcatccatgttgcagcatgtgtcagaatttccttcctttttgaagttggaaatgcatctgctcaagaccctgctttccatttttttatatatatacaaaaatggtatatatggaattgctgggtcttgtggtaattttttttcattttttgaggaaccaccatactgccttccttagcagctgcaccattttacattcccaccaaaagtgcacaagagttccagttgttctacatccttgccaacacctgttattttctgatatgttttataataattttaatgagtgtgaagtggtatctccttgtagttttgatttgcatttccctaatgattagtgatgctgagcatcttttttgtgtgcttattggccatttgtatatctttggagaaatgtctgttcaagtccgttattttttaattaggttgtttggggctttttttgttgagttgtaggaattgtttctacatcctggatattcaccccttatcagacagatgatttgcaaatattatcttccatttcatgggttaccttttcactctgttgattgtgttatttgatgcatggaagtttttaattgatgtagtccaattgatctatttgtttctttggttccctggttccctgtgcttttggtatcagatcgaagaaatcattgccaaatccgaggtcatgaagcttttcccttatgttttatcctaagagttttatggtttcaggtcttacattaagatctttggttttttgagttaatttttgtatatggtgtaagttaagggtccaacttcatgtctaacattaattttaatagccatataatattcagcagtgtggatatttcataatttagtagttttgctgttataaacaatgtcataatacatttttatattggtgcttttattcctgtaagatcgattcctaaaagtgggattgctaaggcatataagttgtttatccactcccttttagggtagccaggaaagccaggattcaagtatacacgtttgttaataaatgcagtgaatggtaaggttaaaactgccaagaacttaagcactttaaaagcattttcatctgaacaaacttgtgaggaagttatttgaaaactaggggaaatgaagagaaagactattttaaaactgctggtagcaatcttcctttcttacaagatttgccttatttaatctcttccaacaaaagtaggttgatgttttttcctggtaggcaaaagatgagagcgggtttggcctggctgtccagagcatgaagggcacatattggtctgttgtcaggctcagcagcatggctgactaaagacattgacatcatgacattgtcatgttgctctgctgttgcccctggctctagctggcctacttgtaaagggagtggtgcatggagaagcacaaggtaacctcccagtgagcacctggcccacagaatcccttcttttctataattctattaggtatctcttatgtattttaatgtcaaagtataataatatcataggggtgtcttacatttatgaaatctttcttaataatgtttgagtttaggccaggcacagtggcttatgcctgtaatcccagtactttgggaggccgaggcaggaggactgcttgaggccaggaagtttgtgaccaacctagccaacatagcgagaccctgtctcataaaataaaataataaaatataaatgaaaaataagcatgtttaagtttagatctttatagaagatttcaagatctgcaaataaatattatcccctcttttttagacttcctgggaatgaaaatggttggtgagctgctacgaatgtcgggtgcctttttcatgcggcgtacctttggtggcaataaactctactgggctgtattctctgaatatgtaaaaactatgttacgggtaaatgcaaataattcccaactactcttaagccatattttcttcactgatgtttgctcatttaaactcttaacttctgaatagaacacttagctattttgctttccctcaagaactgcttataacctcagcaattggtttaatctgtgtgactctcttgtttaattttcactgtaagctgtgtttgttcaggaagcttgggagggagcttgggaaaaggaatcaaaagaagcatttatcattttgagagtaggcaatgggttttgtgttttgtttgttttctctttaaagaatggttatgctcctgttgaatttttcctcgaagggacaagaagccgctctgccaagacattgactcctaaatttggtaggtcactacagattaaaaggaaaaatacaaacccaaagacatcagctgctacataaaacttgacgctttatttaacaagatattcttttcaagtgtaaatgtataactgttgatatttacgggattagtgtataatgtatgcttttagtattttccgtttatgtgctcatgtttgctctgctcttcaatatgttgatgaagcatttctccctgtgttttgcaggtcttctgaatattgtgatggagccattttttaaaagagaagtttttgatacctaccttgtcccaattagtatcagttatgataagatcttggaagaaactctttatgtgtatgagcttctaggggttcctaaaccaaaagagtctacaactgtacgtgagcttgattttagcttaattgagagaatgtgctgactgacacatcaactaatttctaaatttactgcttttcgttttcttccccccctgttatggtactattaggggttgctgaaagccagaaagattctctctgaaaattttggaagcatccatgtgtactttggagatcctgtgtcacttcgatctttggcagctgggaggatgagtcggagctcatataacttggttccaaggtgtgacctgtgttttaataactgtcttagaaatgaggattaaaatccaaaggtgtgagttgcaatgctggagttgaccacttctcttgatttacttaagattacagagaaaatgatcagaaatgctgttatcattccgttttcatcagtggaaaccttcaattaaagaagaattatgtgtttgtcccaaaaaaagataagctgtgagatatgtatgtcaaatatgcaaaatcagacaatgatcatgtttctcaagggaactaaagtgggaataaataatgccattattaacaagtatatgtgcaggaattgttgagcactattggtaagctagccaaagtatgtactattatttttgaccctagaaaggattgcataatggtaatgaatgggagtgagtccttagtctctagagagttatagttttataggcaagaaaatatattaggttctttcaggataaagaacacagatacacatttgagttttcttaattaggagaaatatacctggacaagtaagggagacaaaccatctgcccctccaggcctcatgtgctgcaacatcatttgtaacttatctgtagctttagcagtttcccagcagctacattagtcatcacagacgcttatgttagtttttttcctgacacaggctctctctttagatctcaaattggtttggctggctattacctagtacagggcacccttactggctgcatctttcacattaagccacctgtgtggcaatttttaggtcatgtgtgtatctctgctccagccagctctgtgcaggccttattgtactattcaaagtttggtaatccatgcatgaagtcagacaaactgaatggcacccattcagtataaaatagttattatataatctgttaagtgtgttctacaatggagatatgttcagcgtgctatgcattctgaaaagatagtaatttagtctactggggcaggcatccattctcagagaaacgatgtatcctatttaggaagcaacaaaagttttttgcctggaaccaggaataataggaccctggaccccttcagtatttttaccatctctcaagaggatattccagaaatgtatggtcagattacactatagtaaagcaaaggaatactgtttgcacctgacctgagagaattcagttggcacaaagtatgagaagccttctaaaacgtctagagtctttttccatccccatttgtctaagtaacagaactgtaatttgttgctctgtgctcttccttttagatacattcctcagaaacagtctgaggacatgcatgcctttgtcactgaagttgcctacaaaatggagcttctgcaaattgaaaacatggttttgagcccctggaccctaatagttgctgttctgcttcagaaccggccatccatggactttgatgctctggtggaaaagactttatggctaaaaggcttaacccaggcatttggagggtttctcatttggcctggtatgtaggtaggacatatgtgttgagaatgcttgcttaatttggaagagttaaaacctggacctgaaaaatctatagaggacttgagcaaaggattgctcagaaagagaaaggacaggccgggcgcggtggttcacacctgtaatcccagcactttgggaggccaaggcaggtggatcacgaggtcaggagattgagaccatcctggctaacgcggtgaaaccccgtctctactaaaaaatagaaaaaattaaccaggcgtggtggtaggcgcctgtagtcccagctactcgggaggctgaggcaggagaatggcatgaacccaggaggcggagcttgcagtgagccgagattgtgccactgcactccagctaggcaacagagcgagactctgtctcaaaaaagaaagaaaaagagaaaggacaccaaatctgtttttatcactataggacacagtgaacacagcacgttgattatttgagaataattgtttacatgtcatttcccactacgagactctgaatatcttgaggactagaataccatttccttggcacctagtacggtggaaaataaagtcatgaatcctagccaggcatggtggtacacacctataatcccagctacttgggaggctgaggtgggaggatcacttgagcccaggagttcgagaccagcctcagtaacatagtgagaccccatctccaaaaaaaaaaaaaaaaggccgggcgtggtggctcacacctgtaatcccagcactttgggaggctgaggcgggcggatcacgaggtcagcagttccagaccagcctgaccaacatggtgaaactccgtctctactaaaaacacaaaaattagccgggcatggtggcgtgcacctgtaatcccagctactcgggaggctgaggcaggaaaattgcttgaacctgggaggcagagattgcagtgagccaagattgcgccactgcactccagcctgggtgatagagcgagattccgtctcaaaaaaaaaaaaaaattgtacaggctacagttggaaatgcgtttttttttaaagaccagataattatttgaagtcaagtacctactgttctttgatcaacccaatactgaatacctcctctgtgctgggtactaccagggatatgaagatgaacaagatgccatccccatcctggacgttcccctgggttgcagagggcagggtgggtgggtaatgtgtaaacaagttgtgagggttcagtgaacagagacaaggagcaacatgcatgctgcagagggttcctgagagtgctgcagaggaaagggaccatactcaggaagacttcacagaagcgacttttgaacccttcaggaagaccaggagaggatcctcgccaaggcagggatgaggaatgcaagatgggaggcttgggccccagagattcatcagtgatattaaagtgttggcccagatggggtggtgggtagatggaaaataaagatggacctccccgcctcctccccaccatccaccatcagaagactggaggtatagaaacaagttaggaggctgctctgtcccaatgagaaatgcaggatgcctgagatgcctgagccgcagcagtggaggcactcagggcacagccaagagatgaggaggatttactgacaaaaatgccagtcaccaagagagagacaaatcagacacctgttctcagtgctgtgatgggctgggtctggtaggaggcaaaggatgtgttaattatgatacaagtagcaagtgttggatgtcatgagaaatagctaaaagggctcaaacccatcattgtttggcccaggaacatatgaaaacataggtacttgtttttctaaagtgttttgctttttcaggatgggataaatgccataactaatccataactaagagtatctgttcagtgtcactacagttctgttccttttttctttttttatgcagattaccccacattcctaagcatgttcatatctcaagctttttatgatcatttcacataaaatattattcaattgagcaagctgagacaaggcaagttgttcaagaatgaatgtgatcaagtccaggaggaagccatacctctcacttgtccctgccttgaagcagtagcagaacttgccacccaacttgagcagtgtgccactgccagccagctctttggctcaggttaactgcagaataattttccgtgctgagaatatttgttaaatatcaccatctcttcattatgcttctgtaattctacctgcctggcagctgtctgcaggccaatatgtcaggtgataagctaccaactgccatggagctgcccctttagttatctttgatttggggaaaactgcaaagtgatatttttaccattttagtatgggtctaagcaaggggtgtgtgtgcatgtgtgtgtgtgttgtatgttttaatgtattcatacactaatcatgggcctttttcttagtattcttacattcccgtgcatgtgactttccagttatgtaacttgctgttagaaaactttagattcccttggttcctgaagtacacagaagtggtgttcattttcagagtagaaactgatgtgcctttcagaatggctgacaaattttgggggtaagaaagtatgttacatgtccttagagagagagaaagaattgatttatgaaatagtacttttaaatttttcttcagatttggtatcattaccgtaattggtagacagtaaaacctgtcacttgaaaatgagcatctgtcacgttaccattaataacgttaacgtacgctaggcctaagactccctgcagtgacccatcttgtttgaatgaattgtctttgtgtgtagataataaacctgctgaagaagttgtcccggccagcattcttctgcattccaacattgccagccttgtcaaagaccaggtgattctgaaagtggactccggagactcggaagtggtcgatgggcttatgctccagcacatcactctcctcatgtgctcagcttataggaaccagctgctcaacatttttgtgcgcccatccttagtagcagtagcattgcagatgacaccagggttcaggaaaggtaattttcaggaatgcaatcttgacttttagaagaggtctggccattccattccatttagggagccacatttgaagccttgtaatgttcagcctcacgccggtgaagagcaggcctatcactgagaaaaagttagctttgttccccaaatacttgttcatctgcttcgaattttggaattgggaggacctggaaataatctaaacctttccttctataaatatggaaaatgaggcctagaaagttgcataattactgagagaaggatctggcatttgagtacagttctccacttcctggtctgcggcactgttttggctgtgccagctccctgatccagcaaaggcaggtgggcagatgagcagtcagcagtcgatgagtactcccgagatgcatggtcttgttctaattgtatcaggagtataaaaatgagtacagtacacgtcatgttcacaggagcctgtagtcaaggccagggggttctgtcaaggccctatgttagaattactaggggagtgagccccaccccaaagtttcttcagttgacctggggtatgggccagccattggtgtttggttttggttttggttttggcttttcaaagctccacagtgattctaaggaaaagtgctacagatataataaagataccaggaaatatgaatatagagggaaattaagaaatcagtacctttccttccctactagggagccatggggtagggaaaaatgaagcgtcctggcctctaaggactgtgatgtctcgctgagtagaagcctggttgtaggttagagtcaatcatttaaaaactatgctagggccgggcgcagtggctcacgcctgtaatcccagcactttggtaggccgtggtaggaggatcacgatgtcaggagttcgagtccagcctgaccaacatggtgaaaccctgtctctattaaaatacaaaaattagctgggcatggcggcgagtgcctgtaatcccagctacttgggaggctgaggctggagaatcgcttgaccccaggaggcggaggttgcagtgagccaagattgcaccattgcactccagcctgggtgacagagcgagactccatctcaaaaaacaaaaaacaaactatgctagaccgtagtttgctctgtgggtaagatttgggtttaatttagcttccctcaggggacttaattcttgtccctgttacatgaataaaatatgcctttgaaatacattttgtgatagtaaggacttcctggtactcccttaaagtttaaagggcaatgttgtaattttacatgatgcatttatttccagaggatgtctacagttgctttcgcttcctacgtgatgtttttgcagatgagttcatcttccttccaggaaacacactaaaggtaaagtgcttacaacaaagagcaagtatgtttgcagtgtgagttctagaaatgttaggggtgaattcacagatgtgtctcaggcagtgtgccatccctttcttcaaggcaaagtggggcagacttcaagagaaactggggcgctcacagttcagcagactctagtttgattcttgatcaagtttaattaataacttagggattatatggtgagaggagagtcattctttgaactatcagtgtggccattacaactaaactaactttattttagtaaacgtttaaaaatcagcacacagccgggcgcagtggctcatgcctgtaatcccagcactttgggaggccgaggcaggcggatcacgaggtcaagagatcgagaccatcctggccaacatggtgaaaccccgtctgtactaaaaatacaaaaattagctgggcgtggtggcgcatgcctgtagtcccagctactcaggaggctgaggctgaggcaggagaatcacttgaacccgggaggtggaggttgctgtgagccaagattgtgccactgcactccagcctggtgacaagaggaagactccatctcaaaaaaaaagaaaccaaacacaacaaaatcagcacacattttcctgttagcaagttgttagaatgagtcacccaggcaagtgccttttactttgagagtagtgagtgctggtcctgcctggtctagacagctgaggggtcatcaggctcgcagagctggactgctgctgggttgaagtgggaagtgacagtagatgagaggcatgttaggtgtttgtgtgctttaaggataagaggtttgattctgtagggagtggaacaggagtgttggaaactttttttttttttttttttttgaggtggagtctggctctgtcgctcaggctagagtgcagtggcgcaatctcagctcactgcaagctctgcctcccgggttcactccattctcctgcctcagcctcccaagtagcagggactacaggcgcccaccactacgcccggctaattttttatatttttagtagagacggggtttcactgtgttagccaggatggtctcgatctcctgacttcatgatccgcccgcctcagcctctcaaagtgctgggattacaggcgtgagccaccgcgcccagccagaaattttttaaccatagcataattctaagtatttttaggacttgctgtatgtatttcctatttaaattaaggagtggttctgcaaagtaaaagaaaatccatcacccaggttgtgatttgtaaggctcagaaatgttgtgtttgaaaacattttgaatgtagagcagatgcttctctggctactatctcacaaccagaattgttctggaggttggggaaatagctggtattctgttgtctgagggcatgtggctgcatatattcagataggcagtgtatccattaacctagatgagggggtacatgtattcagatgggcactatacccattaacctagatgaacattatggcttcctcttccc

SEQ ID NO: 622 - DNA, 24588 bp, Homo sapiens
  source 1..24588: mol_type = other DNA
gcctcacggtcctgctgatatgtgacatcacccccggaggcccagctgtaaattcctctctttgtactctttctctttatttctcagaccagccgacacttagggaaaatagaacctacgctgaaattttgggggcaggttctcttgctaggtatgtatttttttcatttacttacttccattcttttaatgtaatttttcaccacaatccagactctcagtaatcctttccttgcttttgtttaaagatttactccaaaaatgtggcctatagttttagttcagcaaatacaaatttgaaagatttatttatgtgtatttatgactagtttctaacgacattatgtttataagattcatccaggttattgcatgtagttgtaattcatttatttttattctctagaagaagaattgctgggtcaaaagttattcatattgtcacatttattagacaatgtccaattgctttccaaagtggtggtaccaatttatattcccttagtagggcttgagtctgagtgattcacttcctaaccaactcttatttttggaatttttaattgttgccaaccttttaggtatgaaatacacaccatgattttaatttgcatttctttgataatgagattaagccttttcccataagcttatgattgtgtcctattgtctgttaagtacctgtttaagactttttctcatattcacctgagatttttagacattacttttttaggaatattttatgtatcccagttaataattcttaatcagttgtatctgtagcataagtcttgcaaggtagtagcttaatagttttcaagttttttatggagtatttggctgatcagacttccttaaaattaagttgaatttaagtttcctttaagtttgcactttttaaatgctctatcacctcaaaaaagatccagtacttttatggagatagtccttttattgtcatgtaaaatcctactaacactccgttctgtagctatttcaagaaaccatgtgaattagttgaggaggattagtaggagatttggtcctccccaaattctgaaagtggggcttgagtattttattactcattactgtgatcacatttgtagttttcatcttttgttgtctcaggaaagaaaccatttgcaaatgcagagccctccagaagttaccttgagtattttattgcagaagaaaaatatgccctaatggtgccaataggggtcaaacaacttctataaagaaaattattaaaataatgtgagtaaaatgtagtggcaatccctaagagggacggatttagagagaacagaaaatgaagagggaaaatagtgatacatttattgggttcaataactgttaaaaattaataggaaactagagcaagaggtatgtggtgacctagcacttaagttagctctgttatacttccaaaggcatatttgaggttttggccttctgggcaagttttggtagggtgtctgtcattttccctctactgctggaaaagaaggctcaagaggaagaatccaggtactttgtattttaatcaggactatttatttgggccgattggaaataagttaaaatctctgctcttgaattaaatcagagtttatttacctcagtgtttggaattttagcagttcatgaggacaaatagtctttttgttcatttcataatctcagctgtagagttgcccagagtgctcagataagtgtgtcttttcattttgatttgcttagaaaggatgtcagtagggacttgctattatgatgatattgagctgaaatttatatttctgaggaaaatgaaaggctatcagaagtcatttgttaaaatttctttattctgtcttccccatccccatcaatatttctccctcttttaaaagactattgcctagaattttatagaataagccctcctattctgggaaactgtactgtggtcctatttatattttgtttgaagggtaattttcttttaatgtaagactaatgccatgttagaattagattctgtgaaaatatttcttgaagctttgaatatatgttatacctatttatgcaattcaggaatgctttctggtagtgaaatgtaatgttaaaaaataccaaaaaaagcaagtataagtttgagctaaagttaatgactttctaattgacttatttctgtttgggcacgctggttgatgcatgtgatatttgtatagaaataaattgaatggataatattgttaggggtggtgaatatctgagttactggtggcaaatctgtatgggtctgcagcaatctcatttcttgcctcctcgaaagaaagaattcaactgaggggcataaggcagtaaaagagaccaaggcaagtttcagagcaggagcagaagtttattaaaaagctttagaacaggaaagaaaggaaaacacacttgggagagacccaagcaggcatcttggaggtcaagtgcctcgttcatccttgaacctaggattttatatgctggcctacttctggcatcttgcacccctttcccttcatccttcccttaagggttatggggagccacccacatgcatggtgccctgcttgtgcttgggatgtgggcatgcacagtgtgtttactggagttttatgcatgcttatctgaggctttctttcaaattctggtggaatgcccctggaaggtcatactctgccattttgactcttaatgtgcatgtttgagctcattcgcccagttcctgaaagctgccaattatcaatttcaggtgtttttatcagttgagaaactgcctctccctggtgctggctgtgaccaattgttattttagagaagcagagtgaccatcacctgatagtcacctgacattctggtgggtgggggcaaccctctcctgccccactcatgcatgactagctacctactgtaacaatatgtagaagaaatactataccttaagcttatttagagtaggaactgcatcttatctgtcagtgactatgacatgtagactcttgataaattctttttgaagtactaatcaatttgactaagagttggaaatgtagattccatttctgactctcatgtatttctgtatgatcttaagtactcaatttcttgattacaagaaaacaaatgaaatacggtacttggaagctatagtatcacttatttttaagcttctcaggaaacatattcaatgtttactcaccactgaattatcattctcaggacttctctctctgtaggctcattcttgtcagcatgtatttatgtctgtgtctgtctcatctctcatctatatatacacatatatgcaacacaaacactgttgcatatattttcttttactttcaatctgtctttttttgacaatgtgtttctgaaaaataaccacttgctttttcaattagtttgacaatctgtcttcttttttatttttatgtatgtatttattttagagataggatttcagctctttcacccaaggtggagtcagctctttcacccagtggcatgatcacagctcactgcatccttgacctcttgggctcaagcaattcttctgcctcagcctctcaagcagctgggactacaagtttgccccaccacacccagctaatttttactttttttttgtagagatgggatctcactatgttgcccaggctggtctcaacctcctgggatcaaccggtcctcatacctcagcctcccaaagtgctaggattacaggcatgagtcaccacgcctggcctgtgtcttctaattggagtgtttgatctgtttgtatttaacgtaattattgatatgtgtgggtttaaactcccatttccattcatcccatttattatttgctcctttattcctcctttcctcttgtggcagattgcatttcccaaaaatgtatacacaaatacacatacaaatacacacacacagccaggtgcggtggctcatgcctgtaatcccagcactttgggaggctgaggcaggcggatcatttgaggtcaggagtttgagaccagcctgaccaacatgctgaaaccccatctctactaaaaaaacacaaaaaaattggccaggcatggtggtgggtgcctgtaatcccagctactcgggaggctgaggcaggagaatcacttgaactgggaagtggagattgcagtgagccaagattgcaccactgcactccagcctgggcgacagagcaagactccatcttaaaaaataaaaagcaaatacacatacacgtttcatccacttaaaaaaattttacaatgtgattgacatatctcctactgttaataggtatcaacattttctccacttgaattttgatgggagcttgtggctgctattaaatggcagagattatgctatgtgatttccagtgctaggatataaaaaggatacagcttctacctagctttttctctcttgtgttgcttgcccttccaacccagccaccatgctgtgagtaagcttgctctgtggtaagtgagcaggtctgtgcaaacctacccccaaaggccaagggagctgagacactgaacaaagagagtgacaaaacagtttctcagagagaaacatttaataggggcttacaaacagaagctgtgtctcaggcagctgtgagacaaaggatcccctcactgttactccccagacccagggttgatataccatagggaaaggatatacatgcttcagcaggaatatgtaggaatttgcctaagggtaggatttatggtaggtgctcttatacaagagatagtagataaggcagaaatcttaaaggcattcctagaagtgggattaatcagatgtcaactggcagattagaattcaagatggagttgctataacctccacactccagctttctaattgggcttttagaatctcacacactgtcctcttcttcaatggtctttgagtttagaggaagggtgcttgatattgtacagctttagcagcagtgcactggcaatgggaaacagatcaggcccagtgggatttcagatgagaaaaaatgcataggctttcttgaatcatctctagtctttggagtaccatgattttgattttcttggatgaagtaaaacaatgagagataaataacattaatatgcacacaagggactacaatcaaaaacagaatttgtatgccagaacaacaacaacaaaaaagaacctattccattagggagccaactaaaaacaacatgaagaaaattaaaaccgggtttgtctttagagacttcttgtagccacaaaataatttaggatttagtccaaattgtaggcaagtaataaaaacaatggttaagactagaatctaatcatgggtgtacaatagttttcttctgaaacaatttttttctaagtttctctatttctaccaaggataaattattgtaggaccaatttatttgcaaaatgaattttagtctcattatgcttgacctgattatttgcataaagtgcagcaagaatagtgattggccatataggttcttgtaaaattggcttttttggaacttttaaataaagaatctcagatttttttaaagccttgaggctaacaaagccagggatttgccatcaggctgcaatagctgtataaattgggtgaattcttctaaagatttccaaataactggaggttcctgggcatgtcaaaatgcgacattcgccggatgcggtggctcacgcctgtaatcccagcactttgggaggctgaggcaggcggatcacctgaggtcaggagttggagacctcctaacaatggtatttctggttttagatccttgaggaatcaccatactgtcttctacaatggttgaagtaatttacactcccaccaacagtgtacaactgttcctatttctccacatcctctccagcatctgttgtttcttgactttttaatgatcaccattctaactggcatgagatattatctcattgtggttttgatttgcatttctctaatgaccagtgatgatgagctttttttaaatatgtttgttggctgcataaatgtcttcttttgagaagtgtctgtttatatccttcacccactttttgatgaggcagtttgtttttttcttgtaaatttgtttaagttccttgtagattctggatgttagccctttgtcagatggatagactgcaaacattttctttcattctgtaggttgcctgttcactctgatgatagtttcttttgctgaacagaagctctttagtttaattagatcccatttgtcaattttggcttctggtgaaattgcttttggtgttttagtcatgaaatctttgcctgtgcctatgtcctgaatggtattgcttaggttttcttctagggtttttatagttttaggttttacatttaagtctttaatccatcttgagttaatttttgtataaggtgtaaggaagaagtctagtttccattttctgcatatggctagccagttttcccaggaccgtttattaaatagggaatcctttctctgttgcttgtttttgtcaggtttgtcaaagatcagatggttgtagatgtgtagtgttatttctgaggcctctgttctgttccattggtctatatatctgttttggtaccagtaccatgctgttttgtttactgtagccttgtagtatagtttgaagtcaggtagcatgatgcctccagtgttgttctttttgcttaggattgtcttgactatatgggctcttttttggttccatatgaaatttaaagtagttttttctagttctgtgaatagtattgaatttataaattactttgggcagtatggccattttcacagtatcacttcttcctatcaatgagcatggaattatttttccatttgtttatgtcctctcttatttccttgagcagtggtttgtagttctccttgaagaggtccttcacttcccttgtaagctgtattcctatgtattttattctctttgtagcagttgtgattgggagttcactcacgttttggctctctgcttgtctaatattggtatagtaatgcttgtgatttttgcacattgattttgtatcctgagactttgctgaagttgcttatcagcttaaggagtttttagactgagatgatggggttctctaaatatagaatcatgtcatctgcaaacagagacaatttgtcttcctctcttcctatttgaataccccttatttctttctcttgccttattgccctggctagaacttccaatactttgttgaataggagaggtgagagaggacatccttgtcttgtgctggttttcaaagggaatgcttccaggtttgcccattcattatgatattggctatgggtttgtcataaatagctcttattattttgagatatgttccatcaatatctagtttactgagagtttttagcatgaaggggtgttgtaaacattttagcttttataatcctatcaatccttatattttatgctctagtctcaggaacttctgtactccacccccagaccattttaccctctcttgtgaaaaaacctctgggttcccagcaaggagttgagccaagggatgtgggcctttttgtcaatctttatctgattagtctgtctccacattgccccaggaaattattaatcagctttctcattgtaatttttgccttctgatttttgaaacttccccaatctggtgtaaatatagaaaactgatttggggctctttaatgttggggaaccagcagggactccctttggtccacccaacatttgatagtgttgtattaagactcaaaaggtaaacaaaaattttattatctctcattaatactatccaaaaatcttgttcaaaagagaaaactaaattttgctttgtattagagtattatcaatagtaaagctaattttaataaaattttatgaatgatttcattgactctcactcagcttttgaccacacaagaattccataaagcttttctctatccaaaggaatataaataaatcactctaccataaagacacatgcatatgaaagttcattgcagcactattcacaatagcttttcacagtttcaaagacatggaatctacctaatgcccattaatgccctcttacaaaattgctttctatgtttctctttctctaacttttagatctatttatttgtatctatatcatttcttccattcattttgaaacaatctttaaaataccactaaaccgggccagcatgcctacatgctcctagtctttgtgcacgagtgggaggtggcaggcctccaacaatgcagctagtctttgtgcgtgagtgggaggtggcaggcctccaactgtggccttctctgctgactgttctagtgaggcatccccagccatgaaccattttggtacctggttggtgggaggcagggtgaccccattgctgccactgaaagcccgcaacaatgaaaatctcaacaaaattggtatgtctttggatgatatcatcaaactaaattgacagggaggaaagaagcataattttctaactggagcctggcaattcaggatgagcatatgatggagaattcaacagaattctggctttggtaagactagtctgagcacagaggatgagtaatgcctggaaagagacagctttatggagttatcactggccttgcatctaggaaagcaactggaattcacaaagaaattaatcctatgaatcatccgtctctaggtgacaggaatatagaacgatattttctagtgttaaaaaggaaggcaaaccttctgggacaaatatgaagtgcagaaaaaaaccagttgcagttctcaagggacctaaccagctaaacagaaaaaaaaaacattccagccaattttaccaagaatggaaataaattaagccatcagaaacacatgcgtcaggcaacttttcatttcagaagagacgtgaaggttcagacccagttgaacacaacagcaactgctggataacgtagtcggaaagagaactcatcaatggcagatttttgttgcaggacttctttttagttcagctaaagatgtggtccttgtcccacggccacaaaaatttaggctcacaatttgcggagtgagaaaaatggaacttattgggcaaaaaggagaaaagggggaacagttactttcggcaaagccggaatcgcagctagtgcgctccctgcctcgccatttgaatccaaggttccacacaggaagaggaggggccaggctcctccctactgcaaatagcagaaacttcggtggcaccccagtgtgcattcctcccagttcgcccgcggttggagtttttccatggactccttcccactggctgtctcactttcaccacaaacggaggaattttgactctatctttggacaatcctggagcagtgcaatgcctaacacagaaatcaggattaattcatactgctgtatcttcatttttaacaaaatggaagcaatctgacataacgaaagttcctaaagtggaaccctacaattgacataaattgtgctggaaaacagacagagatgactttgaatgagaagtttaggatcctgaaggaacaaagagccactctgacaaacaacaaaggaggaagctgctttgtaactgtattagtctgttcacacactgctaataaagacatacctgagagtaggtaatttataaaggaaagaggtttaatggactcaaagtttcacatggctggagaggcctcacaatcatagcagaagacaaaggagaagcaaagtcatgtcttacatggtgtcaggcaaaagagcttgtgcagggaactcccatgtataaaaccatcagttcttgtgagacttattcactaccatgagaacagtatgggggggaacaactcccgtgattcatttatttccacctggccctgcccttaacatgtggggattattacaattcaaggttaagatttggttgggaacacagccaaaccatatcagtaatcatgggatagatcccatatcaaagggaattttgagtgatgacgctgaaaaattgaattgcttgaagagttcatcacagaaattcaagaaactatgcttcaaaacattcacaaggctaactcatttttatttctgaaggtttttttttttaaataaagcaggtatgatataatgccctgagacaataacagggaatatacctgttcttaaagatttcattgttggctcagacagaacaattatctatttgacttctttggttcctcttatagcagaaggaagatagaaatatagaaactgattatttttatgatagtggtatttaggatctcattgcctttgcccatttttttagattttatcatgacaaatcttggccttctgaaatatgggtaggtccctttgttgctatcagttatcctttaatagtgttgatgcagtaaatacagttgccttgtcttcatgagagatatttttaaaaatattggaattctagtttggagtttcaagatttatgaaaatatctgaaacttggttcacttttcaggtacattttaggctaataccccagaattatgaatttttagtgctgaacttagaaatgtggctctaggcattagtctcagcttaaaatgttggtgcttaaagactgaagatgcatatttacaaagttaatctgatagggccttggaggagagggtccagtttaagaatctgacagtttgtatttagtgaatgaaagcatgagagcaagtagcaagttgaaagacaggtaactgagatgagaaacttcaaaacttaggtcatgtgtactgtttggatttagtgtagtcttgagtctagtgtccacaaataattcttcaaatgatatttagaagaattataattatttaaatggagtccttcagacattttgatagtaaaattaataggcgtaaagtcctaaactttatttgaaaagttacttctcatttgaaaagttaaaatttatgagctttgaagcttgctaaattaatttatagctccaaaaccaaaaatatacttgtatatgtcacaaataacagaagcaaaatatataatagaattacattgtaccttgttgtttacctttcactgatttcttgtatggtataaagctcagtattgatggggagaaaagggcttcgcccctacccccgagacctttgatgggtgggaggagttagtctgtttgccaagatagtgctgagtcctcagatgttgaacactataaattatagtataatgacaaattcagcaaaatgttccagctataagttacaggtttagtcattttgaagcttgacgttttagtttgctataatgttaaaaacatccaagtaggtgatagtttctctggagtatattattagtgttgacttttcctataaaacaaaacatcgttatcgttcagcctgccttgcattttatactagacttcattcttgtctctcatgcttcttgggttacttaatggtttatgctagccctgaaagctatcagtaaaaatttcatgcttatatcaaagaattaaatctgatcctttaatatctgatattttgccagtacttctagtgataagggatttttggaagtcagtcacagaatttaaaaataaattctagtctttcctcagctatttgatactcatccctgttcctgcaaaagacatgatcacattattttttatggctatggggacaaataggccaagtactcattgccaagcatttttgtaagtatgcatgcttatatttggtccagaaacaatgcattctagattggtttagaattactggtagcttattttacagcaaggaaaagcagctgagcaagaatttgctgtctttagaacagtttgtgaaatatgatataagggtgttttcatttcctattccctattctctctctactctgctcctctgaccccattcattgaaaggcagctgccttattttacatgaaggtgtgcaatgcctcagatttctttcagcttgcacccctgatctcggtctgagcacatggtgaagctctacggaaagttggcagatagagaaagacttactctgtggctacagtttcttggaattctagtttatcaaaccaatccacacatatccattaaaagtacattaaattttctgttgatttctccttatttttttctgttgggtttattttttgctgctttatcataattgtaaatcagcatgtaggagagaaaactttctgtttcctatggagcagcttgtcacttgctggagttcaattcatgtagattctttgcattctcagtaatctaatgagttacaaacaaaacaaaaataaagaccaaaaaaaaaaaaaaaaccaacaaccccaaaactaattttgtagtttatgcagatagttgtgtttgttagagagagaacagtggtaactcttgtggctttcttcacactaatcaaaaggagatgggcatttcttaatttttaaaaggttacaaaaagctcagcaagacttttatgtacctgaatggcctgtcagcttctagttttgctttcctttgggtaaatcctaagtacaaagctatggatgttttttctctaaagagcaatacacacaccaccccttttgttctttccaaagattttattctcattcttttgagaagatccttctgggttttttttttttttaactttcattttaggatcgggggtatatgtgcaggattgttacataggtatattgtgtgatgatgctgaggtgaacctgtcaccctgatattaagtacccaataggtagtttttcagcccttgcccccatccctctctctgtcctcttgcagtccccagtgtcttctgttcccaatgtccgtgtgtacccaatgtttagctcccacttataattgagaacatgaggtatttggttatctgtttcttcattagttcacttagggaaatggcctttagctgcatccatgttgctgcaaaggacatggtttcattttttcatggctgtatagtattcctattccatgatccctctatttttttatgttctgttgcaggtaaactcttggatgcaaggcattctgtttccaggacttgaggaagggattagcgtgaagtcaaatgtctcatatatatataaacgttcaataaataaccatattttcaaacccacatcttatttttatcctccattgtacctgatttcttttaaaggttctgtataacagattgtgttatcttcctagatgtattgataccattcatgcatattttggctgctgcttctttaacagtggttcattattgttataaaatttgtcagcttgcttactgtcttctggaaattcattgaaagctctcaggtgtcttgtactagaagactatatcaggaagtttctaaagaactagagggttagaactgactcctaagtggtctgactgctgattcaattcacctttcatcaacccttatctctactttattttactgctcctctttctttcttttttgaggttttgaggttttgctgaagatattcctgaagaatcatcccaggtgccacactaaaaaaatgatccagttgacagctacccctgtgagtgcacttgttgatgagccagtgcatatccgagctacaggcctgattccctttcagatggtgagttttcaggcatcactggaagatgaaaacggagacatgttttattctcaagcccactatagggccaatgaattcggtgaggtggacctgaatcatgcttcttcacttggaggggattatatgggagtccaccccatgggtctcttctggtctctgaaacctgaaaagctattaacaagactgttgaaaagagatgtgatgaataggcctttccaggtccaagtaaaactttatgacttagagttaatagtgaacaataaagttgccagtgctccaaaggccagcctgactttggagaggtggtatgtggcacctggtgtcacacgaattaaggttcgagaaggccgccttcgaggagctctctttctccctccaggtgagtagaattactctgcttattgttattcttgtttttccactttaaatacattatccgtctagaaatttagcttgaatagcttgtagaattactctggttattgttattattgtttttccaccttaaatgcattatccctccagaaatttaacttgaatatggataatacctagagcactgcttcctgccttacaatcaatgttaaccttgggtctgaacaagaatgtggtaatattctactccagctcaagtttcatctcaacaattctgaagcttgtctaagaatgtgactacatatagtttatgtagtccctacattatgggctttacatagctttggatttatgctaaatttttctgcactgaagccaagatgggaggattaatagaggccaacagttcaagaccagcctgggcaacatagccaaactctttctctataaatactaaaaaattagctgggtgtggtagcaggcacctgtagtcccagctactcagcaggggctgaggaggaaagatctcttgagcctcggagattgaggctgcagtgagccatgttcctgatactgcactccagcctgggtgacaaagcaaaaaaaaaaaaaaaaaaaaaaaggataatgcatgcaaaatgcttatcatagaacctggcaatactaagcactcaaagatgaacaaatgttagacaaaactttctatgatctgacttctgcatacttcttcagccttatcttatagctctaatcttatagctatatgaagaccctcatcttgatgtgatggaaaccatatcccagatccttgtacaggctctgtcaggttgagtttcagtttaggcatgggttattaccttgttgccacaacaagctggagataagatggactgaaagattgcagcaaatatagaggatgcaagaaactttgtaacctctagcttcataaatattacatatttatagactattccatgaatctaataatatagcatgcttcctaatggctataaaacttatcagaacgctcatagtttcccacagaaatctccaaataccaataaataagtggtttaaacatgttttggtacatttctcagagtttattgtggggccaaataaagcaaagttaatttctcagaagaaaaaaaagcaataaaagctttcctttccaaattcaccataacccatgtacttgttcggataaatttgagtttttaaaatacccagtaaatagcatatagaccactttattatgtatagggaccaagaattaaatggcacaaattgctgtgcctctattatcccaccccagttaaaaatctgcttattggtacaggccttccatcttgggatgatgtgctggtttagggtgtgctgtttgtgaatcctcttgaacactgcatgtgctgggtctcccgcttcaagtgtgttttctatcgggggaacaaaagagagctgagttgtgtgaggttataaggaggttgagtcagatcacaaatatttcatgactgtaacattcttccaagataaaagactcagtacttttaagtgttcccccattcttgtcaatcagatggtaaaaacatccttattcatttatgcaaatgataatttaaaactaagatatattcaacttcactttatttattatttattcattgtacttaattatagtaatttttaaaaattcccaatactcctttaaatcaagccacttctttcaaatatggatgggatcactctgtcttagttaaaaccacttataaaagaatagaatatccctaataagtgcatcgtaagtttctttcagtgtgtgggctctgctttattttggaaaaaagctgcctatacagagtgactgtagaatgatactctggccgtccctactttttaccacgtgtcagcctgcaaaaaatgaacatggcgttattgaataaaggggctcatcatttacataagcttaggtgtaaggtttcatcactgtatagtcaaatgaatgtagcagagcagtgttaagtcaggattttagctaatacaatcatttaaaaaatgtttttgaatcatgtatttctttgagaaccaaattaaatctgtggaacctctcataagtaaaattcacctacaaatatatatataccatattttgcatatattgtaatttcaggatcttcacagatttcctaaagcttatttgtatacttctttataggttaagaagccctggcctaatttatatgcctttctttacaacaagagtatagaaactactgtgaattcccatttcctcagctgcagagagtaaatatgtctctgaatgtagttcctagtcaaacgtctagatattgtgttccattatatattcaatggaccttaattctgccccaggtagaaggctgaaagtgttggaattgtatttgaatatttaaatgttaatttcaaaattacatttgaatgtaattttgcatttctgctttgtgttctcatgtttttattatcttttatttatttattttatcttttattatctaatcatttgtatttctgctttgtattttcaagttttcttatcttttccacaccttctcttcatgtacaattctgttttgttatttttcaggagagggtctcttcccaggggtaattgatttgtttggtggtttgggtgggctgcttgaatttcgggccagcctcctagccagtcgtggcttcgcctccttggccttggcttaccataactatgaagacctgccccgcaaaccagaagtaacagatttggaatattttgaggaggctgccaactttctcctgagacatccaaaggtaatttttgtcttttcagtaggtttgagtccctggggtttttttgtttctgtttttgtttttgttaaaagacagggtcttgctccgtcacccaggctggagtgcagtggcatgatctgacacttggccagaagccagtgccttttgatactacaatgtgcacaggctaacttcctatgcattttgtctttctgagcaaaagacactggatgagaaataaatcatgtgaattataaataacatgggcatgaatagaatttcaagttcactgagaatcgtacttggaagttaagagaagtcataggatattatggttattttttaaaaagggactggctgggtgtgatggctcaagcctgtaattctagcactctgggaggccaagatgggaggattaatagaggccgacagttcaagaccagcctgggcaacatagccaaactctttctctataaatactaaaaaaatagctgggtgtggtagcaggcacctgtagtcccacttacttagcaggggctgaggaggaaagatcgcttgagcctgggaggttgagactgcggtgagccatgttcctgccactgtactccagcctgggtgacaaagcaaaaaaaaaaaaaggataatgcatgcaaaatgcttatcatagaacctggcaatactaagcactcaaagatgaacaaatgttagacaaaactttctgtgatctgacttctacatactgcttcagccttatcttatagctctaattattaactagctatcatttttctcatcactatacttaactggacagataatctgtatttctttgaagaatgagtctgaatttttagttactcatgagcccttaaacataatactattagtgctttccaatccatatgccttttaaaattttaaaacatgtgctttgctactatgatatgggatagagttggagtttattaaaccttgttaattgcccaatattttttctttcctttccttttttttttttttttttctttttttgacagagtctcgctctgtcacctaggctagaggcagtggcacaatctcagctcactgcaacctccacctcccaggttcaagcaattttcctaccttagcctcctgagtagctgggactataggcgcgtgccaccatacctggctaatttttgtatttttagtagagacggggttttgccatattgggaaagctggtctccaactcctgacctcaagtgatccacctgccttggcctctatttttttttttaataagaattgaaataaaattaaatctccatactacatgtttttttatataaggatcaccaaaatataatcaggtttgcagaaataagataagcaacaattactgacaatctactgatgtagtgaacattttaaatggctatttttgatgcatataatggaactgccctcgaaatgtcagtcaatattatcattgtgagccttcttcttggcttagatgagaagtggagaggttatgtgattctcttttttcacggtctttgcctcgttccccttatatttgctgcatgactttttcatcactgttcttgccagtgtcacatagatagctagttaatgattaatccaggcctggaaaccagatttttttccccagactctgagaaattccattaaacctacttcacattgtctcttctgcaggatgatagaacagagatctttcttgcaggtcttatttctctatgtgttgattttaagtaacttctaagaactcataatttcctgatcccaaattttgtggtagaagttgtaacaagagttactgttttggcaagggacagaaacatattaaaaagcctgcacagatatgagtcatgcttttttgttctttcgtgttatacttgcttttactttatctttcatggccaaatccactctgagttcccatctttccttaacataactgtcgctctctatcttatatattaagatataggattgggaggggtgggggagaaaggtaggtcaaagggtacaaagtttctgttagacaagaagactaagatctggtgatctgttgcacagcatggtgactatagttaataataatgtattgtatatttccaaattgctaaaagattagattttaaatgttcttaccccaaagaaatggtaagtttgtgaggtaatggatatgttaatcagcctgatttgttcattccaccatgtatatatgcactgaaatatcacattatgcaccataaatatgtataattattatttgtcaattaaaaataaaaattaggccaggcacagtggctcatgcctgtaatcccagcactttgggaggccgaggtgggcagatcacctgagatcaggggttcaagaccagcctggccaacatggagaaaacccaactctactaaaaatacaaaaattagccaggtgtggtggcgggcgcctgtagttccagctcgggaggctgaggccagagaattgcttgaacctgagaggcggaggttgcagtgagccgagattgagccaccacactccagcctgggtgacagaatgagactcagtctcaaaaaataaaaataaagtaaaaaataataaattaaaattaaaattaaaaaaatacagaatttcagagcttgaaaggaacttttaattgattcaagccacccctgttaaatatacagggtaggaaatagagagtatatatgactcattccatttgtttagttttttttttccctcttaccctaagaatttctcacattttcatcagcttggcatgagttgtatattgattcatgtgtttctaagtagtagggaaaatatcccaaacattggtttataaaatgcctttaaaatataggagatcaattaaaataaatacaggaagtcaacaaaggttttagaaaagtgatgcttctctctaggactctgtccttgccaggagccagtgctcaaggagaatcggagctttattttgtgacacaacaattttctttaactcctccttagaattcccaaccaaattggtaactgggagcaatacactcaatactcaaaaataactcatgaacatgtagtttccttttcatttttactgctgttaccttagttcaggacagtataattttctgcttttatcagtgcattaatctgtggcttttctgcctccatttatgcaagtcagagttgtaaacacaactattttactcgcttgcttaagagtctccctatttattataggataaaggccaggcttcctagcatgttagacaaagcttcctatgatctgacttctgcatacttattcagtcttatcttatgcccatccttaaaatttgtcctaattttcctccttagttaggaaaaaaactgaagatgcttaatatatctttcaaagctatgcaccataaagttggtgttttctgtttcagacttattatgttatttcccaccttatactctaaattaaaataatgaagaatgacttgtggttcctctaaatgccttgctcttcattgcctctcagtttttgcatgagtttctcctatggtgaatacattaggaatgttttggctacatttctcagaaaagtggctgatggtggcttaaacatcagcataaggtatcttattctcttacataacaggtttggtgataggtggttcaaactttggcttagaaactcagtgtagttttcaatcaaggagattagattgacatttctgcaattttctagccttactctgaaggtcacaaaatgactctggcagtttcaggaattaagtcaacaggccagcatcctagtctgaaaagaatgatcataaacataggctttctcttcatgattctgtgtcagtttgcacggggggcaaaaaaagtccttaggtagaatatgttggccttggaagagaggctgagaaagggaaatagattaggatccatcagaatttatcccttggggctggatatattgctatgccacacaaaatcaaggtcatattagctttgaaattgtggagaatggctcctgtgtaggcaactaacagagtctgctatactcagcatagaataccattccttcttgttgactttcttgtaatttttatttcttgagacagggtctcactctattgcccaggctggggtacaatagcacaatcatagctcactaaagccttgaactcctgggctcaagtgatccttccacctcaacctgagtagctgggcctacaggcacacaccgccatattcaactaattttttagttttgtagagatagggtctcactatgttaaccaggcttggctttcattttttaatacgaagactcatttgttttgtagcccatttcctctgagagcctttctttgatcctgcctttattccctgctaatctgggttggcagtctagcctacatacattctcatatcatagaatttatgatgctccaatcatctggtgtgtttttttttttcctcctgtgtcttcatctggcagtgagttccttaatgacaagagattgttccttttctctctgtgactcccagtgcttgccgtaggatagataatttaaggatgcttatttgatgactgacaatgagggaggaagctgagccaagcctcctttatgacatttttctccacaatgagaaaacttttggaaaaaacaaagcaaatctagaatcctctgttcaactctatcctactgatctcactttctttctcagtctcttcctacaaggtgccctttcctctgaagggaggaaagtgtaccaatcatctataccctgacccacattattcacaatagtcatgtgccatttcttactttccctgcgacatttgcatttctttagggcattttaaactcagaacctaacacaatactgaatccgtaatatatagtcggtaaagcttgacatatttttggagtatttcttttgaatacatattatatattccagaactctatagctagggatgtgggtaggattaatacttgctttgttctcattagccagtgaagttctttggttgtttgagattgtggagttttcctaaatgaaggctagaataatttctcatttctattatttttttcaggtctttggctcaggcgttggggtagtctctgtatgtcaaggagtacagattggactatctatggctatttacctaaagcaagtcacagccacggtacttattaatgggaccaactttccttttggcattccacaggtatatcatggtcagatccatcagccccttccccattctgcacaattaatatccaccaatgccttggggttactagagctctatcgcacttttgagacaactcaagttggggccagtcaatatttgtttcctattgaagaggcccaggggcaattcctcttcattgtaggagaaggtgataagactatcaacagcaaagcacacgctgaacaagccataggacagctgaagagacatgggaagaacaactggaccctgctatcttaccctggggcaggccacctgatagaacctccctattctcctctgtgctgtgcctcaacgacccacgatttgaggttacactggggaggagaggtgatcccacacgcagctgcacaggaacatgcttggaaggagatccagagatttctcaggaagcacctcattccagatgtgaccagtcaactctaagaagactagatattcctagaaaataaagaagcaaatctctttaccgggaccttctctcaattttcatggcggaatgtctcccccagctgccacacacacattttgtattaattttaatgattaaaaagagcatagggtaaaaacctgatatttcacttatactgcataacaagctaaccaaactggacatggtgaataaatcataaaacaaatcattttacttattatttacatgacttttctttccatcaggtcttctaaataggactgaggtatagtacactggcaaaaataagaaaaggcaaacaagaatagcaccaaagtaacagatataaaaccaaataccatgtcagaaaacactatatagtaagaatttatcagattagagcagcaggagaaaattaatactaaattataatcattttagtgatatttttcaacttcaccacagtaactttgcaacatcatttttcatttgtggggtagtaaaattcatgtcaaaaaggaaagaaggaatggaggaggtcagttagttcattgcaataaattacctcttcagttcttaaaaacatgcccattggcacataactgagacataataactaagactggaagagccttggtttaagttatgaagcaaattaaaatggaaaatacaagaaaatagaaccaattaggttgaaaatgccccttactgaaaatctgtattaaaaataaaattaataaaagtaaaaaataaaaatagaaacacaactctactagtacaggctagcctggggagtttgataaactgagtgattgggtcaactatcactgtacttccataatgaatttcttcagtcatgttagagtagcacatgaatgtgagctctataaggacaggtactatatttccgtaagacccaatagttactgtacatcccataaataaaaaatactttagtttgctaaccaactgaatatatgaggactgcatgtaattcaaccacatggttgtttgctgtacagtcctttgcaaatattaaaaaattttttttgctataaggctttgatcatatagtcctcatagcaacataactaccatctagcatgtaccacattttgcaagactttaagttcaacattccaaactgccaatttgtattatgtccaaatgcagtatccttgaggaatatagtgggtcagttaaatatctagagacatacaaacatctgctaattcatctcattgagatggatcattctgatctccatcatccacccacttttcatcagcttctcctacttcattctcctcatagtctttatcatgagggattctgtatcctgtctctcatctacacttgctggccttcctggttgtgatttattggaacagtctacacaaaaaccatagggtcaagatccatgtcttactccaacactggctgctaacatgatcttacataccatacatttgcatttttatccttcttgtgcaccaagaaatgttttcttacatgttttctccaagtgtaaaaagtcacagctaaatgatctcactcctgtatgaataagcaagtgcttttttagtgtttgtttgcatttggctgcatagctacaatgatggcattttaacttattcatgattagagatgatgatatggtttggatatttgttgtgcccaaatttcatgctgaaatgtaatccctagtgttggaggtgaggcctggtgggagttgtttgggtcatgggggtggaccctcatggcttggtactgtcctcatgagagtatgatagtgagtgagttctcaagagatatgactgtttaaaagtgtgtggcacctcctccccatcctcacactctttcttgcctcctctctcgccatgtgagatgcctcctcgctgttcacctgctgccatgattgtaaacttcctgaggcctccccagaagccaagtagatgcaagcattatgcttctgtaaagcctgcaggaccatgatccaattaaatctcttttctttataaatt

SEQ ID NO: 623 - DNA, 24760 bp, Homo sapiens; identical to SEQ ID NO: 9
  source 1..24760: mol_type = other DNA

SEQ ID NO: 624 - DNA, 6570 bp, Homo sapiens
  source 1..6570: mol_type = other DNA
tttaagcaagttccagtgtgtctatatttggtctggctgatcggctggactctggccttccccgctcacattagcagacagctctgccctagtgggcgtttagcctgcgacggcagcccgagaggaagagttgggcagagttgcaggggtctccacagctgaggcagtttggccggattatttgggttcctgctcggatggcggcgacgctgatcctggagcccgcgggccgctgctgctgggacgaaccggtgcgaatcgccgtgcgcggcctagccccggagcagccggtcacgctgcgcgcgtccctgcgcgacgagaagggcgcgcttttccaggcccacgcgcgctaccgcgccgacacccttggcgagctggacctggagcgcgcgcccgcgctgggcggcagcttcgcggggcttgagcccatggggctgctctgggccttggagcccgagaaacccttggtgcggctggtgaagcgcgacgtgcgaacgcccttggccgtggagctggaggtgctggatggccacgaccccgaccccgggcggctgctgtgccgggtgcggcacgagcgctacttcctcccgcccggggtgcggcgcgagccggtgcgcgcgggccgggtgcgaggcacgctcttcctgccgccaggtgactcacctccgctaattgttcccctctgcccatccctgttcctgcgctttccactgtgtgtgtgtgtgtgtccccttcgccccgccccgctcttttcgcttgtgtgtgtgtccctcctcccgccccaccaccaccaccccgggctatgttgcccaggtaggtcttgaactcctggacccaagctatcctcccgcctctgcctccccaagagctaggattgcagggtgagccactgcgcccggccctttgaggggagttacacttatttttttatttttattttttttcgtccctgcgcttttcatacggagaaaggatgtagcttccaacattccggaggttagtgtaaggagacaggaatggaatggaaagttggttggggaattgcccctgccgctccaaaactgagaggtccctcaaacctagtgctcagttaaaagacattgtaagggctgggcgcgctggctcacgcctgtaatcccagcactttgagaagccgaggcgggcggatcacgacgtcaggagatcaaggccatcctggctaacacggtgaaaactcgtctctactaaaaatacaaaaaattagccgggcgtggtagcgggcgcctgtcgtcccagctactcgggacgctgaggcagaagaatggcatgaacccaggaggcggagtttgcagtgagccaagatcgtgccacgcactccagcctgggcaatagagtgagactccgtctcaaaaaaaaaaaaaaaaaaaggcattgtaaggaaagagaaaagacacataatattaaaaacaaacaaaacaaaacaaaaaaaacaggccggacgcggtggctaacacctgtaatcctagcactttgggaggccgaggcaggcggatcaagagttcgagaccagcctggccaacatggtgaaaccccgtctctactaaaaatacaaaaattagccaggtgaggtggtgcacacctgtagtcccacctactcgggagtctgaggcaggagaatcgctggaaccctggaggcagaggttgcagtgagccgagatcacgccattgtactccagcctgggggacaagagtgaaactccatctaaaacaaaaacaaaaacaaaaaacaaacaacaacaacaaaaaattttcaagtagtttcaatgttcttatttatgtatggaccaggaagtcacttttttttttaataaaaagaattccaactggttttctcactgtatttccatggcagctaggaggtgccaggtggctgggcctgtgacagtgcagaggttttggtgcctgcccgcccaccattgctccagctgcagctgctgccccctgcagggcctgttcgttcctgctgcctagctccctgctggctggctatgatctccgtcctgttaccattccaggagagcagccacctccctgtgcatggcaggaccaggtactgattgtggcctctcctcttggcctcgaatggtatccttgtcatcagtgagcaagtccccaaagaccacggtcttgtccattgtcaggataattcactccacaagctgggactccaggtgctgctctacccagcggtgcttctcacccacacagtggtcatactttggcaggggctggtgcagtgtgaagacctcggtgttttgcatgtgcttcatctcttgcaaggccctctggggttgggcttcaagactagggaaaagcctagggcttcacacccatgggccactttatccaccaggtccggcagcagggtgaggtactgcttccagaccaggaagctgcggtgctgctgcagtgtcacatgcagctccctgagaagcggcggctgaagccccacaggatgccgtctggaagctgccagcacgcggtccctgtccatcagcacacgcgtgggctgtgctcatcgctgccggggcactggggtttctcgggatcctaggggtatggggcccagaaatgttctttaaaagtttctcatttttgcaacttttctttcaattcacacagtatgttaaggtttatgtaaattagcatttacaataggaaagcctcttcctgtcaaatggaaatttgaggttactggatacttttatattacataaagagcaatcagccagtgtagaaatgatgcttatccttattaataatcaaagaaatgcaaaataaaacaacagagtacatttcacaccctcagaagtggcccacttttagaagctagcattatcaattgctgaccagtatgtggaggaaatgaaactcactgctagaaggagtcaacatattcatctgctctgggcaacaatttgtcttaacttacaaagttaaatatgttattctacttgtacatgtgcaccaggaggcatattccttataagaggaaagccattgcagatgagcagtctggattaatttaaaaaaagagcaaagtcaactggaaacagtccaaatgtccatcaacaatagaacagattaataaattgaggtatatttccagcagtcaaagtgattgaactacagctagaagaatcaacatctatcaagatatacaaaagaaaagaaaaaaataaaaaagaatcaacatggatgaatctccaaaccactgttgagtgaaacagtcaaacactaggagaacacattcagtatcattccatttagatacagttcaaaaaataggcaaaataaaatattgtttaaggtacataatctaagtggtaatactatgaagaaaaccaagagtgatacacagaaagtccaggatactggaaagagaggaaagggcacaggggtctgtgggacgttgatggtttgcgggtatcagcactgaactatgtcttaaaagtgttgcctgtaaggtgtttgcattctttttttttttttttttttgagacagtgtctcgctctttcgcccaggctggagtagtggcacaatcttggctcactgcaacctccaactcccgggttcaagcgattctcctccctcagcctcccgagtagctgggattacaggtggccgccaccacacccagctaatttttgtatttttagtacagatggggtttcaccatgttggccaggctggtctcgaactcctgacctcaggtgatccacccgtctcagcctcccaaagtgctgggattacaggcgtgagccaccagacccagcctgcattattattctttaattttgtgtgaaacacaaaacctttaatgtaaatgataaaaatattcagtaagtggagtcattcagaatgagtagccttttgagtctgtctccattgaataagtgcattctgttgagtgcactggagaggaatttgtgctcttctatgtagcagtctttctttttgtttcttggtggtgcaccattaaatggattcattcaccagttaaaggacatttgggttgtttccagtctttggctacaatgaataaagtcactataaacacttgccagaagtttctggacgaacacaggttttcatttctcgtgggtagatacctaggagtgggattgctgggtcacatgtgtggtaagtatatgtttaacttggtaagaaaccatccaactgtttcaggaatagcttagttttgcattttgttttgtttcttcccaagaacctgggccctttcctggcattgtggacatgttcggaactggaggtggcctgctggagtatcgggctagtctgctggctgggaagggttttgctgtgatggctctggcttactataactatgaagacctccccaagaccatggagacgctccatctggagtactttgaagaagctgtgaactacttgctcagtcatcctgaggtgagttcttctctcagatttatgggctatgatgtatcaggtctcttcttaaatggtctgggttttcacagaagttagctcattcatgacagccattccctaccccaacacacactaccttttttagtcacttcttatagacagtttctttctttcttcttcttcttctttctttttttgagatggagtctcactctgttgccaggctggagtccagtggtgcgatcttggctcactgcaacctccacctcccaagttcaagtgattcttgtgccccagcctcccaagtagctgggattacaggcacctgccaacatgcctggataatttttgtattttcagtagagacggggtttcacaatatttgtcaggctggtcttgaattcctgacctcaaatgatccacctgccttggcctccccaggtgctggattacaggcatgagccactatgcctagcctaatttttgtattttttttttttagtagagatggggtttcgccatgttggccaggctggtctcaaactcctgacctcaagtgatctgcccacctcggcctcccagagtgctggaattacaggcatgagccaccacacctggcctcttatagacagtttctattcaattctatattactatatttcctgctagtaaagatatttgtagttggtattatgcaattttaaattccagtatgttttttctttctttttttttttttttttttaagacggagtcttgccgtgtcaacgaggctggagtgcagtggcatgatctcggcttactgcaacctccacctcccaggttcaagcgattctcctgcctcggcctcctgagtagctgggactacaggcgcatgccacttctgcctggctaatttttgtatttttagtagagacagggtttcaccatattggccaggctggtctcgaactcctgacctcaaatgatccacccgcctcagcctcccaaactgttgggattacaggcgtcagccaccacgcccggccatgagatgacgtacttgttgatgacgactcagtttagttatgacagtgggaatgggtggctcaggtgggagacagaaaaagatcatgggagataatgagattaaggaactgagaaaccagagtaattgatagatcttccacatggttatcaccaagagtggtgatggacaaattgtggaaaggaagagatagaggggaggtaaattcccaaagctgcaaatctgggtaaatggtagaacccagattcagactcaggttcaactaacttccagggtgggcacaactcaccatattccactgtttgtggagccattcttcttctttttcctttgtccctttctcaggtaaaaggtccaggagttgggctgcttggaatttccaaagggggtgagctctgcctttccatggcctctttcctgaagggcatcacggctgctgtcgtcatcaacggctctgtggccaatgttgggggaaccttacgctacaagggcgagaccctgccccctgtgggcgtcaacagaaatcgcatcaaggtgaccaaagatggctatgcagacattgtggatgtcctgaacagccctttggaaggacctgaccagaagagcttcattcctgtggaaagggcagagagcaccttcctgttcctggtaggtcaggatgaccacaactggaagagtgagttctatgctaatgaggcctgtaaacgcttgcaggcccatgggaggagaaagccccagatcatctgttacccagagacagggcactatattgagcctccttacttccccctgtgtcgggcttccctgcatgccttggtgggcagtcctattatctggggaggggagcccagggctcatgccatggctcaggtggatgcttggaaacaactccagactttcttccacaaacacttgggtggccacgaggggacaatcccatcaaaagtgtaaattttatttgatcatgtggcctctctgttgctaatctctcctggaaacatctgccacatttagtgtgtgtatgtgtattcattctttctcataacttcttaaagtttcttcccctcattattaaaatgaatttaccagt

SEQ ID NO: 625 - DNA, 32744 bp, Homo sapiens
  source 1..32744: mol_type = other DNA
gccatggtcagcgtgaacgcgcccctcggggctccagtggagagttcttacggtaagtggggctgggggaagactggacagggcgggactgcggtcagctttgggaggccatgggacacctccccgtgtgtttcttacgggcccaaagctcctcctggagctcctctggaagggcaggaagccccacggaggcaatgtgaccgcttccctaagctctcaagccggggcatggcctgcttggtgcgagaagtgctgggaggggccgagaagccctggggcagaggcttggctcattttgtctgtccagaggccttcctgggaatgcatctcaggggtctttccaaaaccccacagagggtggggcttggaagcaccgtcctgtttcgatgcggggcaaattgaggtccaccaggagaggcttgctgggcctaggtcacgttgctggtgcattatcaagctgggcgtgggaccgggcagctcggtcgctccgcacctccgttggctctggataatggggaggaggtagaaagcgccgcgcagggtggagcgttggaaaatgagaatatcttgtgcggacgtgtgaaactcagatgcagggctagaaagcatgtgttactgagagtgaaaggctcaggctcactccttagggtgacccccacattggaagcaacccaatgtccctcagcagagggaagacgggtaaataaagcgtgagacgtctttacagtggaatgctatcccattgttcaaggaaacaacgcacatctgtgtgtgacagggaagaacctctcagttaaattaagtgaaaacggtacactgaagaactgtgtagttgctgatagcgaaacggatatagatgtatatatgtacacacgcgtatacgtgtacattccacgcatagaaaattcgtggaatgacacaataaaattggtgacaggtttgtttctgaggagggaaattcaagagaatgttttatcttttggggacacattttggattttttaaaagttgggtgccttttataaacctgttcaaatcacacacccgcacagaacttggtctctggaatccagcagacctcggggtctagttgtgactctgtcacacggctcaacattcacgtgcctcttgctttctttctgaagtggagacaggactaggatgtgtcttaagatcatggtggatgccgtggggaacaaggatgtaaagcccttgataccacgtgcattgcaaagacacaatcaacatttatgtcatcaattgctgaggacagagggccagggaatgacagaatcagggcctgatctcctgactctagtcaggaagaatcttctttgctttgacccccatcaaacaggaatatgtgatgcactggaaatggcagaggctgaagaaaccaacagcctgggaacccatcccacacaccagctgtgtgaccttgggcaagacatttcccctctctgaacctatttcctcatctgtaaaatgaagataacaacaggacctatctcccagagagcggggagattagaggagatagcatagaggagattaagggtgaggccacccttaatccacaattttaagacctggagtatagatgccaatggatgacttggttgaacctgtggctaggggaagacattgtctctcaaaggggccagacagcttctggggaaggacagcccaggtcataaggctaagctaggggtgaacagaaggccccacagtgtctcttaaaggatgatacaataatataacctgacagcctttcactgtctcccacgtctctgcaccttgtaggatgtcctcatgtctcttcatctctgctcctgtgtcatactcattatatagcaaacattcagcaattattagaatggttgcttctatcgacaggtaggtgggtgaatggatggatgaatgggttagtgaatgttctactattatctctcagacagctgtttcattttccaaacggctgtctgagataaataatattgtaatctccaaggacagaagaaaaaactaaggttcaagattaaaaaaaaaacacaaacaaacaaaaaatgtcatctgactcgagacttgacacaatccagctgttgctggccctctgctctaggccacagatatggctggacagagaaaggagaactccagtgaccttgcagtacatccacaaaaaatgagcacttttgtcctggggcagtggaacattcactgcagtgtatgtgtgcctatgtgtatgtgtgtgagagtggctgaaagaccctgatttgatatttttgataaaatacacctgggttagcatcctagatctaccttatttaaaaaaaaaaaacaaaacaaaaaactgtgtggtcttgtgagtcaaatcattacccctctctgagcttcacatgttttatctgtaaaatgagctactgaagtctgctggaaggctccagaaaaaaaaaaaaaagaaaagaaaaatttgctttctgagaaaagaaacaagtgctccgaggaaacaaaacccctctcccaggctgggtgcagtggctcacgcctgtaatcccagcactttgggaggctgaggcgggcagataacttgagattaggagttcgagaccagcctggccaacatggcaaaaccccgtctctactaaaaatacaaaaactagccgggtatgatggcacacgcctgtaattccagctacttgggaggctgaggcatgagactcacttgaacctgggaggtagaggttgcattaagctgagatcatgccactgccactccagcttgggcagcagaacaagactctatctcaaaaaaaacaaaacaaaacaaaaaaacaaaaaacaaacaaaaaatcttcttctggggttctctaatggggataacattaatcatctcctaagatgactatagtagaggtgcattggtgggtcagggacatggcacatagcagagcctcagttagaggcagaggaagacatggctgttgtgaggatcaaatggaaggatccatgagtgcttagaacagtcctgggtccagagcaagcacgcaagaaatcctcgttgtggtttcatgtttttgagctttagcaggattctaaagagctgctctttggtgtggtgatgctgggtggacttggccctccctggacttccggtgcttccacggcacactggttttggctttgcggttctcgtcatcgctctgatcagatagttgctggtgtgaattgtggtgtctggctgccccaccagactataaactccgtgagttctgggacctgggtagtttgttcagccttgtttgtctcactatgtctcacatggtgactggcacagaagaaatgctcaataagcatttgttggatgagtgaaatgatgggcttaaaacagcgctacaatgatgatcatcaatgtcagccagatcccactctcttgccttccttcctctctgccctcctcactgcgttgtctttggtccttgtatttgccccattataacccaaactggctgtcccagcttcagctgtcatgtctgcacttacgtgtctgaagctggaggcaggaggagaagaggttttcctcagtgcccttgtttcttttatccaaaagcaaaacttccccagaaacctcctggcagactcccctagttcaaggaaagctgggaagacaagtatgtagtggaaagagatgggaaagccaagatggacctagaccagtgatttttctcttggggtgtggcacactcctgctccaaacagaactgaggctctggtataaatgagtttctcagcctcagcactgttaactttctggcctggaagattctctgtggtgaggggctgtcctgtgcactgtaggatgttaagcagcatccctggcctttactccccagatgccagtaacatctcttcccatcagttttgccaaagaaaaaatgtctccagaaagccaaatgtaccctggggcacatataaccccactgtgttataggagaacaaggtagttctggggagtgtctaccacaatggagtagagtagactgtgactcttgtgttgttctgctttgagtgccaggatcttgctcagtgccaatctggtactaccctgagtaactctgaggatgagatgctaaacatgcatatctgtgtgctaacctgactcctggccttattacttttctacccttattttccctttaacaagtttcccttggttatttattttgcttctttggtagttgctcatttccgtaagtacctcgaatctccttaaaggaaaggtctgtatctatctcattctttttgttatagtccagccttccacagggcctgatcccatgtagaccttgattgaagattaattaagtggatgaatgaatgggaagatggatggatgaataaatgtatgtttaggtgggtggataggtgaatggactgatgaatgaatgtgatgtgatgaatggatgtgatagatgggtggagggatgcatgaatggaatagagggagaaatagctggatggatgagacaaatgaatgagtaactggggagatggctgggtggatagatgggtggatggattaataaaaagatgttatgggtggatggttgggtgtggaggatgatgcatggatgggtaagtagatggatggaaagatatgtaggtgcatgtgataaatggatgaataagtagctggatagatgggtaggtggttaggggaaggatggatggacaaatgatgtgatgagtgggttgatgaaaagatggatgaatggatggataagaaggggtgggctgaggtagcctggaatagcagcatcttcaagtgctctaaacaggacaagtgaagagataggggatgtcaacaatcttccatcagggcaatactgtatatctgtttttaagtgccaggtgagcctaatttttcctagctatgtaggcctagtccctttgaccaatagcatcagcttgaggacagatcagaggccattgtcggagacagtttggtgatgtggctctgccccttgaagctctatgatgatggtgctttgcttcacttctctggtcctcagtttcttcacccatcaaatgagccttggttgttgtgaagattccatgagctaatgaaagagaaaaggtaatagaagctataacaaacatgccgtgtccttgtgaagggtggataggcccaaaatcgagtaggaccccagatgctggctggctatgggaccgtgtccaatatcaggctatggctgttcccacccttcattcttaaaatatggcccctctccagcccttcccctatctcccctcccacatcaccttcccatcctacgtcaattcagtcttcagcccctatgattcacaaacctggttgcacataggaaactttttaaaacaattttggggctccactccagacccagtgaatcagtctcctggggtgagttccaagagtctgtaattttttgagctccttgtgtgacttagggtatgcagttcagttgaggtatggaaaccattgccttactttctcccatttagtaaacagaggaactaaatatccagagtgcatcttgcctcaacccagaagcctcccgtattcattaattcattgttcatttgttcatttcttcaacaatcttccactggaggcttatggtatttaagacattttgtaaggcactggggaaacacaggaggataaaactttgcttcacgtggtggctcatgcctgtaatcccagcactttgggaggccaaggtgggtggatcacctgaggtcaggagttagagaccaggtagaggcagaggttgcagtgagccaagatcacgccactgcactctagcctggcgacaggagtcagactatgtctcaaaaccaaaccaaaacaaaacaaaaccaaaaaaaaacaacaaaaaaaacaactttgcttcagatcttaaactgtgctcagtttggcaggaggacagacaagccagcagcaaccaaagacagagtgccatgataaggacagcaaaggcactgtgggatacagagggacttaggagaaggggaaggggtcacagacttcttgaccttggaggagtagactgatatctaagctggaacctcggtttagcaggagtcagccgggagaagagacggtggggaagagtgttcccagctgagggaacagcatatgaaaaggcctggagcctggccacacactgctctgattttacttatatttgactgcaattaattccatcctttactgaaagtatcttgagacttgtctggttgtttcatgattgattaatcttattcctaaaagcatgctgaggctgggcatggtggcttattgtggattacacgcctgtaatcccagcactttgggaggctaaggcgggtggatcacttgaggtcaggagttccagaccagcctagtcaacatggtgaaaccctgtctctactaagcatacaaaaattagctggacgtggtgccaggcgcctgtaatcccagctactcgggaggctgaggcaggagaatcacttgaacgcaggtggtggaggttgcagtgagccgaggttgtaccactgcactccaacctgggcaacagagggaaacttgtcttaaaaaaaaaaaaaaaaaaaaaaagcatgctgagatgcttaagtgaaggaattgtgccttccatttttcctgactcatatgcctgtagcataaggatgggtcaatgataacgaaaggaatttgttttcatttaagccccttttatgtaatgggcaagatgttggctatttgatatgttttctcccttttaagccttgcaataacccatccaagtaggaaatattatctccattttataaacaaagaaattgagattcagagttgttaagtcacgtttccctgcatcgccttgcaaataggtgattaaaatctagtctgacaccaaatcttcattctttcagctattatgtcataatagcatccaaggagtttaccaccttctaccacctactagctgtgtgaccttgagtgaatgactcaattctcttttttttttttttttgagacggagtcttgctctgctgcccaggctggagtgcaatggtatgatcctggctcactgcaacctctgcctcctgggttcaaacaattctcctgcctcagcctcctgagtagctgggattgtagctggggttacaagcgcctgccaccatgcctggctaatttttttttatttttagtagagatggggtttcaccatgttcgccaggctagttttgaactcctgacctcaagtgatctgcccgcctcggcctcccaaagtgctgggattacaggcctgagccactgcgcccggccgacccaatcttttttgcctcagtttcctcatctgtcaaatggggttgatgataataccatttacttcacagggttgttgtgagacataaagtcaatatttgtaaagtgctgagtgtctagcacatagaaagtgctatgtgaatttgaacgattattattattatacctatagtgtgtgcatctactatatgcaaaggactggatgcttactaggtgttagcatcattttggctgttgtagaaacaacagagatgagtaaggaatagataactggtcccaggatgcaactgtctctggctggagactaaggacaaggctttgttgcaagccttctggggccctgggatgcccagggtctcctcttgggggtgctggttcatagatgggggcctgtgtggctccttcacagaggaggaggcagatgagaggcatagaaagggaggggacagacctatcctcatcagagacctgggagatggctctggccctggccctgggtagctgtttgtgacctcactcaagtccttctcctgctgtttctccatctactcttttttttttttttttttttttgagacagagtctcaatgtcacccagtggctctatctctgctcactgtaacctccacctcctgggttcaagcaattctcatgcctcagcctcccaagtagctgggattgcacgtgtgtgccaccacacctgacaaatttttgtagtcttggtagagatgggtttcaccatgttggctaggctggactcctggcctcttgtgatcctcccacctcggcctcccaaagtgctgggattacaggtgtaagccacagcacccagcctccatttcctcttttgagaaatggaggtatgacaaccatctggctcagccattgtcacacagtattccctgggtcctaagagtcaggaaagatgctgcagggttccctttgagggtaatgtgggtagggacgtgttcaaatggactagggcttagcctctccccacccttcaacctctggctccatcagagacacttctttttgacttttgtatatttctttttattttattttagagacaggggtctcgctatgttgcccaggctagcctcaaactcctgggctcaagcaatcctcccgcctcagcctcccagcccctgggattacctgctcatgccactgcacccggcactctgttttgacttttaaatgaaatatttaatggagggtctccacagttcaaaaatatttggaaaatcagaagaccacaccagtgtgtttcaaactgcaatcttaacccaggaataggtcatgcaattttttttttattttttttttctagatggagtcttgctctgtcacccaggctggagtgcagcggcacgatcttggctcactgcaacctccgcctcctgggttcaagcaattctctgcctcagcttcctgagtagctgggattacaggtgcccaccaccgcggccagctactttttgtatttttactagagacggactttcaccatcttggccaggctggtcttgaactcctgacctcgtgatccacctgccccgacctcccaaagtgctggggttacaggtgtgagccaccgtgcccagccggtccttcaatttattgggattatattagttcagacaatatagcttatgtaacaagcaaatgcagactttaagttagaagtttattgacctctgtggcatagtcatccagggacccctaaggtcaccctagcccagaaagacactttcacttctactcacattccattggtgagaactagtcacatggcccttgccaaatgcaagggggtctggaagatgtggtccctagcggggcgggactagctgtaaagtttgtaaaggggagcgtgaattagttggtacacagttgatcgtctgtgcagtagggtcatgctcacacgtccctccacacacacacgttaaatatgtataacaagtgtaaatatacaatttaaaaaagtatcttttttttttggtttgtttttgttttgttgttgtttttgaaacagggtcttgctctgtcatgtgggctacagtgagccacaatcatggttcactgcagcctcaacctcccaagctcaagcaatccttccatctaagcctcccaagtagctgggaccacaggtgcatgccaccatgcccagctaattttttatttttatttttttgtagtgacaggtcttgctgtgttgcacaggctggtttcctactcctgtcctcaatcttcctgcatcagcctcccaaaatgccgggattacaggtgtgagctactgcacctggcctttacaattttttacataaaatgtttcaataaaaaagtgcatagatagatacagagatagcaataaagcaaatgtgacagaatgcaaccagttggtgaatttaggcgaagggatacatcagtgctcactatactagtctttcaaactttaaagtttgaaatttttcaaagtaaaatattggagaaaatgaaattcttaaaatttactagacctataagtagactaaaacaataagttataactaaagtaagatttggccggacgccgtggctcatgcctgtaatcccagcactttgggaggctgaggtgggtgaatcacttgaccccaggagttcaagaccagcctgggcaatatggcaaaaacccacctctacaaaaaacacaaaaattagctgggcctggtggtacacgcctgtagtcccacctactcgggaggctgaggcaagaggattgcttgagcccaagaggtgaaggttgctgtgagccgagattacaacaccacactccagcctgggtgacacagcgtaatcctagtgctttgggaggtcaaggcagaaaaattgccaccacacctggacttaaaaaatatttttactgaagtataacattcaaaacagaaaaaggcacaaatcatcaatgtatcgctttatgaaatttcacattttaacaaaagaatgaaataaaataaaatagaaaatatcatagagcatttcatgtagtaagagtaagatatgtatgtttttgaaacttttgttttatttatgtatatttatggatttgtgcttgatgttgtgataatagcaaaaatttatagagtacttactagggttttacacatattaactcctaattctcaaaatgtccctattggccgggcgcagtggcacacgcctgtaatcctagtactttgggagcccaaggtgggcggatcacttgaggtcaggagttcaagaccagcctggccaacatgctgaaatcccatctctactaaaaattcaaaaattagctgggcatggtggcacgcacctgtaatcccagctactcaggaggctgaggcaggagaatctcttaaacccaggaggtggagattgcagtgagccaagatcacgccactgtactccaacctgggcaacagagcgagatcctgtgtcaaaaagaaaaaaacaaaaaaaacagcatactttgtattaggtgaacccacaaagtacaggggccaattgtaggtagtccacaaacacttttaaatctttgtgcatttattgtatgttagaaaaatttatacatagcatattaaagcattaatataaaatatcttttaaaaattaaggtatatcttcaaaagaaaggaaaacatcaagtaaacaattatagataaataaagtacaggtaaaaggcagatgtggtaacaattgtatgaagaggaatacaagtgtctagggcttgggggccacacactaaacctggcatcagaaggcccagatctgggacccggctcatttgttttctagcactaggttgtttttcatccttgtataacaccatggcccaggtactactctaagcactttataaaaattaactcctggccgggtgcggtggctcacgcctgtaatcccaacacttttggaggccaaggtgagtggatcacctgaggtcaggagttcaagaccagcctgaccaacatggagaaaccccatctctaccaaaaatacaaaattagccaggagtggtggtgcttgcctgtaatcccagctactcgggaggctgaggcaggagaatcacttgaacccaggaggcggaggttgcggtgagccgagatcgcgccattgcactccagcctgggcaacaaaagcgaaactctgtctcaaaaaaaaaaaaaaaaaattaacttcttggccaggcacggtggctaacacctgtaatcccagcactttgagaggccgaggcagacagatcatgaggtcaagagattgagaccatcctggccaacatggtgaaatgccgtctttactaaaattacaaaaattagctgggtgtggcacatggctgtagtcccagctactcaggaggctgagacaggagaatcgcttgaacccaggaggcggaggttgcagtgagccaagatcgcaccactgcactccagcctggtaacagagcaacactccgtctcaaaaaaaaaaaaaaaattaactccttggccagacatggtggcgcacacttaaatcccagcactttgggaggctgaggcaagaggctcacttaaggttaggagttcaagaccagcctgagctacaaagtgagaaaataaataaataaataaattactcctttaatcctcacaaccgtctattgaggtaggtactgtcatcatacccatttctgagaaaacaaagtctcagagagactaaatagcttactcaaaaccacgcagcgcatgagaggcggagctagaattcaacatcaaggattgtattagaaaaggcaataccagcttatcaacccaaaacacgagaggagagtttatctctccttcacgcagttgtccagggtccccaactccttcctccctagatggaagatgggctttttttttttgagacataaatatatatatatatgtgtgtgtgtgtgtgtgtgtgtgtatacatatatgtgtgtgtgtgtgtatatacatatatatatatatatatattttttttttttttttttttttttgagacagggtctcactctgtggcccaggctggagtgcggtggtaccatcttggctcatcacaacctccacctcctgggttcaaacaattctcgtgcctcagcttcctgagtggctgggattacaggtttgcattaccacacccagctaatttttatatttttagtagagatgggattttgccatgttggccaggctggtgtcgaactcatgacctcaagtgatccacctgcctcggcctcccaaagtgctgggattataagtgtgagccaccaggccctgccaggaagatgggttttatttgaaccactgggccctactgggatgggtagaattttctgtatcattctgggatccacatcctcctctgaaaatggggttaataatgctagttctatttacccctcagggtagctctgctgctcaaggggatagaggcaagagtgtcctgcaaactgcaaaaagttccttgaatgtaaaatgttagtatgtattgttaatgatattgaccaaagctacattaccatgttacagtgaagattaattgaaacagtgcatggaaagaccttggttcacatacagacaaagtcagctgtgagtaatagccataatagtaatgtggttatgcaatttaaaatattgatttatctccaaattgggatatagttgtataggatctttcttactagcaagttaacacattacgtctataactaaaaaatcaagaagtcttgatttcttgagaagtcagtataaccatgatgtttagaaatacaaacaagaggctgggcacggtggctcacgcctgtaatcccagcactttgggaggccgaggcgggcagatcacaaggtcaggagttcgagaccagcctggccaacatggtgaaaccctgtctctactaataataccaaaaaaattagctgggcatagtggcgggcacctgtaatccctgctactgtggaggctgaggcaggagaatctcttgaatgtgggaggtggaggtttcagtgagctgagatcacgccattgcattccagcctgggcaacaagagcaaaactccatctcaaaaaaaaaaaaaaaaaaaaaaaaaaaaactgggccggccacagtggctcaaaatgctgtaatcctggcattttgggaggatgagtggggggatcgtttgaacccaggaggtcgaggctgtagtgaacaaacatcatgccactgcactccagcttggatgatagactgagaccctgcctcaaaaaaagagaaaggaaaataaataaataaatgaaaatttaaaaggaaaagaaaatatttaaacgctatttcaaacaatctcaaatgtacctggaaacagttgggacaggaagtcatgaagggaatggggcagagttagagaaggtcagagtacagccatgtttcacatcccagctgaaactcctccaacagctttgtatcgcccttcaaatacaacctgagctctttttctttctttctttcttttgtttttctgagttggagtctcactctgtcatccaggctagagtgcagtggcatgatcttggctcactgcaacctccgcctcccaagaagctgggattacaggcgcgtgtcaccatgcccagcaatttttgtatttttaatagagtcagggttttaccatgttgccaggctggtctcaaactcctgacctcaagcgatttgtccaccttggcctcccgtgagccgccgcgcccggccctgggctcttttctttgaccaaaaggctctcacaggctctgactcttgtctgatggtctctcgtctttctccctttggtcactgcagtcagccacactggacttttgttttttttgtttgtttgtttgttttgcgacggagtctcactctttcacccaggctggagtgcggtggcgcgatctcggctcactgcaagctccgcctcccgggttcacgccattctcccgcctcagcccccccaagtagctgggactacaggcgcccgccactgcgcccggctaattttttgtatttttagtagagacggggtttcaccgtgttagccaggatggtctcgatctcctgaccttgtgacctgcccgcctcggcctcccgaagtgctgggattacaggcgtgagccacaacgcccagccacactggccttttgacaatccttcaatcacgccaagcacactcctgccattgggcctttgtacttgctgttctctctgccaggaatgcctcttccccagatctttgcatagctgatttcttctcattgtcagggccttagttcaaatgtcctccactcagagcagcctcccttgaacacccaaatctaagcctgccccacctccatcccttgatagcaattccattatcctctacagcgctgaaattacgtattccttgatctgtttatcatctgtctccttcacagaagttccatgacagcagggagttaggctgtcttgtcccctgctgtatccccagcatgtagaacagtgcttgacacacagtaggcgccccataagtatttgcggaatgagcaaatacagatggggacagctgagtcagtagggtgagcagctggatgggccagtagtggagggaggaaacggcagcctctgcctgggccttgccctgggtaaacagacctctctctccccagacagccactgtttgacgactgtctgccatgggcctggctgagcctgggccgccaaactgccaacgcctctgtattctctgggacaagcagtggaggcagccatacctccagcagagtttgtgaaggagcaggtcagaaagttgtcaaaacaggcatgacgaagggcagaggaggtggggagacagggagagagcaggcggccctgccctgggcagagccagagaaactggagggaggcctgggtgctcccctgggcagcttcccaggcaaacccagctgcctgcagggctcagcgctgggagcaggttgtggtcccagctctagccctgacacacacaggatctcaggtacttgacatttgtaggccttagcttccttacttgtaagttagaggctatgggcagattagtggctttcaaacaattttttttgttgttgctttttgtttttgagacggagtctcaatcttgtcgccgaggctggaatgcaatggttcgatctgggctcactgcaatctccgcctcccaggttcaagtaattctcctgcctcagcctctggagtagctgggattacaggcgcgtgccactactgcccagctaatttttgtatttttagtagagacggggtttcgccatgttggccaggctggtcttgaacacagcaagattctgtctctacaaaaaatacaaaaattagaggctgggcccggtggctcacacctgtaatcccagcactttgggaggtggaggtgggcagatcacttgaggtcaggaattcgagatcagcttggccaacagtgggaaatcccatctctactaaaaatgcaaaaattagccaggcatgctggagcacgcctgtaatcccagctacttaggaggctggggcaggagaatctcttgaacccaggaggtggagattgccgtgagccaagatcgccactgcactccagcctgggcgacagagcaagaccctgtcaaaaaaataaattaaagaaaatcccaactttcacctcctttaaaaaaagtgaaggtctagcaacactgatacctatgagacaacagtctcctggagccactttagattctcatgcttcctctaatttgccgtagtccccactattccttagtgtccccatacggaaacttattaatgaacataaatcaccatgtttgctgtattgtttttcttagaggaacgtgtgaactttgctcacaccctatctgttccatttatttcagttacttctctgggtattgagggcacttgagtgtgggacccctgatcactgagaccaaagcagagttcatttatttgcacgagcaatcttctatttcatagatttaccatgtttttaagtgactacaagaaaagtttaaattatgtctgtggctcacattctatttctattggccagcactggccgggtccctcagattctatagcagtgtacgtgtgcttgctgctaactcattctgcctccattttccattcttgcgtagaccaatcccagtcaaatctcttgggctggtgtcttctccccaccccacagttatctttggtgcctccaccctggttagctggccacctgtctgtccagaggatccaggctccagaactccaggcatgtcttctagaattctccacatgggaaatctcactcccaggccccatctggcagccattgtgttttctttatcagacattcacataaaacaatagtcaatttgaaagctaaatacacatccattcttctgtctccagcctgtaaatttaccccaaatccagtaatttgggaggtggagttggtgggaagaggtttttttttccccctcttctccagggcaagtcatatagtttttctggagatgaggtggactgagtttgggggaagaacacaggtccatctacagtgaaagcgctgactttgtttttggagaagatggtgtcatggcttctctggggagatgagatgagggaatcctgaagacttagggggccgggaggaaaaggaatcttggcaatgatgaagacaccttcaaatgaaggggctaatagggtagtggctgagaatttgtgctgcagtcgggagggcttgggttagagctacatccacagtatgaccttggacaggtgactttatctctctgatcctcagtctcctcatctgtaaaataaggataagaatagacttgacttccacttcaacgagaagtgaaacgagatatcctaccactgcgctttgcacataaaggctctataaatgtcagctgtcatcataaagagccaaaagtggcatttggagtaaatctgatttgtttttaagagatagggttttgctgtgtcacccgggctggagtgcagtggcatagtcaaaacccactacagcctcaaattcctgggctcaagccatcctctcgcctaagcctcacaagtagctgggactacagacacacaccaccatgcctgtctaacgtttactttttaatttttttaagttttaaaattttctgtagagatggggtcttactgtgttgcccaggctggtctcaaactcctagcctgaaatgatccttccaactcagcctcccaaagcactgggattacaggtgttagccaccacacccagcctagtttaattcttttttaatcatccttctctgcatttttgtaattcctctaccatgaacctgctttagttaagtaagaaacagttaactgggggaggagaaataaaaccaaacccctaaaaagcccctaataaacccctaaacgtggggtccaacatgaggtgttatggctgggaaaaggtaagagatcaaactatacacacccttttttttttaaattaaactttttagttttttcagagacagtcttgctccattgcccaggctagaataatggcatgatctcggctcactgcaacctccgcctcctgggttcaagcaattctcctgcctcagcctcctgagtagctggaactacaggcacgcaccaccatgcctggcttctttttgtatttttagtagaggtggggtttcaccatgttggccagcctgatctcgaactcctgacctctggtgatccacctacctcagcctcccaaactgctgggattacaggtgtgagccactgcaccaggccttaattaaacttttattttagattcagggggtacatgtacaggtttgttacatgggtatattgtgtgacactgaagtttaggctatgattgagctcatcacccaagtagtgagcatagtacccaacagagagttttttagcccttgcccttcctctagaagtccgcagcgtctattgttcctctcttgatgtcaacgtgtacccaatgtttagcttccttttacaagtgagaacatgcagtatttgtttttttgtttctgtgttgattcacttaggatgaggtcctccagctccattcctggtgtggcaaaggacacgactttgttcccttttttatttttttgacactgtccttgaacttggttgaggttttgttcccttttatggctgcatactattccatagtgtatatgtaccacattttcattatccattccactgctgatgggcacttaggttgattccatgtctttctactgttttgttttgtttgagatggagtctcactctgtcacccaggctggagtgcagtggcgcaatctcagctcactgcaacctctgcctcccaggttcaagccattctcctgtctcagcctcccaagtagctgggattacaggcatgtgccaccatgcctggctaatttttgtatttttagtagagacacagttttaccatgttagccaggttggtctcgaactcctgacctcaggtgatccgcccgcctcggcctcccaaagtgctaggattacaggcgtgagccactgtgcttggctgatgtctttctattgtgaatagtgctgtgtagaacatataagtgcatgtgtctttttggtagaagaattcattttcctttggttatataccaaatcatgaaattgctaaattgaatggtggttctgttttaagttctttgagaaatctccaaatagctttccacagtggctgaactaatttatattcccaccaacagtgtataagtgttcccttttttccacagccttgccaacatctgttatttttttgactttttaatgacagccattcttcagatatcaagggtggggacaaaaaaagaaacttaataatcattttgactagtgtgagatggtatctcacgatttcatttgcatttctctgatgattagtgatgttgaacattttttcatctttgttggccgcttgtacatcttcttttgagaagtgtctgttcatgtgctctatccactttttgttggggttctttgttttttgcttgttgaattgtttaagttccttgtaggttctagctccttgtagaattgctaagttccttgtagacctttgttggattcagagttcgcaaatattttctcccattctgtaggttgcctgtttactctgttgatagtttcttttgctgtgtagaggctctttagtttaattaggtgtcacttgtcaatttttggttttgttgcgattgctttggaggatttagtcataaattttttgccagggaaatgtttttgttttttttttttgagacagggtcttgctctgtcacccagggtgttaataacttaacaaactgagaccccaagaggaaaggtgattcggccaaagtcatacagtaagttagtggcagagccaagactagaatggtggactgtgggtgttggaagggaactttgaggttgttagggcagcctttcctaaggcgaggcccctcagacaagaaggattctattgttagatgtttgaaaactgctgaattaaagaaagctgcacaaatttcattatccgagaacttctcagaattcttaacacatgacaataccttggccactccaagaaatgcctgcagtgtatagggccctgaattagtttcaagagtcccttgaaggacattgacacctatgcaagctctccctgctctcagacagagaaatgctatatcttagatatactcctagttgcttttaaaaaataggattctagggccgggcatggtggctcatgcctgtaatcccagcactttgggaggttgaggcaggcggatcacgaggttaagagtttgagatcagcctgaccaacatgatgaaactctgtctctactaaaaatacaaaaaaaattagccgggcatggtaattagccgggcatggtggcatgcacctgtaatcctagctactcaggaggctgaggcaggagaattgcttcaacccgggaggcagaggttgcagtgagccgagatcatgccactgcactccagcctgggcaacagactgagactctgtctcaaagaaaaaaatatatatatagatttctagatttttatccacggttgcttgtcattgtgcaaattgttgtcattgtgcaaattgtatgatttttaaaattatactaccaaattgtctgtcgctggtatgtaggaagatggttgacttttttttataatctcatttctcctttttttaaagtaagaaatattacaaatatgcagagaagtatagagaataatattatgaacatttatgtatccacctctcaattttgtcaaatcttactacatgaccatgttttctttggatgttgtttgtttgtttgtttgttttaatgacaaattaaacattacacttagagttgaagccccttgtcttcctgatcccatcaccctgccacccttatcagtggtgatcatggtcaccatttggtatttatcatgtgtatttggtatttatctggtaatgtgtcattaccagacacattttcacagttctaccatacgtggctatataagcaaagtaaaatattttgcttatctggaaaatttatttaaatgatatactgtacatatcctgcagcaacttccttttattactcctcataataggtctctggatcttttcatgatgatacaagttgcaccagaccactcatttaaaatgctgtgtaggctgggtgcagtggctcacctgtaattccaacactttgggaggccgaggcaagtagatcacttaagcccaggagttcaagagccagcctgggcaacatggtgaaaccctgtctctatcaaaaaataaaataaaaaagaaataaaatagataaaatgctgtgtatccatgaagtactatacagtcataaaaaagaatgaaatcatgtcctctgcagcaacatggatatggctggaaaccattatccgaagcaaactaatgcagaaacagaaattcaaataacatatgttctcacctatacgtgggggctaaaccttgggtacacatggacataaagatgggaacaataggcactggagaaaccaaaggggttagagagggagggggcaaatgttgaaaaactacctattgggtaccatgctcattacctgggtgatgaattcattcatactggaaaccccagcatcatgcaatatacctttgtaacaaacctatacgtgtacctcctgattcgaaaataaaagttgaaataacgggccaggcaatgtttaaaaacacatgcagccgggcgcggtagctcatgcctgtaatccaagcactttgggaggccgaggcgggtggatcacttgagatcaggagttcgagacaagcctgggcaacatggtgaaaccctatctctattgaaaatataaaaattaaccaggcctggtggtgggcacctgtaatcccagccacttgggaggctgaggcatgagaatcgcttaaacctgggaggcaggtaaaaaaaacaaagttgaaataacaaaaaataaaataaaagtgtctgtaaatatcctgagtatatttattctgttttgtttatttgtttgttttgagatggagtctcactctgttactcaggctggagtgcagttgcacgatcttggctcactatctcagatgatgctccaaagactattcttatacctgtggatgagagtttctctaggtaacatgcagagatggaatttctgtatcttagacagtggatatcaacacttttaagagatgttgctaaattgctcattcttgaatgccaacttccacttccaacaatagttacagagttttggttgctctacaacctcatcagcacttgattttgtaagatactgaatgtaaaattatgcttcactttcaaatttacatttcctctattactagagaaggagaggctcttttgccatttgagcttcctacattatgagtgtgcttgtttgtatcctttgaccatttatctattgtattatttacctttccttatcaatttgtaggcattttttagcactcttagaaacatcttttatgcatgtatttttttttttttttgaaacagagtcttactctgtcgcccggctggagtgcagtggcgtgatctcggctcactacaacctccacctcccaggttcaagtgatttttctgcctcagcctcccgagtagctggggttacaggcatgcaccgccgcacccagctgatttttgtatttttagtagagacagggtttcactatgttgcccaggctggtcttgaacacctgaccaaaggtgatccatccacctcagcctcccaaagtgctgggattacaggtgtgagccaccacgcccagccgaccatttttaaacgtacagttcagagacattaaatatattcacattgtaatacaaccatcagcaccatccatcacctgaacttttttcatcttcccacactgaaactgtacccattagaaaatagctccccttgggaggctaacatggagaaacctcgtctctactaaaaatacaaaataaatactaaaaatacaaaaaaattagccgggcgtggtggtgcgtgcctgtaatcccaggtactcaggaggctgaggcaggagactcgcttgaacccgggaagtggaggttgcagtgagccgagatcgcaccactgcactccagcctgggccacagagagagaccccgtctcaaaaaaaaaaaaaaaagaaaagaaaagaaaagaaaatagttctcctttcttcccaggccctggcaaaccccttctactttctgtctctgtgaatttgactactttcctgtaggctagtggaatcatacagtatttgttctttgtgactagcttttcccctagcataatgccctcaggatccatccatgttgtagcatgtgtcagaatttccatcctttttaaggctgaataatattccattgtatgcatataccacattttattgatccattcatccattgattgacacttgggttgcctgtaccttttggctattatgaataatgctgctatgaacttgagtatacaaatctctcttccagatgctacttttggttcttttgggtatatactcgggagtacaattgctagatcatatgatagttctatttttcattttttaggaagccgccatactgcttgccacagaagctgcactattttacgttcccaccagcagtgataggaacgtaaaagggttacaatttctccacatcttcaccaacacttactattgtctgttttgttgttgttttataatatccatcctaatgggtgtgaggtggtctcttattgtgtgttttgtttgtttgtttgtcttggttttttttggagacatagtcttgctctgtcgcccaggctggagtgcagtagtgcagtctcagctcactgcaaacttctcctccagggttcaagcgattctcctgcttcagcctcccaggtagctgagattacaggcatgtgccatcacacccggataatttttcttttcctttttttttttttttttttttgagacagagtctcactgtgtggcacagactggggtgcagtggcgcgatcttggctcactgcaacctctgcctcccaggttcaagcgattctcctacctcagcctcctgagtagctgggattacagatgcatgccaccatgcccggctaatttttgtatttttagtagagatggggtttcaccatgctggccaggctggtcttgaactcctgacctcgtgatccgcccgccttggcctcccaaagtgctgggattacaggcgtgagccactgtgcctggcccacacccagataatttttatattgtttagtagatttgggattttgccatgttggccaggctggtctcaaactcctgacctcaagtgatccacttgccctggcctcccaaagtgctgggattacaggcatgagccactgtgcccagcctcttattgcagttttgatttgcacttccctaatgattagtgatgttaagtatctttttatgtgcttaatggttatttgtatatcttccttggagaaatgcctattcaagtcctttgccaatttttttgttttcttgagacaggtcttgctctgtcacccaggctagagtgcagcagcaggatcgtggctcaccacagcctcaaactccttgactcaagtggtcctcccacctcggcctcccaagtaagctgggactacaggtgtgcagcatgcctggctaatttttaaatttttctgtagagacaaagtttcactatgttgcccaggctggtcttaaactcctgagctcaagcaatcctcctgcctctgcctcacaaagtggtgagattacagacttgagccactacacctggcctctttgtccatttttaaagtttttggttgttgttattgagttgtaagagttctttatatatttcggacattaaccccttatcagatatatgattggcaaatattttctcccattctgtaagttgctttttcactcagtcaagtgtcctttggtgcacaaatttttctaattttgatgtagtccaatttatctaatttttaaaaatttcctgtgcttttggtgtcatatccaagaaatcatcaccaaatctaatatcatgaagcttttcccttatgttttattccaaaggttttatacttttccgtcaaactcatttttagttaattttcgtatatggtgtaaggaaagagtctgatttcattcttttgcatgtggatatacagtttcccaaacatgaatttggttttgatagtactttgttaattaagacttttgcacctggtagacgctctttgacctctaacccactggaatcctctcaccatccttccctgacagttgaccatttagcttgggcttaatacttccaatgacggaatactcactacttaataaagcagcttttcctgtggtagaacaattgtattttatagaaagatctccattttgagcctcaagtttcctccctgtagcatccacattttggtcctcgttcattctctgaagctgtaggaatcagtgagagctttttttttttttttttttgagacagagttttactctgtcacccaggctggagtgcagtggcacgatctctgctcactgcaacctccaactccagggttcaaatgattctcctgtctcactctcctgagtagctgggactacaggcacatgacaccacatctggcttatttttgtatttttagtagacggggtttcaccatgttggccacgtgaaactggtctcaaactcctggcttcaactgatctgcctgcctcagccccacaagtgctgagattacaggcgtgagccacttcacccagccagtgggcactcttttccaaaggaaagtactttgttgccttttttttgagactgagtctcaatctatcacccaggatggcgtgcagcggcacgatctcagctcattgcaacctctgcctcccaggttcaagtgattcttgtgcctcagcctcccaagtagctgggattacaggtgactgccaccacgcccggctaatttttgtgtttttagtagagacagggtttcaccatgttggtcaggctggtctggaactcctgacctcaagtgatccacccacctcagcctcccaaagtgctgggattacaggcctgagccaccgcacccggcaggaaagtactttgaattgagtaaataacgcaactatatgctgggcagctacctgccaggtttataaggtttaacacatttactccacaaagcaatctatgaaaaggtcctatcattgattcctattttatagatgaagcaaataaggcttgaagagcttatgattttagcaaggtccaacagctatgtaaatggcaccactgatatttcaaaggcaatggccctgaccactctgctacaccacctttctctcctcttctccaatacccagcccaaaactcttttggatctttgattattcttcaaggggcatagctttctttctttctttctttcttttttttttttgagacgaactctcgctctgctgccgggctagagtgcggtggcgagatctcggctcactgcaccctccgcctcccaggttcaagcaattctcctgcctcagcctcccaagtagctgggactacaggtgcgtaccactacgcaaggctaatttttgtatttttagtagagatggagtttcaccatgttggccaacatgatctcgatctcttgacctcgtgatccgcccgccttggcctcccaaagcgccaggattacaggcatgagccatgccgctgcactcggcctaaggggcatagctttctcatcctctgccatcctaggaaaattttaagtattcatattaaaatgaaaactaaacacaattgtccatatatgctccttaggagtagaatgccaaggacctcttagctcctctgacctgggaactacattctctctaatgatacatacgactgggttagaggtttgggcagctgccaccaagtaaaacctctagaattttgctatgtcactttctgctaaggtagcttttcccatctacactaaataaataaatcatccaggtgatttatttttaaccaatgcagaggattttttacttatctccatggagttcaaacatttctccaggctgggtggggtgactcacgtctgtaatcccaacactttgaagactaagaaggggcagattgcttgaacccaagagttccagaccagcctgggcaacatggtgaaatcccatatctacaaaatatagaaaaattagccaggggtggtggtccacacatgtagtcccagctactctggaggctgaggtaggaggatcatctgagcctggagacttggaggctgcagtgagctgtgatggcgccactgcactccagcctgagtgacagagaccctgtctcaaaaaaaacaaacaataattcaccaaatctatttggatctggatcctgccatcattttataggtaatgcctccatagcactcactaagtgccaggcacacttctaagccctttttatacattaacacaaataatccccaccacgacctaatgccatacacatcattatggtcactattttgcaaataagaaaacagtcacagagcagttcagtaacttgtccagggtcacacagctagtccatgactgaaccagaatttaagcccaggatgtcaagttccagaattggtacactcagcctcaatactgtgctgccttcaaatattctgacaatcttagacagctttggggatccaaaagattgagaagtactcttggggacctcttttttttttttttttttaaatacggagtctcaactctctcccccaggctggagtgcagtggtacaatctcagctcactgcaacctccgcctcctgggttcaagtgattctcctgcctcagcctcccaagaggctgggatattacaggcacatgccatcatgcccagctaatttttgcattttaagtagagacaggatatcaccatgttggctagggtggtcttgaactcctgacctcaagtgatctgcccacctcagccccccaaactgctgggattacaggcatgagccaccgcacctggctcccattttttttttaagacggagtttcactcttgttgcccaggctggagtgcaatggagcgatctcggctcactgcaacctccgcctcccaggttcaagcaattctcctgtctcagcctcctgagtagctgggattacaggcacatgccaccacacccggctaatttttgtatttttagtagagatggggtttcctcatattggtcaggctggtctcgaactcctgacctcaggtgatcttcccacctcggcctcccaaattcctgggattacaggtgtgagccatcacgcctggcccctggctccttttttttttttttttttttttttttaaataaagaccaaaggtccagaggctttgaaaggcaaatagtattaagtcaggatttgatatcaggatttctttcattctgtttattttctcattgctttctacttatgatactgtttcatttggtagtaataatatttctttctaaaataaattgaagtaaaaagaagtgagttgatgtaagaaaaatgttacagatatgaaaaaatcataatggtcattaaaaaattagtgaaactttggaaagactgtgttcagtcaagtgaagtgaagttagcttgcaaccacaaaaaaacccctaagtctcaatggtttgaacagcaaagttaattgctcacctatagtacacgcccagcatgggtcggcagggggcgctccgcgttgtggaacgattcatatctatacttgcttccccaacaagggcagcactggcctttaaagcttctgcccaggtgtgacacaggttgtttctgctcacatctcgttacctgaaacaagtaacatggtcacatctcatttcaaaggaagcaagaaaatgtaatccccatcatgtgccggaaaggagagaaatagaatagttgagaacagccctcagagagactataagtaagggggcataaaagatgggtctagagagataggctgagtcatgactcactgaatttgtctgacgtagatcatgatggcccatcccaccaagtggccaacatttgttcccagaaaagggagtgtgatgatcccccagaaagaacacagtctgacaacattattctgatgagcagacacacctctcaggctgccactcaggagtccttttgggtggggaggtggggatgctgatatttcctaagtggtttcagctgaactctgtgatcttttttttttttttttttttttttttttgcctattccctgaagggagatgaggcaatttgggctttggctgagctagggtttggttctgtcaccacttgctatctagggaagggtaataattggaaaggagaggaattcaaggagagggtccaggtgggtagggagcctcacacagggtttggtgatcaggtgattgagaggcctccttgaggagttttcaaagtgcggtctgagggcacctggtatcagaagtgcccagaagctcattaaacacttgggccaggtgctccatggctcctgcctttaatcccagcactttgggaggctgatttgcttgaggctggggttcaagacaagcctggacaacatagcaagacacctccccccgtctctattttttaattaattaatttgtttgtttattaatttatggactctcactctgtcgcccaggctggagtgtagtggcctgatctcttctcactgcaacctccgcctcccaggttcaagcaattctcctgccccagcctcccaagtagctgaaattacaggcatgcaccaccacacccagctagtttttgtacttttagtagagacaaggtttcaccatgttggccaggctggtcttgaattcttagtctccagtgatccacctgccttggcctcccaaagtgttgggattacaggcatgagccaccatgccccacctctatttattaaatattttcttttttttaatctgatgactaggcccactgttggtcctggcacctggaggtaggaccccaggcatctgattttttttgttgttttttttaaggcagggtctcgctctggcgcccaggctggagtgcagtggcacgatcttcactcactggaacctccacctcccaggttcaagcgattctcctgcttcagcctcccgagtagctgggattacaggcatgcaccatcacgcctggctaattttttttttaatagagacagggtttcaccatgttggccaggctggtcttgaactcctgaactcaggtgatccacccacctcccaaagtgctgggattacaggcgtgagccaccgtgcccagccaccatctgatttttttttttttttttttttttttgagacagagttttgctcttgttaaccaggctggagtgcaatggcacgatcccggctcaccacaacctctgcctcatgggtttaagtgattttcctgtctcagcctcccaagtagctgggattacaggcatgtgctaccacgctcggctaattttgtatttttagtagagacgaggtctcaccatgtttggcaggctggtctcgaactcctgaactcaagtggtccacctgcctcagcctcccgaagtgctgggattacaggtgtaagccacctcgcccagctgccatctgaatttttaataatggccccagatgattcttatggacaccaagatttgagaagcattgaatgactgagagaaaatttcttgtaagggtagaagcccagcacagtggttctcagtggagataatttcaacccccaagggacatttataaatgtctggagatagttttgattatcacaccttgagggtagggaaaagtgctgctgacatctagtggctagaggccagacatgctgccagggacaatgtacaggacagtccccacgacaaagaattctctagcccaaatgtcattagtgcttaggtcaagaaaccctggttagccattaagagtttgaacctttctaaatgttggagcacatacgatttttaaatcttcaatttttattttattttccaaaatttctactatatgcatagaatccttttcattgaatacctgttacgcaccgagcacttgaagtttacatcactatcagttcctcttgaaagaccttttcagtcattcatccaacaactatccattaaacacttactaaaatgtattccaggccaggtgtggtggctcatgcctgtaatcccagcactctgggaggccgaggtgggtggatcacctgaggtcaggagtttgagatcagcctggccaacatggcgaaaccccgtctctactaaaaattaaaaaattagctgggtgtggatcccagctactcaggaggctgaggcaggagaattgcttgaacctgggaggcggaggttgcagcaagccgagatcgtgccattgctctccagcctgagtgacaagagcgaaacttcatcttaaaaaaaaaaaaaaaaaaaaaaaaagaagtattccaggcagaggggaaagtatatgcaaaggcccccaagacaggaaagaaaaactttaaaatggctagtatgcctgctgctgataggggtgggggcaagtggaatgaaatgaggttggacacggagggatataaaaacaagggcgtgcatggcctcacagtgttaagtgggagttgtatgagttttgttataaatgcataggaagtcataaaaatttaagtagaagaggatctgagccaatgtacatttgtacaagatcacccttggcccctgagtgaagagtagggggtagggaagccacaggagaaaaagtgaaggggtggggtggaggcaggcggggggggggggaggcggggggggcggtggagcgggggagatcccctccccaaccctggcaggtttaaaaaaaaaaaaagggaagaagtgaaaagacttttgcagacctccagagatgatgcataaggttggctggggtggagatggaaagatggaaaatctagattctgtttggagggtggcaagaactggattttctgatgaactggaaggcatgagaaacacaacacaaagattgtgacttgcaagatgttggcttgaataattgagagaaggtgggtgatgatatatgacatgtagatatgactatcattctcttttgacgactgaggaaggggaggtgagtcgtcctacttcacaaagatagtatatgggctccaggtgtgtctaacccaaaggttataatttttccacactcctatatccacacattaatttttttttttaaattgagacagagtctcactctatcacccaggctggagtgcagtggcgccatcgtggctcactgcagcctccaactcctgggatccagcgatcctcccaccttggccacctaaagctggagttacaggcatgcaccatcacgccctgcctatcttaattttcataatgggtatgacatttactgatagtaatatcattatacatgccccatacatgctaacatctgcttccacatggaagcagcacaaagcctggaaccttcctcaaagaccccccccacccccgtacattggaacaaggtgctgggaacagaagtttagtaggtggtggaagggcagcggctgctaccctgggaactggttttaaaatcttacgttctgattgctgccgtggccatgtgctggtgtgtgatggggagatgttcttttaggtaactaaatcca

SEQ ID NO: 626 - DNA, 8038 bp, Homo sapiens
  source 1..8038: mol_type = other DNA
acctgcgtgagttccgctccaggctgatggaagctttgttcttttgtacttcacaataaaccttgctactgctccttctttgggtccatactgcatttcagagctgtaacaccgtgaaggtatacagcttcactcctgaagccaagaccatgaacccactgagaggaacaagaaaaacaactctggacctgctgcctttatgagctgtaacactcaccttgaaggtctgtggctttactcttgaagtcggtgagaagcgagaccatgaacccaccagaaggaacacattccggacgcatctgaacatcagaggaaacaaactccagacacactacttttcagaactgtattaagaactgtaacagtcactgcgagggtctgcggcttcattcttgatgtcagcgagaccaagaatccaccagaaggaaccaattccagacacagaattatttgccttcttacttcctgagagttctaggcacagaacatacttgaggtgttatacaaaggtaattagaactgacagggaattgtatgattaatgacgtgggacatgagagatttggaacgagataaaaaggcttaccttgaggacagccttattaggagcagaggcaaacacaggttttgtgggtttgaagcctacacatttatagctttctctaattacacaggtaggaaattataaaatcaggtacaagggcttggcaggggcctaaagcttaagtgatgaaaaaaaaaaacaccacacctctggtgaaaccaatagcttacgaaaaagtagaaaaaagcgcgatgcatggggagctccggtagtcctttgaggtatttgagaggctgagtcaggaagatggcttgagcaccaggagttggaggtttgtaagtgcagtgatggtaaactgccgctgtactccagtctggcaatgtagtgagaccctgtctctcaaaaaaaaaaagtaacccttgcctgactgggacaataattgagaaaccagtaaaacaaaataataactattagccgggcgcggtggctcatgcctgtaaatcctagcattttgggaggctgaggcgggcggattacaaagtcaggagtttgagaaattactacctattaccccatttggctatttttacacttgtaaggaatgaagctcagaggtcacacagctagtaagaagccagcacccttcgatgtgggattgatgtggaggataggcatatacagagaacacaaaagcaaaacaccatggtgcagattttgaaagaaaagccctaagattagtaatgagtgtgaattattcaacaaagtgatcaaaactaactccagctctgcattcctcttcgccatcaggagtttggagcctggagactgctagctgcctggttctttaagaaccagccctggtccagcccattccgcaggccagcaagcttctgaaaagcaaacctaggaagtagctttccaacataaagtggaggtttcaacacaggagactttaagcaagttccagtgtgtctatatttggtctggctgatcggctggactctggccttccccgctcacgttagcagacagctctgccctagtgggcgcttagcctgcgacggcagcccgagaggatgtctaacaagcttctttctccccacccccattcagttgttctcaggtctgaattcaaaatggcctcatctcctgctgtccttcgagcgtcccggctgtaccaatggagcctgaagagttcggcgcagttcctggggtctccacagctgaggcaggttggtcagatcattagggttcctgctcggatggcggcgacgctgatcctggagcctgcgggccgctgctgctgggacgaaccggtgcgaatcgccgtgcgcggcctagccccggagcagccggtcacgctgcgcgcgtccctgcgcgacgagaagggcgcgcttttccaggcccacgcgcgctaccgcgccgacactcttggcgagctggacctggagcgcgcgcccgcgctgggcggcagcttcgcggggcttgagcccatggggctgctctgggccttggagcccgagaaacctttggtgcggctggtgaagcgcgacgtgcgaacgcccttggccgtggagctggaggtgctggatggccacgaccccgaccccgggcggctgctgtgccagacgcggcacgagcgctacttcctcccgcccggggtgcggcgcgagccggtgcgcgtgggccgggtgcgaggcacgctcttcctgccgccaggtgactcacctccgctaattgttccgtgttcgttcgcctttcactttgtgtgtctcccccgccccacgcttttcgcttatgtgtatgcccccccgccgcgcccccgggctatattgcccaggcaggtttcgaattcctggtctccagctatcttcccgcctctgcctccctaagagctgggattacagggtgagccaccgcgcccggcactttgaggggagttacactttttttttttttccgtccctgcccttttcacacgaagaagggatgtagcttccaaccttccggaggttagtgtaaagaaacaggaatggaatggaaagctgattggggaagtgtccctgccgctccaaaactgagaggtccctcaaacctagtgctcagttaaaagacattgtaagggccaggcgcagtggctcacgcttgtaatcccagcactttgggaagtctcggcgggcagatcacgagatcaaaagattgaggccatcctgactaacacggtgaaaccccgtctctactaaaaatacaaaacagtagctgggcgtagtagcgggcgcctgtagtcccagctactcgggaggctgaggcaggagaatggtgtgaacccgggaggcagagtttgtagtgagctgagatcgcgccactgcactccagcctgggcgacagagcgagactccgtctcaaaaaaaagacattgtaaggaaaggaaaaagacacttatattaaaaacaaaacaggccgggcgcggtggctaacgcctgtaatcctagcgctttgggaggccgaggccggcggatcacctgaggtcaggagttcgagaccagcctggccaacatggtgaaaccccatctctactaaaaatagaaaaattagccaggcgtggtggtgcatgcctgtagtcccaactacttaggaggttgaggcaggagaatcgctggaacccgggaggcagaggttgcagtgagctgagatcatgccattgcactccagcctgggggacaagagtgactctatcttaaaaaaaaaaaaaaaaaattcaggtagtttcaattttttaatgttcttatttatgtattgactaggaagccacttttttttttttttaaataagaattccgactggttttctcactgtatttccatggcagctaggaggtgccaggtggctgggcctgtgacagtgcagaggttttggtgcctgcccgcccaccattgctccagctgcagctgctgccccctgcagggcctgttcgttcctgctgcctagctccccgctggctggctatgatctccctgttaccattccaggagagcagccgcgtccctatgcatggcaggaccaggtactattgtggcctctcctcttggcctcgaatggtatctttgtcatcagtgagcaagtccccaaagaccacggtcttgtccattgtcaggataattcactccacaagctggggctccaggtgctgccctacccagcggtgcttctcacccacacagtggtcatactttggcaggggctggtgcagtgtgaagacctcggtgttttgcatgtgcttcatctcttgcaaggtcctccggggttgggcttcaagactagggaaaagcctgggcttcacacccgtgggccactttatccaccaggtccggcagcagggtgaggtactgcttccagaccaggaagctgcggtgctgctgcagtgtcacatgcagctccctgagaaggggcggctgaagccccgcaggaggccgtctggaagctgccagcacgcggtccctgtccatcagcacacgcgtgggctgtgctcatcgctgccggggcactggggtttctcgggatcctaggggtatggggcccagaaatgttctttaaaagtttctcatttttgcaacttttctttgaattcgcacagtatgttaagatttatgtaaattagcatttacaataggaaaacctcttcctgtcaaatggaaatttgaggttactggatacttttatattacataaagagcaatcagccagtgtaaaaatgaaatgatgcttatccttattaataatcaaagaaatgcaaaataaaacaacagagtacatttcacaccctcagaagtggcccacttttagaagctagcattatcaattgctgaccagtatgtggaggaaatgaaactcactgctagaaggagcaacatattcatctgctctgggcaacaatttgtcttaacttacaaagttaaatatgttattctacttgtacatgtgcaccaggaggcatattccttataagaggccagatgagcagtctggattaatttaaaaaaagagcaaagtcaactggaaacagtccaaatgtccatcaacaatagaacagattaataaattgaggtatatttccagcagtcaaagtgattgaactacagctacaagaatcaacatctatcaagatatacaaaagaaaagaaaaaaaaagaatcaacatggatgaatctccaaaccactgttgagtgaaacagtcaaaccctaggagaacacattcagtatcattccatttagatacaattcaaaaactaggcaaaataaaatattaaggtacataatctaagtggtaatactatgaagaaaaccaagagtgatacacagaaagtccaggatactggaaagagaggaaagggcacaggggtctgtgggacgttgatggtttgcgggtatcagcactgaactatgtcttaaaagtgttgcctgtaaggtgtttgcattttttttttttttttttttttttttgagacagtgtctcgctctttcgcccaggctggagtagtggcacaatcttggctcactgcaacctccacctcccgggttcaagcgattctcctccctcagcctcccgagtagctgggattacaggtggccgccaccacacccagctaatttttgtatttttagtacagatggggtttcaccatgttggccaggctggtctcgaactcctgacctcaggtgatccacccgtctcagcctcccaaagtgctggggttacaggcgtgagccaccggacccagcctgcattattactatttaattttgtgtgaaacacaaaacctttaatgtaaatgataaaaatatcagtaagtggagtcattcagaatgagtagccttttgagtctgtctccgttgagtaagtgcattctgttgagtgcactggagaggaatttgtgctcttctatgtagcagtctttctttttgtttcttggtggtgcaccattaaatggattcattcaccagttaaaggacatttgggttgtttccagtctttggctacaacgagtaaagtcactataaacacttgccagaggtttctggacgaacaggttttcatttctcgtgggtagatacctaggagtgggattgctgggtcacatgtgtggtaagtatatgtttaacttaaaccatccaactgtttcaggaatagcttagttttgcattttgttttgtttcttcccaagaacctgggccctttcctgggattgtggacatgttcggaactggaggtggcctgctggagtatcgggctagtctgctggctgggaagggttttgctgtgatggctctggcttattataactatgaagacctccccaagaccatggagacgctccatctggagtactttgaagaagccatgaactacttgctcagtcatcccgaggttagttcttctttcagatttatgggctatgatgtatcaggtctcttcttaaatggtctgggttttcacagaagttagctcattcatgacagccattccctaccccaacacacactaccttttttagtcacttcttatagacagtttctttttttgagatggagtctcactctgttgccaggctggagtccagtggtgcgatcttggctcactgcaacctccacctcccaagttcaagtgattcttgtgccccaccctcccgagtagttgggattacaggcacctgccaccatgcttggctaatttttgtatttttagtggaggcggggtttcacaatattggtcaggctggtcttgaactcctgacctcaaatgatccacctgctttgacctacccaagtgctggattacaggcatgagccactatgcccagcctaatatttgtatttttttttttttaagtagagatggggtttcgccatgttggccaggctggtctcaaactcctgacctcaagtgatctgcccaccttggcctcccagagtgctggaattacaggcatgagccaccacacctggcctcttatagacagtttctattcaattctatattactatatttcctgctagtaaagagattcgtagttgttattatgcaattttaaattccagtatttttttttttttttttttgagatggagtcttgctgtgtcacccaggctggagtgcaatggcatgatctcggctcactgcaaactccacctcccaggttcaattgattcttctgcctcagcctcccacgtagctgtgactacaggcacgtgccactactgcccggctaattcttgtatttttagtagagatgtttcaccatgttggccagactgatctcaaactcctgacctcaaatgatccacccgcctcagcctcccaaactgttgggattacaggcgtcagccaccactcccggccatgagatgatgtacttgttgatgatgactcagtttagttatgacagtgggaatgggtggctcaggtgggagacagaaaaagatcatgggagatacgagattaaggaactgagaaaccagagaataattgatagatcttccacatggttatcaccaagagtggtgatggacaaattgtggaaaggaagagatagaggggaggtaaattctcaaagttgcaaatctgggtaaatggtagaacctagattcagactcaggttcaactaacttccagggtggacacaactcaccatattccactgtttgtggaatcattcttcttctttttcctttgtccctttctcaggtaaaaggtccaggagttgggctgcttggaatttccaaagggggtgagctctgcctttccatggcctctttcctgaagggcatcacggctgctgtcgtcatcaacggctctgtggccaatgttgggggaaccttacactacaagggcgagaccctgccccctgtgggcgtcaacagaaatcgcatcaaggtgaccaaagatggctatgcagacattgtggatgtcctgaacagccctttggaaggacctgaccagaagagcttcattcctgtggaaagggcagagagcaccttcctgttcctggtaggtcaggatgaccacaactggaagagtgagttctatgctaatgaggcctgtaaacgcttgcaggcccatgggaggagaaagccccagatcatctgttacccagagacagggcactatattgagcctccttacttccccctgtgtcgggcttccctgcatgccttggtgggcagtcctattatctggggaggggagcccagggctcatgccatggctcaggtggatgcttggaaacaactccagactttcttccacaaacacttgggtggccacgaggggacaatcccatcaaaagtgtaaattttatttgatcatgtggcctctctgttgctaatctctcctggaaacatctgccacatttagtgtgtgtatgtgtattcattcttttgtttttaataactaaagttttttcccctcattattaaaatgaatttaccagtaagaa

SEQ ID NO: 627 - DNA, 15688 bp, Homo sapiens
  source 1..15688: mol_type = other DNA
ggttactagggcaatctgccggaagagtcaggttctgtgtatgtctccgcgtcttccgcggagcgggtgtgcagggcctgcagcattgaactagatgtcgtccccgcaggccccagaagatgggcagggctgtggcgaccgcggcgatccccctggggacctccgtagcgtcttggtcacgaccgtgctcaacctcgagccgctggacgaggatctcttcaggtagccggcagctcctgcccagcatcccctcctttagggcagaaacttgatcttgactgccgccgcccggggcccctggctccgggactagtatggctctgcgtgggatgcaccctctgccacgattaggagagaactcgcccccaacagagctgtcctctctgctctggcttcctcccttcctctccgcgctgcgaggtctgcacagctgagcaaatatagtggtgacctgagagaccctgctcggcagcctgccctaagccttcacgggggagctagcccagagagggcagtgatttgcccaagggcacacagctgatggatcagccttaaaaccgacgccgcagctccttgtgtcttcagtatccttttcttctcacaatatcccgcccccagtaccatttggtgggtctggtttctcattacttattctgaggcctaagcatgtttttttctttcccagcatcgctgaagttcttgactgcagcaagggtttctttctttctttgaggcggagtcttgctctgttgcccaggctggagtgcagtggtgcgatctcggctcagtgcaacctccgcctcccgggttcaagcatttctcctgcctcagcctcctgattagctgggacatacaggcgcgccacagcccagctaattttttaacttcttttagtagagacggggtttcaccgtgttggccaggctggtctcgaactcctgaccttgtaatctgcccacctctgccaaagtgctaggattacaggcatgagccaccgcgcccagccccctgcagcaaggcttctaacagctttgacctccaaggcttctcctggctttactggaagttatcttactttgagctcccttccttccacttaaggaattgtaaataacttcttggagggctatttgatttttgtttttgaagacaagatctggccctgttgtccaggctggagtgcagtggcacgaacatggctcactgcaacctcgacctcctgggcccaagtgacccttctgcctcagtctcccgtttagctgggaccataagcgcttgccaccacatccagctaacttttttatttttagtagacatgaggccccactttggagcccaggctggttttgaactcatgggctcaggcgatcctcccacctcggcttcccaaagtgctgggattgattacaggcgagagccacctgccaggtcatggagggctgttcataactcattgttacagaaaatgccaaacagctgggacgtgggaggctagagacataattattcagcttccaatgggcctacattctgggcaagcattttcatctctggggccaagctgcagttttctcatctgtacactgaaggagttagacttgatgtctgagggctcttgttatttattcatttatacatttatttaattttattttttgagatggagtcttgctctgtcacccaggctggagtgcagtggtgcgatcttggctcacctcaacctctgcctcctgggttcaagtgattctcctgcctcagcctcctgagtagctgggattacaggtgcatgccaccacgtccagctaatttttgtatttttagtagagatggagtttcaccatgttggccaggctgctcttgaactcctgatctcaaatgatccacctgcctcggcctcccaaagtgctgggattacagatgtaagccactgcgcccggcccagaggatttttatgcataaggatatttgcctggggaaaggacctatggcttttaccatattctcaaaaggatcttaaaccccaatatggtgaagagatcatgcattagagtcttagtgagggtagtagaatttggcccagttcccaagtctttccctctttccccctctccctacagaggaaggcattactgggtaccggccaagaggctgtttggtggtcagatcgtgggccaggccctggtggctgcagccaagtctgtgagtgaagacgtccacgtgcactccctgcactgctactttgttcgggcaggtaaaccccccacttcctgccccaacccaaccctggtggcccagcagccatttctggccttgggggctgaggtcaaaagggaagagagggagactggaagacaaggggaggggtggcggacactaccaccctaagaggtgtctagggtggaacgaggtctggggctaacaatgagccttggacctcacacctgctgggactcactgggtacctgatgtctggctgataatgacacaagactttgttgcttaactgctccttgtgggcttttgttcttccattcttaacatagctcctggtgcggagcgctgtgctaggttctcagtgtgctgtgacctctgtgctagaggtgtggaggtagggcagcttgggttggagaagagagcaccagcctgagagtcaagggatctaaggcttcttttgtcaactgagcatagggtcaataaaaacaaaccaaagatgtagggcctagcttcagttttgtccataatttaccatgcagccttgtgaggttacctccccgccctacagtttggtttacttcagctgtaaaatggagaagggtgggaccaagggtattttagtgggatgatctctacagcttcttacagctctggggtcagataatgtaacttaaaacctatgtgtgaggccgggcgcggtggctcacgcctgtaatcccagcactttggaggccaaggcgggcggatcacgaggtcaggagatcgggaccatcctagctaacacggtgaaaccccgtctctactaaaaatataaaaaaattagccaggtgtggtggtgggtgcctgtagtcccagctactcgggaggctgaggcaggagaatggtgtgaacccggaaggcggagcttgcagtgagccaagatcgtgccactgcactccagcctgggcgagcactccagcctgggcaacagagcgagactctgtctcaaaaacaaaaaacctatgtgtggtggctcatgcctataatccccgcacattgggaggccaatgcggagaattgttggaacccaggaattcaagaccagccagggcaataaatcgagaccttgtctctacaaaaaaataaataaaaggaaaataaaagcaaaacctatgctaaaaaacaaacaaaaaaaaccctcactgttttctttccttccctgttacccccagagcagatgccctcatgtgttctgcgtagatccccagctgagaagagtttgtggacctttacagtatgtgatttgtattaagaaaaccatggggtttcccccttcattttgtaaatatgaaagttatccctgtaatggtaaatacactttttcatactgtcccgtgtctcttactcctcatccctgaggagtattgattggcccccctcttctcggcccccagtcactgctataaagtatttgaatacttaccttgggctcagccaggttcttatctttatgctagttgggagtaaatatgtgctttgtttctttaatttgtttgtaagtaccagccttttgatattgtaatccttccagcctagtgaaatacctggctgttttcttttgtgtgggtgggggcattacttgaactctgaatctcttcatcctgtgatggaagaattcaatgagtctttgccagtaaagtatctagtgcagggcttggcataatctagttttccataaatattattagtttttgatgattaacttatgggaataattaaaatttgcatgatacagagcatagttgtgtgcattatcttgtttagtcttcataagtaaacatgggtggcaggcattcctgccatcattcttacctaaggaaactgggacctgaagaggtttggaaccagctcccacagtgcccaaggaggcagagccaggatttgaacctggtttatgtgtctttgagtgccaaactctttcctgcttctttgcttcgctcttgggcaataattctaaacaatgagagagctgccagggtacccatcccaggttctggggaaaagatcctctttcttggaaagtcttcatccaggagcagcgtgaaatgagctgtgtccaagccaccatttcaaaataaataattatttggccgggcgtggtggctcatgcctgtaatcctagcactttgggaagccgaggcgggcggatcacctgagctcaggagttcgagaccagcctgggcaacatggtgaaacccagtctctactaaaatactaaaaattagccaggcatggcggcatgtgcctgtagtcccagctactcaggaggctgaggtaggagaattgcttgaactcaggaggcggaggttgcagtgagctgagatcatgctactgtactccagcctgggcgacagagcgagactcttgtctccatcaaaaataaataaataaataaaaataattatttgtgcccttgcttgtgtcttgaaaggctgcaagatagctaaaataattggtagttattatgggaatattaaaagtcaaaggacattaggccagtagtaatgggatttgggagaagcgatcatgtcaaaaaatttggctaagccatattgttgcagtttcatacaaggtttagttctgagcttcctggctgcaaggcaaaaaggggagagctcttatctgtttgtggtgtgactctgccagctatatcagatattaaaaccaatgctgttttttggctgggcatgtggcttatgcctgtaatcccaggactttgggaggccgaggcgggcagatcggctgaggtcaagagttcgagaccagcctggacaatgtggcgaaactccatctctactaaaaaaaaaaaacacacacaaaaattagccaggtgtggtggtgcacacctgtagtcctagctactcaggaggctgagtcaggagaatcgcttgaaccctggaggtggaggttgcagtgagctgagatcgtgctactgtactccagcctgggtgacagagcaagactccatctaaaaaaaaaaaggaaaattagctgggcgtggtgaccttagcccgtgatcccagctactcgggaggctgaggctgaggctgaggcaaggagaattgcttgaacccggcggctggaggtcgcagtgagctaaaactgcgccactgcactcccacctgggcgacagatcgagactccatctcaaaaaaacaaaacaaaaaagagatgtttcaattacattttaaaaataaaagatgttatgggggagggggagggttggtccttggccatttatcaaatcagttctttttctaaaagcccaggaaagaatgtgaattagttgggtttttgttttgtttttagtttttctctacagaggtaaatttagagcttgaagaattcagaacaaggtcagcaaacattctagaaagggccagatagtaaacattttaggttttgccagtgaaagcaactatagacaatatgtaaacaaattagcatgactttattacaaaaaaattgtattttaaggcaacagtttcctcatctgtacaatgggggtaagagtggctctacatagttattgtgagaccaacatgagaaaacataccctcctgtccaatgctgtcaggcaccctgcatcactccataatcattaactcccttcaatatgcctcagggcctacctgctctgttccaataacaattttcaagaatagggctggaactcattcacactgaaaggtagaccagagtactgaagtttctgtgatcctcctcaggaatctgcactttagcttacctgcagaccaaggattggattagaggtttttttttgttttttccccccaagtttggtggtagggaggaagacttcattcccagtgtctgaaagcagactgcacaagtaactttgtctagtgtctggactcttggtaagcccttctcaaatgcctttaaccttgaggagctcgcactctgatagaagtgctgctggtggcagtgcctgataacagagagctgagcaagccagttgacctcagacagtgatgtttattgctgttgattgagccctggtgcctggttgactccccatttggatcagagtgaaggaagcaacacttctctagacctgcttctttcatctgaaggttgaaagtcatccccaagatgtctcatggcccagatgtcagggttcctcaaggtcagcctgactcagacaaagtgagaacttcagggaaaccagggaagttctcttcctctccaaatcttccctcacctgcttgttgttggctgccttatccctggccagtgccttctactctggtggtggtggtcttgttgtttttgagacaaggtcttgctctgtcacctaggctggagcacagtgacgcagtcatggctcactgcagccttgatctcctggcctcaagtgatccttccgcctcagcctcttgattagctgggactataggcacatgccaccatgtccagctaatttttattttttattttttgtagaaacagggtctccctgtgttgcctaggctcttccactctgctttggagcagagacacctgacagtgaaggaccaaatggcttccatatacatcaggggtgaagtgactgacagtggcccttgcctgggagaggctgaatatacaaacagacaatggctagaccatgtagaaaaacagaactctgacgcacaatagcagcaaccagcacaggaagccagcctactatccacaagtcagacttgtaggaagtcagaccactatctttaccaaccagtccagcaagccaaataatgaccactgtaacaattggcctccaaagccaggacttgattaataactgatagctgccctaatttttgcccctgcttccaacttaggaccaaccggagaaagccaaatatgtactcctaaccaatcacataggatgtcccactcttttttgagacagagtttcactcttgttccccaggctggagtgcagtggtgcaatttcggctcactgcagcctccacctcccaggttcaagcagttctcctgccatagcctccacctcccagcttcaagcaattctcctgctgcagcctcccgagtagctaggattacaggtgtgtgccaccaggcctggctaattttttgtatttttagtagagacagggttttgccatgttggccaggctggtcttgaactcctggtctcagaagatctgcccgcctcagcctcccaaagtgttgggattacaggtgtgagccaccgtgcccagccaggtgtcatgcttctagttagcccaccaacagcttccccatgccaacagcctgcaatgggagcatccctgaagcctttttttccactacagagcattcccattcctttgcctgcctctaagtctctgccaaaagcaagtgatggtggttgacttcctgctacaacaagctctgattggctgggcgcagtggctcatgcctgtaatctcaacactttgggaggccaaggtgggtggatcagttgaggtcaggagtttgagaccagcctgggcaacacagtgaaaccccatctctacaaaaaatacaaaaatttgttgggtgtagcggcgcacgcctgtagtcccagctacttaggaggctgaggcatgagcatggcttgaacctgggaggcagaggttgcagtgagcccagatagcgccactgcacttcagcctcggtgacccagcgaaactgtctctcaaaaaaaaaaaaaaaattagctgggtatggtcatgcacccctgtagtccccccccactcaggaggctgagtcacaggaatcgcttgaacctgagaggtggaggttgcagtgagccgagattacaccactgtactccagcctgggtgacagagcaagactccatctcaaacaaacaaaaaaaagaacaagcgctgaataaatagcctttgtttgttctcaaaaaagaaaacaacaacagaataaacagtaaacaggctgcaggctagatttactgctccctgatctagaataatggttttggactgatgacaagatcccaggcatagatggagcaagatagaagcaaggagtattaattttatttaacaaacacatatagagccctcactatgtgccagatattattctaaacactttacaactacggattcatttcattatcattaaaatcctgtaagcgatgagcaccatgatgatccccagtttgcaaataagcacactgctcagagaagtgaagggtcacacggctggtgagtggtggagccaggatttgaatgcaaggaatctgtcaatgtctctgctgtttgtgctgttagagaaaagctccacctgcacagggagaagcctgatgacagggcctggtggtctctgtatccctgggcctggaccttagcagacctcagttagtagtcactgagatgaaatggaatggaagatgagtagtagagtgcctgtcaggcgttgtgatgatgacagggcctgtggacccactgtgtccttgtgcccactgcaggggacccgaagctgccagtactgtaccaagtggagcggacacgaacagggtcgagcttctcggtgcgctctgtgaaggccgtgcaacatgggaagcccatcttcatctgccaggcctccttccagcaggcccagcccagccccatgcagcaccagttctccatgcccactgtgccaccaccagaagagctgcttgactgtgagaccctcattgaccagtatttaaggtgagagacctggaggctccatggcagacttttcaaaatgcagctgctatctgtttgtgggtcatagaatcctttagtgggtcttgaccagcatttttaaaatacagattagaaaagaagatactggagtgaataatatgtatgtattaagggcaagaatccttttgtgaaacttgaggtttagtcatgtgtgtttctggtgtgtgtctgtactgggtcatggtataaaatgaagggcttggccgggtgcagtggcgcatacctataatcccagcactttgggaagccaaggcaggaggattgcttgagaccaggagttggatactagcctcgccaacatagcaagactccatctctaatttaaaaataaggctggggctgggtgtgggggctcatacctataataacactttgggaagcccaagtgggaggatcacctgagcccaggagttcaagaccagcctgggcaacatggtgaaaccctgtctctataaaaaatacaaaaattagccgggtgtcggggcatgtgtctgtagtcccagctacttgggaggctgaggcggggggatcacttgagcctgggaggtggaggctgcagtgagccgagatcgtgttactgtgctccagcctgggcaacaagagcaagactctgtctgaaaaaagaaaaaaagaatatatattttgttgttgtttatatatatacatgtttgtttgtttttgagatggagtcttgctcttgttgcccaggctggagtgcagtgacaccatctcggctcactgcagcctctgactcccagactcaagtgatcctcccgcctcagcctcccaagtagctgggattacaggcacctgctaccatgcccagctaattttgtatttttagtagagatggcgtttcaccatgctatccaggctggtctcaaactcttgatctcaggtgatccacccaccttgacctcctaaagtgctgggattataggcatgagccaccatacctgggaaaaaaaaccatatatatattttatatatatatgtatatagaaatacttccgtaaccacttgttaagtaccacctccccagccccctaagtgattccctctctcccccaggcccctggtccagcaacttaggacttaatgcacaccaggagtgagtgtcctctggagagctgcagcgctatggcctatgtttggtcactgcctttgcattagtgcatgtttttgtttgtttgtttgttttgagacagagtctcgccctgttgcctaggctggagtgcagtggcatgatctcggctcactgcaacctctgcctcccaggttcaagcaattcccgtgcctcagcctcccaagcagctgtgattacaggcacatgccaccatgcctggctaatttttgtatttttttagtagagaccaggtttcgctatgttgaccaggctggtcttgaactcctgacctcaagtgatcgacctgccttggtctctcaaagtgctgggattacaggcgtgagccaccgtgcccggccacatgttttatgtatataaaacatatgtacaaaaatacaaatatgtattttcccctaaccattagaccaccagggagcatgttagatattttgaatacctggtaaaatatatttatttggatcacacctaatcaagtttgaaaaatgctggtacaggggaaagagctctgggtccagacaaaggatagacacatggattctgtccagggctgtgcctctgtgaatgctcacctgctgtgggacagtgcccaactccccagggccctagtttcttcttctaaaaaatgggaatgctcatttctgccctgcctacttcttagctgtatcataaggagagaatgtctctatctcgtgttagatactggggaggcagcagagtatgacgggatggatgtgggtttgggaacctgaaaggcctggattcaattctagattttgtccctactagctgtgtgagtttgggcaagttgctttcccactctgagccagtactcaccattataaaatggtgctaatcatattcctacctcataaggctgctgtgaggattaaataagagagaaaaggcacttagcgtgctagtactaactagcacaatggcagtgaattgtagttatatcactattaacagaaaaaacacagggcctggtgtgtggttgcagttcgacaaatgtttgctgaaatgaaaggaagacattgttaaaggaccttgaatttagatctgtgctgttaataaggtagtctctagccactcgtggctatattacattaattaaaattaaataggtccgggcgcagtggttcatgcctgtaatcccagtactttgggaggccaaggcgggtggctcacccaaggtcaggagtttgagaccagcctggccaacatggtgaaacctcatctctattaaaaatacacacacaaaaaaattagccaggcgtggtggcccgtgcctgtaatcccagctactcaggaggctgaggcaggagagtcgcttggacccagggggcagaggttgcagtaagcaagattgagtcactgcactcctgactgggcaacagagcgagattccgtcttaaaaaaaaaaaaacaaaaaaaaaccaaagtcagtagaatgaacaattctgttcctcagttgcattagccacatttcaggtgctccatagtcacatgtggctagtggctaccatagtgtgctgtgcagataggcattccatcatcataggaggttctgtccaacagcactccagaggataggggtgaaaatggcaggacctgtgcagagcactatgggtggttgtcactgtattgaagggagttccttggaatgggctcctccccctggggggatgcaatgttccctactgtgtagggtttggtaactcaggccaagtcaggcagcctgtttcttgagtgtttaaaataatgaagtggctgggcacagcagctcactcctgtaatcccagcactttgggaggctgaagtaggaggatcacttaaggccaggattttgagaccagcctgggcaacataaagagaccccatctctacaaaaaaaagtaaaaataatcccagcattttgggaggctgaggcgggcggatcatgaggtcaggaattcgagaccaccctggccaacacagtgaaaccccatctctactaaacatacaaaaattagctgggcatggtggcaggcgcctgtaatcccagctactcgggaggctgaggcaggagaatcacttgaacctgggaggcggaggttgcagtcagctgagattgcaccaccgcactcaagcctgggtgacagagctagactccgtctcaaaataaagaaataataaaaatgttagccaggcacagtggcgtacacctctagtcccagctactcgggaggccaaggcaagaggatggcttgagcctgggagttggagactgcagtgagctgattgcgccactgtactccagcctgggtgagaagacgaccttgtctctaaaaaaatagaaaataatcatactgtggacccagattgcctgagtccaaatcctgtctctccaatttttaagcaagctacctggactctgtgcttatttcactgatgaaatgggggtgataatagtacctatctcacagggttgttgtgaggaatactattgtatgtacaatgcttagaacagtgcatattacagggtatgccttattactatgatgtgttggttagatattcatgatcttgtcttcacagtgttggttatgaggtaggttactatcattatccacattttgcagatgggaaaatagactcagattactaattagcacgagaccacatggctcgtaagtggccaagaagggattcaaacgctgcactatcctgcctgccacaggggaggggagctttggggatatcaggggtccctgtggaagaatgaggggagtcagaagaggcaatgcagatgtgactccctctcttcctgggtctcaccccgaccctcttccctttactttcagggaccctaacctccaaaagaggtacccattggcgctcaaccgaattgctgctcaggaggtccccattgagatcaagccagtaaacccatcccccctgagccagctgcagagaatggagcccaaacagatgttctgggtgcgagcccggggctatattggtaagagtaccccatggatgggaggaaaccactctccaaggggtctaccactcatttgctgtgtggccttgggcacatgagttcccttctctgggcctgtttccttatctgcatgatggggaagttggcttagcttctcacctgggccctctcagccctttgcatggggagaaggtggagatgactataatcccgacacaaggcctttctgaggaaggcaaaaggcacctcgctggggttgttgtccagctttgctgctaactataaagtatctttgtgcaaattggaagaagacaccccttttggggcctagagtgggagacttgggtggtgaagactgaatttcagtccctgctcacccctgccctccccaagtcgccatctcacttctcccctatcacacacacacactgtaggccaagcgctcttgtgcagcaaccagtctgcacacccatgcacgggagtcccttttccccctacctccgtgcaggtcctgagctggaaagcccaggagcccagggctgatggggacctgttgcaggcgagggcgacatgaagatgcactgctgcgtggccgcctatatctccgactatgccttcttgggcactgcactgctgcctcaccagtggcagcacaaggtgcacttcatggtctcactggaccattccatgtggttccacgcccccttccgagctgaccactggatgctctatgaatgcgagagcccctgggccggtgagtgtggggccgtgtgggacaagggcactgaccttgagtggcaggagcctgctttcttgggtgatgctgatttcccgacttcctgtgtggcgctgcacaggtcacttcctttccttccctcccaggctttggcatcttcatcttcaaaatgagagggtgaggccgggacacctgctctgctctaaatttctagaatgtgctggaaatgtgattcaccttctcccagggacccagttctagtcccaaaaccagttcagattctttgtattacaataggcaaatcatatcttccatctgaacctcagtttcctcatctaaacaaagagggttacattacagcagtggtatccaaacccgcagtccatcagactgccatttggggatgccttttcaaaatagattctgattccaccctcaagattctcactcagtaggtcttggataaggtccaggaaactgtatttttaagttctctaagtgattctgattaacctgattgggatcggggcattcagtggtccctaagggcctgcttggaccttccttgcaggggagagaaacaagactcgttcatcaatgtctagcttcagaaccctgacctcctttccaagggagtacatttcaaatgaagaaaagctttgcttgataaaccaaggacaaaactcaaggattctttatactcagataaggggtattctcaagtaccaatagcatcacaatccaagattgataaccttgaagtgaggacatgggttcagatttggcttcatcatggggccaaattcctgaccctctctggatttcagtcctggtctggaaaactggacaacacataactgcttcatttggctactgtgagaactgagtgagctctgctatgtgtaagggaaaccagcaatcatcctcataaacatcaaacttgggcccaaagccagcaagggagaaagagtctccagatggggagggaagaggccagacctcatggcctcaagtcctctcttctgagtcctttcttccccttggtggtggtagtggggatatttttcatgaattaccacttggaggacctggcttgatttattatacagggagccgatagttttcctaacacaagtggtcagaggtacagcagttctgcttggccgaactgttgaaggagactgttctcagagctcctccctctgtgatctttttgaggaagcgaggagaggtgtgaaagtgcttttaaactgtcaactggggttcctgtgggaggagttacccctcaatgacggtccataataagctcatgaaggggcatttggagcagccacgacactcagtgcacccttgtgtggggcagccctgccctgggccagaccctttgcaagaagtccacttggaggttgggcatggtgatgtgcgcctgtaatcccagctgctcaggaggctgaggcgggaggatcccttgaacccaggcgcttgagaccagcctggcaacttagtgagactctgtttcaggaaaaaaaaaaaaagtgtatttggctgttctgaagcaggccatcatcacccttcacctcacccacaggtggctctcgggggctggtccatgggcggctgtggcgtcaggatggagtcctagctgtgacctgtgcccaggagggcgtgatccgagtgaagccccaggtctcagagagcaagctgtagccagaggtaccagcttcgcctggggcttcaagaacctcccatctatccccattcctgagacaggagttacagtcccttttggccctcacatccaataaagagactgataccactgg

SEQ ID NO: 628 - DNA, 4060 bp, Homo sapiens
  source 1..4060: mol_type = other DNA
tgggcgccacaccttgcgcgccccggggcccaaggagacgaccctgaagaggagcctggctacttttgcctcagacgagtccggagcgccgggttaaccggtctgaagtcccaggggctttctgggactgctcagccaccggcagcttccggcaccaggggacgccggacgccgtccggacattcggcgcgcttgccacgatcttggacgggtctcgggcctcgacctttgaattccccgctccggctccaagatgtcagcaacgctgatcctggagcccccaggccgctgctgctggaacgagccggtgcgcattgccgtgcgcggcctggccccggagcagcgggttacgctgcgcgcgtccctgcgcgacgagaagggcgcgctcttccgggcccacgcgcgctactgcgccgacgcccgcggcgagctggacctggagcgcgcacccgcgctgggcggcagcttcgcgggactcgagcccatggggctgctctgggccctggaacccgagaagcctttttggcgcttcctgaagcgggacgtacagattccttttgtcgtggagttggaggtgctggacggccacgaccccgagcctggacggctgctgtgccaggcgcagcacgagcgccacttcctcccgccaggggtgcggcgccagtcggtgcgagcgggccgggtgcgcgccacgctcttcctgccgccaggtgagccaggctgctggcgggtggtgtgagcgtcagtggcctgagtctccgtttgtttccagtgctgatttagcactggtttggttttggagcaagatcagagaagctaacattgactatgtcagtggccactctaccaaaatagagggtttggtaccgggcgtggtgactaacgcctgtaatcccagcactttgggaggccgagatgggcggatcacttgagatcaggagtttgagaccagactggccagcatggtgaaacgctgactctaccgaaaatacaaaaattagtccagcctggtggcacacgcctgtagtcccagccactcgggaggctgaggcacgagaatcgcttgaacctgggagatggaggttgcagtgagccgagatcgcaccactgcactccagcctgggtgacagagcgagactccgtctcaaaaaaagaaaaaagaaaaaaaaggattttttgttaggctgtgtactacggtttttacttgcattctatcagttagtctctataatatcccaatgaagttggtattgttattctgcagatgaaaaaacaggttcaggtcgtcaggtacattatccactttgctattaatcactaccctacagatttctacaggcatcagcctgacttgtctaaggcagaatgatgacagtgaatgaagctattaccatgtcgtcttctctagtgttctaggcacactgtctcttctccacttcttcatgtgctgctttatcacaggtcacacttcagactccactgcctttctcacctaaaaccatctctgggtatttctttttctttcctccctttctacatagacatctgaaatatcagtacactaaaaaccagagggctgatgcaacagaacataaagttttgtttcaatcttttttcttttctttctttcttttttttttttttttttttgagacagtgtctgtctctgttgcccacgctggagtgcagtggtgtggtcacacctcactgcagccttgacctctggggctcaagtgatcctccctccattgcctcccaagtagctaggactacaggcatacaccaccacactgactaattaaaaaaaaaaaaagattgtagagatggggtctcactacattgtccaggctggtcttgaactcctggcctcaagcaatcctcctgccttggcctcctaaagtgctgagattacaagcatgaaccacagtgtccagccaggaaagcaaattctttaaattgtataatggcttacatttataatattttgttctctaggacctggacccttcccagggatcattgacatctttggtattggagggggcctcttggaatatcgagccagcctccttgctggccatggctttgccacgttggctctagcttattataactttgaagatctccccaataacatggacaacatatccctggagtacttcgaagaagccgtatgctacatgcttcaacatccccaggttctcctcatgtcctttatttaatcagtctctctagaaatatttccatagagagtgtaacctttaccacgtgcagaaatgctgctctgttcctctttcacaaagatgtcttctggagacttccttggcttaaggtgctatttccactttttctgtcagatgaatttgtgatatagaattaattgtaaaatccacatgagattttatttagtaatattaaatattatctgtatattgcaaattgaatttctaatctactgtctttgcatgcttgtttttaaattttaatttcctggtgtcagagtatgttctcagattttggtcagaacttgtccacccctttcagaagccaagaacaaacttacttactctgaagtcttgctttgtaatcatttgccaatacatatggcaaatgatctgatgaatgattcacatcttgaaacaacctggttccacactattggatgcattgccacatgaagacttcagtcagacctacctgaatgtggccctgaacttgatgggatctgtggctcagcggctcagcggctcagcattctctagtggataattctctgaaatgcttataaccagtttccaagtttttcagtgattttaagatgtgtttgccatgtgttcagccagatattctgcacatgggaagaaactcccctgtcagctgaggttgattttcttgtggatgattcccagattaaagctagcagcatctctgtttgcattttagaaaaatgtttttgcattggataagttatttatttatttatttatttatttatttatttatttatcttttgagacggagtctcgctttgtcacccaagctggagcgcagtggcgcaatctcggctcactgcaacctccgcctcctgggctcaagcaattctcctgcctcagcctcccaggtaactgggattagaggcgtgcgccaccacactcggctaatttttttttgtatttttaatagagacagggttctgccatgttggccaggctggtctcaaactcctgacctcaagtgatccgcccgcctccgcctcgcagagtgttgggattacaggcatgagccaccgcacccaatctggataagttattgactcaactctcctctcttcttttcttccaggtaaaaggcccaggcattgggcttttgggcatttctctaggagctgatatttgtctctcaatggcctcattcttgaagaatgtctcagccacagtttccatcaatggatctgggatcagtgggaacacagccatcaactataagcacagtagcattccaccattgggctatgacctgaggagaatcaaggtagctttctcaggcctcgtggacattgtggatataaggaatgctctcgtaggagggtacaagaaccccagcatgattccaatagagaaggcccaggggcccatcctgctcattgttggtcaggatgaccataactggagaagtgagttgtatgcccaaacagtctctgaacggttacaggcccatggaaaggaaaaaccccagatcatctgttaccctgggactgggcattacatcgagcctccttacttccccctgtgcccagcttcccttcacagattactgaacaaacatgttatatggggtggggagcccagggctcattctaaggcccaggaagatgcctggaagcaaattctagccttcttctgcaaacacctgggaggtacccagaaaacagctgtccctaaattgtaatgcatttgtctgttgttgacatgagagattcaagatcagattctagtgttcagtaaccctatgtgaatcagatgtctcctggataacattaaagccatgtctttgtcattaa

SEQ ID NO: 629 - DNA, 14282 bp, Homo sapiens
  source 1..14282: mol_type = other DNA
agatcggaggcggcccgcgccgggccccacattcagggcttgggggttcattcgccgcgccgcccgccgctgcttcaggccctccgcttcggctcggagccccgggacccctaacctccagggccctcaccttggacccgcctccctgcctcccacccgccgcctttacctgcttctggagcgggcagagggcgtcgaagccggtgccgcgtcgtcgaacgcacaacgcggcgccgcaggtccgcagccctttcccgccggcgccactgcgctctcccgcgccgcgcaaggctagcaagcagctgcggccgcgggggagacacggcgagcgcgcccggcggggagacactgccgctctccgtccggccggggaagagcagccgcgcagaagcccgccgcgagagggcgggtgggcggccgggtggggaggggtctcgaggcgccggcaatggctgccacgtcgcccaggtggatcgccgcccaccgcccccccccaagcccgccggctgtccgccacgacctctgcttcgtccccgagctccgcctcggcgcggcggcccgggggacttgagcccgcgggcgctcccacctctcccgctcccgctctcccgttggagagcaagccctgcccggccggttcggctgcttccggtcgcccaccccccaagtctcgcccgagagcgggccgtggtccccacttttcttatcagggggtccctggaggagcaagcccttcttcgagtgtcgggttctgcttggggggaaggcgggagctgtttggcgctggggaacattgcaacaggcccggaatttttgccaaaataagcggcgcggtaaaccacagctgtttctagccctcggcactctcccgagccccaaaaaacaaaacaaacacaaggtcggcctcgcgaggtgaggggagaaaggaaagcagagctgggacgagccctgacgcgcgcggggtccaggctgcaagttgggagggacggcgaggcgagcgaccggcctcggcattgcctgactagggccgtggccgctgcggcgggcacgggaacccgccttctcgcgcgcggccctcccgcggggggcttccgggcgcgcggcctcggagccccacggggagacaaaggggtaggcgactgccacggggtggagggaggctgcccagccccatcggccctgccagcgtgcggtctgagctcggggaatgtgtgcgccttagccggtggaaccgcagccgctggcctttgcccccagttcgagcttgagttttcggatgccaagaaaaagcaaagacgtgctcttccctcttgcgaccgctgtagtatgagtccgtccccaagcctgcaccattttttttctctcaactctgctttccctggtttatttgttctgggttctgatgtgaaatgtttagtgttttcagggtacgcaaatttttcacctttgctttctggttggtggtggtggtggtgatggtagtggtggtggttttgcctgttttttacttcctccgtcccctccctttgcggttacttttcattccacttgcagtggtttttcccagaatagagaagcgaaataacctcatgacaaagtgtccctttgcatcgaagatacattgttggttgttatggcagttgctttaaacagagtgtaaatttggggcaagtgcaagtggtttttgtcgtttaggtctaactggaacacttattcacaatgagaacgttgtagtgctttttcaagaaactagtaatatataaggagagaactcaagaagataaattttctgatgaaaccatccatatagaaaaataggggaatttttccttttgtatgaattttgtatttagaggtctcgagtcccagtgttaaatcacagacttcatgttcatccttaaaaaaaaatcactatacaaaaaccccttaatgcttttattaaatttcaaaaacaaaaaattgtaataacccagaatctcaagagataaatagctgttgctgagaagctaacattaactctgcctctaaacaaccattataagagactaaaaactgtaatatatgccactttagaaatgaaagaaccctagtaattataaacttgaaagatgtcgaggaaattaatattttgtttttgaaatatgttcaccatgataataaaaactagcatttaaattattttcctttgaacatctgttaaggattcatcaaatcttaagtcagaacaataagaaataaactcttcttaacattggaaaatatatttcaagccacaaagacaacacccaagctgaatgtttttaaagtttgtttactatggcaataagaagaacatcaacaccataaagttctgaaagtgagactggaatgaagaacaaagcaatcttcactcaacattcgcagtatcagccttcggttgtgaatatttataaagatttcctcctttcttattggttcaaattctaagccaatgggaaaagtacaacacgtcttttaaagggtgaagcatcaatcagcattagattagtatctgggataaaggttttggttatcatgctcgttctcattgaagttcatgtccctttaaatttcttttttttttggggcggcgggggggcggtgactagagttgctctgttgcccaggctggagtgcagtggcacagtctcagctcacttcaacttaacgcctcccgagttcaagtgattctcgtgcctcagccccccgaatagctggaattgcaggcgtctgccaccaaacccagccaatttttatatttttagtagaggaagggtttctctgtgttgtccaggctggcctctaactcctgacctcaggtgatcctcccacctcggcctctcaaagtgctggaattaaaggcgtgagccaccgcaccgggccgtgtctctttaaatttcaaagaagacatttaagaatagggcctggcacagtggctcacgcctgtaatcccagcactttgggaggctgaggcaggcggatgggatcacgagatcaggaaattgagaccatcctggccaatacagtgaaaccccgtctctactaaaaatacaaaaagtagctgggcgtggtggcatacacctatggtcccacctactcgggaggctgaggtaagagaatcgcttgaaccggggaggctgaggttgcagtgggccgagattgcggcactgcactccagcctgggcaacagagcaagactccatctcaaaaaaagaattattgactatcttgtgggtgccacacctgctcacattctcttcagtcttccagttggttttattacaattggtcttgttagaattatgtgacaatatatctaaaatgccagataaatctgaggaatggtaaaatgtctactacttaatacattaaaatgaatcctggcattttagattaaaaacttacctttaaggaaagactaaagtttatattttgggccgggcgcagtggctcacgcctgtaatcccagcactttgggaggccgaggcaggcggatcacgaggtcaggtgatggagaccatcctggctaacacggtgaaaccccgtctctactaaaaatacaaaaaattagctgggcgtggtggcgggcgcctgtagtcccagctactcgggaggctgaggcaggagaatggtgtgaatccgggaggcggagcttgcagtgagccaagattgtgtcactgcactccagcctgggcgacagagccagacaccgtctcaaaaaaaaaaagaaaaaaaaaaaaaaaaagtttatattttgggaaatgtcttggatttttgtaaaaaaaaaaaaaaaaactgccaagtcgtcaaaagtaaaccttttatatttacctaagtccaactttggtctatgtaacagctaaattctaaacatgattgtctgtgtttatgtttagaacataggtatgatttccttccaaccaaaaatattaataatctatgccacctttgtattcctatacttggattatgacttgaagcattccacttaattattcatgtgtttataatctcccttactaagtcatcaatgccttgaagtttcccattcagccttgtattcctcattgtcagactcccagccttgtgcaatataaacactccatgaatgtttactgagtgaaagaataagtgagcatcactctatgacaagacatatggcaaatcaagaaaatctgtgtcaggattttttcctcttctacataatggctaatgacactgttttcattcccaactaagaatagtattgttgaccaggcgcagtggctcacacctgtaatcccagcactttgggaggccaaggcgggcggatcacgatgtcaggagatggagaccagcctggctaacatgctgaaaccccgtttctaccaaaaatacaaaaattagctgagtgtggtggctcttgcctgtagtcccagctactcaggagcctgaggcaggagaatggcttgaatccgggaggtggaggttgcagtgagccaagatcgtgccattgcactccagcctgggtgacagagtgagactccatctcaaaaaaaaaaagaatagtattgttgcaagaactttactaaaagaaagtaggaccaacatatgctggaattattgtgtttttccattttaaatttagtggaaaccgaatagtagataatattgccattatctaaagtaaataaatatcaatgggttttatctttatgtaagatttctttaccacactcaacccagggtgcatcaagctctgaccttgggaaaattacttaaactctcaaatactcagttttctcatctctcaaatagcattcataaaagctacattctgattaattaaaataataaatgtacataaaagaggcttaataaatagtagttattactcacagatattagtggactcaatcataaagaaaatgtaattttcttagtgcaattatttatctataaaaggtgccatcctggacaacatggggaaactccatctctacaagaaatacaaaaattagctaggtgtggtggtatggacctacagtctcagctacttgggaggctgaggtgggaggatcacttgagcccaggaggcagaggttgcagtgagctgagatcgcgctactgcactccagcctggacaacaaagtgagacattgtctcaaaaaaaagaaaaaaaaaaggcaagcataaaggctgttaaaataataataaggaaacaaatatcctaaaggaaggaatagggtactaagaaaatctaccaaaagaagataacttttgcagcctggacaacatggtgaaactccatctctacaacaaatgcaaaaattagctgggcatggtggcatgtgcctgtagtccctgttcctcaggaggctgaggtgggaggatcacctgggtctgggaggtgaaggctgcagtgagccaagattgcaccactgcactccagcctggacaacagagtgagacactgtctccaaaaaaaaaaggaaaagaaaaaaaagataacttctaaaaataaatatcaatggcattccagtctgagtgaaaactttatgaaaaaccaaatctgattgtgtctctctcctctcacaaacttcacagctcctctaatttctactagcttttctcaatagggataaatagttatgcattgcttttaaactgaagggcttctcattgcactctgttttttctttgaataaattctcagagcttttaatatgccaatgtgcctaggaactctaagaaaaggatatactagtaaatatttccaaacttacttgaccgcaaatcctttattcatagagagtatcccaggacatgtgattttatatcacattttggaggaaacacttgtctacatatttgaagataaaatccaaaccccctcacctctgcttccaaatgctgccactcctgcaaaaatgacctcaaataagcctgaaatgtaggtctcctgagaaatgctcttgagaaattgacctttgttttacccagtttctctgtacatgaatggacaggcatgaggcagtctccaaacttgacaagaaagggtggagataggattggcaaaaacagtattaaaaaaaaaaagtctggataatgccaaggatagcttccttattcccaggataatcctccttctttgagtgtgatagcaacaacaattctgtgtcttcgtgagaaactttacgggaagccatacctcttgtctgtaagcatgttgtgggagctccagctttatgtaactgtaagttttctttttctttttttttaatacggagtctagctctgttgcccaggctggagtgcagtggcgcgatctctgctcactgcaacctccacctcccgggttcaagcgattatcctgcctcggcctcccaagtagttgggattacaggcgcctgctactacagctgactaatttttgtatttttagtagagacggagtttcaccatgtttgtcaggctgatctccaaactcctgaccccaggtgatccaccgacctcggcctcccaaagtgctgggattacaggcatgagccaccgcacccagccaagttttcatatcacttgcctatcacttgccaatagggaaactatacatcctgtaaccatacctgctaacattcttctgtcagttatattactcctctatttgagacaatcacacacctcacaatacatcctttccagggatgttgaaccattggctaacctagtcattcactttcatttgtgtttacaacccaacccaaatgcccttttatcctgtaaagcttttctggatgccccaaatagaacggtttatttatttatttattttattttatttttttttttttttgagagtcacccaggctggagggccgtggcatgatcttggctcactgcaacctctgtctcccaggttcaagcaattctgcctcagcctcccaagtagctaggattacaggtgtgtaccaccacacctggctaatttttttgtattttcatagagacagggtttcaccatgttggccaggctggtctcaaattctaggctcaagtgatcctcccaccttggcctcccaaagagaatgatttcttctatgcccacagcaatgtctgtgtacttctcttaattgcagtgatgattatttgttggtctgtatctttgctaaaactgtgaactctcttcccctagacaaaatatgtatccacagtaactagaaaacataccttacacattgaaatgtactaaactccttttagggtaccttcctagcttacaatttcctagtcagttgtaccctcttcccccaattctacaggaccagactccagggttttgaaaaatcactctacttccttcaccacagttaaccaagagtgggtgttttaatccaattagtctcttccagggaaattttagaattgggacaaagaccattagtaaaatcaaaatacaaataataaacaagaaaaaatgcaattcacatcggagacaaagggctgatttctctaatatacaaacatgtagaaatcaataaggaaaagactaacgacccaatagtaaaaaatggacacattataaaaaagactgctcacagaaaaagaaatacaaattactcttaagcatatttttaaattacatatgtgcagcattgtttgtaatatagcaaaagatgggggaaaaacctaaatgcccacctacagggaactggttaaatgcagtatgttagatgaaaagagcagaatgccacaatataagaggatgatgtcactctaaatgttcatactgcaccatctccaagatatattgctcactgtgtgtatggtatgctgccattagtgtaaaaaaaatggagaggaggaaaagatagataaatatagataggtaggtaggtagaaagatatgatgatggatgggatggatgggatggatggatggatggatggatggatggatggatggatggatggcttttatcacatatacatagaatatctcaagaagaagatagaacaaactgctccattaattgcttttgagaaagcaaatggtggctagaggaaagaggatgaagagacttttcactgaaccaattttatatatttatttatttttcatgacaggatcttgctctattgcccaaactagagtgcagtggcacgatgtcagctcattacagcctaacttctagggctcaagctatcctcctgcctcagcctcccaagtagccaggactacaaacacaaaccaccatgccaggctaatgtaccaattttttttttttttttttttgaggcagtatcactgtgtcgctcaggctggagagcagtggcgcaatctcggctcactgcaacctccacctcctgggttcaagggattttcctgtctcagcctcccgagtagctgggattacagatgtgcaccatcacgcccagctaatttttgtatttttagtagagacagggtttcaatatgttggccaggctagtctcgaactcctgacctcaggtgacccacctgcctcggcctcccaaattgctgggattacaggcgtgatccactgcacccgccctttttttttttttttgagacggagtctcgctgcgtgattctcctgcctcagcctcccgagtagttaggattacaggcacacgccactacaccaagctgattttttttttttttaacagagtcacgctctgtcacccaggctggagtgcaatggcacgtctcggctcactgcaacctctacctcctaggttcaagcgattctccctgcctcagcctccagagtagctgggattacaggtgcctgccaccatgccaggctaatttttgttttgctttgttttgttttgttttttgagacagagttttgctcttgttgcccaggctggagtgcaatggcacgatcttgcctcattgcaacctccacctcccatgctcaagcgattctcctgcctcccaagtagctgggattacagacatgcgccaccacgcctgactaattttgtatttttagtagagacagggtttctccatgttggccaggctggtctcgaactcctgacctcaggtgatccgcccacctcagcctcccaaagtgctgggattacagtcatgagccactgcgcccggccctaatttttgtatttttagtatagaacagggtttcaccatgttgcccaggctggtcttaaactcctgacctcaagtgatctgcccaccttggcctcccaaagtgctgagattataggcgtgagccaccacgccaagccccaattttttttttttttttttttaatttgtgacagagtctcactttgttgcccaggctggagtgcagtagtgcaatctaatctcaccttgcaacctccacctcccaggttcaacccctcctgggttcaagtgattctcctgcctcagcctcctgagtagctcgaattacaggcacgcaccaccacacccagctaattttggtatttttagtagagatgaggtctcaccatattgaccaggctggtctcgaacccatgacctcaagtgatcagcctgccacggcctcccacaagtgctgggattacaagcatgagccactgtgcctggtcttaaaaaaaaaagaaaagaaagaagaaaattttaattagctgggcacggtggtgtgtgcctgtagttccagctgctttggaggctgaggtgagaggatggcttgagcatccagcctgggcaacagagcaagaccccatctcttaaaaaaaaaatctatttgctgtgtaaaaataaatagcatttaagtaaaaatataaaagatttgcgattctcagtttctttgtgctgctgagcttgtataggattaactcaggagttggaggcagctatattctacgtcaggccagggtagcagaggaagctgctcgagagagaagaaacaagcagagaagagatattggagagatggagagaagataatgtctgggctctcaacaacttgtttttggcctttcctggggccagctacatctctctccttggtttcttcgaaacatccctatattcttataataaatctctccttttttggcctaagctaacttgagttgtttcttgatagttgcatccaaagaaatctcactgtcatagcaggttttcttttttgtttttgtttgtttgtttgtgacagggtctcgctctgtcaccggggctggaatgcagtggcgtgatctcggctcactgcaacctcccacccctaggtcaagcgattttcttgcctcagcctcccaagtagttgggattacaggcatgcaccatcaggctcggctaatttttgtatttttagtagagatgggtttttgacatgttggctaggctggtcttgaactcctgacctcaactgatccacgtgccttggcctcccaaagtgttaggattacaggcgtgagccactgcgcctgacctcatagtaatttttctgtaaatgcttgttaaaaggaaatgtaaagttctttgtaatgaaattatttaggttctcaaaatttgattgtactttaaaaaaaaaaatctcctaaattgagggaggccagctccagaggtgtcgttaaagacattcaccctaagctaaggtggtgtttgttcatggaaaatatgagctgggcctggggccaagtaacacattccacccactagactttcctctcagtccctgcctaagaagttagacttttcaatgtttggtgatgacctgcctgaaagataaatgctgaatgttgctaaatagaatggagtttgaggagtgtgagacatttttgtttggtttggtctggtttctgttttgaaaggaaaggcgttagggccagggcaagagcaccaatcccagggtaaagagtccttgtgataattattttagtacattcaaatatgggtttccattctagctaattctgcaagactcaaaaaaaaaagaaaaaagaaaaaggaaaaaagatatatgtttccaagttctaggactacttaaacctttgaggctaatacctttctgaaggcaaagtccatttctctgtcagtgttttcaacgctatagatagtactatcctcttactatttattttatattattattcccagtactgaacagacggaaagtacttaggaaaatcctcaaagtcccagaatggtattcataaggcaactcctagagttcaatagcctgcaaatgaagttaaatatattaaatatattttatataagcatgatatcataatgctccaaaaatatcatacactccaaaaaatgacagaatggcagcaaaaaaagctgcatatatgtttatgcttttttttttttttttttttgagacagtctcactctgtctcctggactggagactggcatgatcacagcttattgcagcctcaaactccctgggctcaggtgatcctcccacctcagcctcctaataggtgggaccacaggcatgtgccaccatactcagctaataattatattttttgtagacacagggttttgccgtgctccctaggctggtctcaaactcctgagctcaagcaatctgcctgccacagcctcccaaattgctgagattacaggcgtgagccactgtgttcggcctgttcacacattttttatgtaagatgaatttaaactggatgataaaattgtctctcatgtgaaataagtcagaataattgcattataaatactaaggttaaaaaagcgtaatttatttctatcattgaaataccattgaaaaattgaataacattatttaaataccaggaaccaaccataccattcaagcaatatttcttgaaaattcattagggatatcataaaagtataagacatggcccctgtccttaaggagctttgttataatttatgtgaggtaagacagatacaaagcatcatcattgttatttttactaacagaagtagtatggtgaagtggaaaataatacaggcttttaaatcttaggtgtagatccatatttttagttctgccatcccattaatgtatgatctctgcaaagatacttaactgctcctaggctcaatttctttaattctacagtggggataaggatgctaatttttttgtttgttttttgttttagaaagggtctcactcttttgcccaggctggggtgcactggcactatctcggctcactgcaacctctgcctctggaactcgaaggatcatcccacctcagcctcccaggtatcagggactacaggcacatgccaccatgcccggctaacttttgtatttttggtagagacggggttttgccatgttgcccaggctggtctcaaactcctgagctcaagtgatccacctgcctcggcctcccaaaatactgggattacaggtgtgagccaccgcacccagccaggatgctaaatttaaaggactggtttttagccaggcttggtgtcaagagcctgtaatcccagctactcgggaaactgagacaggataattgcttgaacttgggaggtggaagttgcagtgagccaagatcgcgccactgtactccagcctgggtgacagagtgacagcctgtctaaaaaaaagaaaaaagaaaaaaaaagaacatgttttgttttgtttagttttctttagagatggggatctcactatgttgcccaggctggtctatgaactcctgggcccaagcgatcttccctcatcagcctcccaaaatggtgggattacaggcctgagacactgtgcccggccaggacagttgcaagaattaaattgcattatagatgcaaatacctaagtaaacgctcgatatgtgtcaggtgttcgaaaaatactagtttattctccatctgaattgaagggattgaatattttctaactcgtttctacttattgataaataatagttttattattggtgaattttaaaattgaagttagctaaaactgcaatcattttaacaaccaaaactttaattttctcaacactaaaactcaattccgcgccaggcctgccagacacctgcgccctcctgcagccaccgccacagctgccagcatgtctggcccagacatcaagacgccgaacgccatccagatctgccggattatgcggacgctaatgtggcccgcaatgtctaggcgggaccatcctgaagatgatcaaagaggcgggcgccatcatcagcacccggcattgcaatccgcagaacggggatcgctgtgtggccgctctggctcgggtcgagtgcacccacttcctgtggcccatgtgcatcggtgaggtggcccacgtcagcgcggagatcacctacacctccaagcactctgtggaggtgcaggtcaacatgatgtccgaaaacatcctcacaggtgccaaaaagctgaccaataaggccaccctctggtatgcgcccctgtcgctgacgaacgtggacaaggtcctcgaagagcctcctgttgtgtatttccggcaggagcaggaggaggagggccagaagcggtacaaaacccagaagctggagcgcatggagaccaactggaggaacggggacatcgtccagccagtcctcaacccagagccgaacactgtcagctacagccagtccagcttgatccacctggtggggccttcagactgtaccctgcacagcttcgtgcatgaaggggtgaccatgaaggtcatggacgaggtcgccgggatcttggctgcacgccactgcaagaccaacctcgtcacagcctccatggaggccattaattttgacaacaagatcagaaaaggctgcatcaagaccatctccggacgcatgaccttcacgagcaataagtccgtagagatcgaggtcttggtggatgccgactgtgttgtggacagctctcagaagcgctacagggccgccagtgtcttcacctaagtgtcgctgagccaggaaggcaggtcgctgcccatgccccagctcgtgccggagacccaggacgagaagggctttgaggcctggctcggtggctcacgcctataatcccagcactttaggatgctgaggcaggcggatcacttgacgtcaggagttcaagaccagcctagccaacatggcaaaaccccatctctactaaaaatacaaaacttaactgggcgtggtggcaggcgcctataatcccagctactcaggaggctgaggcaggacaatctcttgaacctgggaggcagaggttgcagtgagccaagatcatgccactgctctccagcctgggcaacaagagcaaaactccgtct

SEQ ID NO: 630 - DNA, 32744 bp, Homo sapiens
  source 1..32744: mol_type = other DNA
gttccgccgccttgcctcccctccccccggctggagctcactgtctccaagatggcggccgtgtcagtttggggcatctccgcggtccggcccggggccccgggatctcggctgtccttcctcccggtaagtagccgaggggccgttcccggccgcccccggccgcccagcccgaggccgagccgctccagggcccactccgctgcctcgcggggtcggcgggccgctgcaggccccgccgcggcctgcgccgcctcccgctgctctgcgccaggcctcgggctggggcgccgtggccgccccctcgcgcccgcccgctcgctcgctcgcttgctcgcttgttcggcgcccggctgccccggcccgcggcccgcgcgccgccgcccggccccgcgctcgcgggccccgcgcccccgatcccgccggccgggcccgccctgggggagccggcgggtgggcgggcggcgagcggcccaggccgcggagcctcgggctggcggagccggcgagcccgctctccctcggggcgcgcccacccgcccgccgcgcgcgtgccggctgtgccgggccgggccgcttctccccgcgctcgcgggcgctcgggttcgggctcgggctcgggttccggctccggctttggctccggccgggggcgcggggatccgagcggggctgaggcggcgagcggggctgacaggccggcgggtgttgtggtgcgaggcgcagcacgtgtggtgttgtgtctgccgggctgtcagcccagccgccgaggggaggccgggcgcctgtcaacctcgcggcttggcccggtgcgcgactgtcaggctcccagcaacccgcgccgccctcgagccggcccccagagcttagggtgcggagctgggccggggctatgcaccgctctgaactccttcacgtgatttcattgttaacttgtgctcggggtctgtttccatcgcgtggaaacggtgcagcgccccgtcggcgagctgccgggctgtgcagatccaagtttttaaagtttctcgctctttgaaaagagagcgcgaagacgtgtttaggggtggggaatggggacgggaaggactgtcggaagcgagttgcgctcgctctagccgctcgtgtactttccgggagttaagatccgaggctgcaggcgcttgactttccgaagacctggagactgatgacaatcccgactggaaagacaatgagtgactgtcactcattcttttacctgcgaagcttagtcaattaggacgttcgttcccagcttgttaaactcaggatgtagcttctcatttagtttagacttaatatctgtataatgagcttacttggagtaatgatactctgatttctatcctcttgagaccctcaccaaattgaagcatgattctcccagggggcttctttttaggcagctgatttaaaaacaaatcttggctcaggtttgaatgtttgcttcactcttttctttcctatcagagttaatagtaatatctctttcctagtgtgtattagttttccgtttgattttaatgtcactaccaagaatagttgctgtgggagccatttgtctagcattgtttatattgtaatgcaaatgatctccagaatgagagcagaagttctaaaaaacacttcagttaaacttatttttggaggcaaaagagttagattcagaattcagtactttagtgattaaacaagattgcatctaccagattcttttatagggatactgactttgattcagagagacagtacatttctgtttatgttttattaatgttcgtttcaggacagcaatcttgaatttatatctttattatttgggcttctctttagtcctacaagtagccagtgtatttctttttctgtaccgtccgtttgatatgtagtatgtgcgttgaccccagtgattctgggccttcctcatttctagttttcctgtctgaattacttacacgcagtttgacagttgtgactctcttcagcatatgaatagaaacatcttagtttgggttaggagaagctatcagcatgtaattcttaaaatttgaatgaaagtggattattgttaaattcagtaagcacttttactctaggctattttcaatagtatttttgtttccattaggagagattaaggtaatactgtacttaaattataaactgggtgtgcatattgtattcattcttttcatgtaagaactaaaattttctcagtcgttttctgccttattgactgtttttgtctactctgaatgtctagaattttgaaagatgaaagattcacttttactttcattgcaggattctttctactaatccagatacttgttgaagtgctgactagtttcttggggaaagatgtcaaggaagagttgaaattcctagactggtgagcagagattgcggagtacagaatagccatcacccactctggttagtggtagcttaaaggtcattcttagaacatgtcatcgtgtttcctcattgtatcctaattactcatcttttttttttcttttctttttttttcttttttatcccaatggtttacatacatgattgttttggaatattaatagataagtttggaaattcttaagggtgcctagtaaacacttgctgtttgattgctttatgatgaggatgcttattttcattcgaaataggtcttggtagaaaactgaccttattttcattgcttttcaggcataagatgcacatttttctgctctggagccgggaatgaaatattcttgagttcttacaactttatgacgagacccatgtgtggtgctattgagaaattcattgggaagttggaagacatttcaatcaacaggttgttttggtttctatagtacaattggggtggcattctgttttgtgaaaggaggaaggacttaggccagaaaactcatatgctatggttaactggttcccagcctccgagaatcttgttttccatggtgtaaaacttactcagcatcaggataagggataacgactctatggatatacagaatccttcaccatggtaaaactcgcaaacccgctttatactgagtggattttggaggccatcaaaaaagtgaaaaagcagaaacagcgtccttcagaagaaaggatatgcaatgctgtgtcttcatcccatggcttggatcgtaaaactgttttagaacaattggagttgagtgttaaagatggaacaattttaaaagtctcaaataaaggactcaattcctataaagatcctgataatcctgggcgaatagcacttcctaagcctcggaaccatggaaaattggataataaacaaaatgtggattggaataaactgataaagcgggcagttgagggcttggcagagtctggtggctcaactttgaaaagcattgaacgttttttgaaaggtcagaaggatgtgtctgcattattcggaggcagtgctgcctctggctttcaccagcagttacgattggctatcaaacgtgccattggccacggcagactccttaaagatggacctctttatcggctcaacactaaagcaaccaacgtggatgggaaagagagttgtgagtctctttcctgtttacctccagtgtcccttcttccacatgaaaaggataaggtaagaatggcatatgcttcggggtttatagagctgatgatataggatgctacaaattcacatttctgggaagttatattcaagttttttgtttggggacttctgtggagtgatcacctctggttttttattggtgagttgtagctatgagagcttcatagatttgttctggtactttgaaatatttgaagcctaagattaaaaatgtagaatgttaatctgactaaaagaacttatttacattacaatgaaaaagtgacatatgagtttaaaacttttttttaaatttttttttattattttgcttgaggagtactccagcgtgagactttaaaactttaactaaaggttcttagaacaccttactactggaagttgatgagcagccaaatcatggagacttgaatttgaaacaagcagatgactctgagaacatttttctgttttccattttgttgcagattactcgttagacagaaatgagacagattctcatgacccataggcgcaactaagcaaacttagcaattcttgtttctgctgtttgtattatagctttctgtcatgtattatggctttgcatatgatgaagtcctaaatgctatttatgacagctgtagttgcatgggacaggaatacagtatcctaaactagaaaagttctggagggtctggaacagtagttcatgcctgtaatcccagcgctttgggaggctgggacaggaggatgtcttgagcctaggagtttgagcccagcctgagcaatatagcgagaccccacgtccaccaaaaatagaaaaattagccaggtatgggcgcgcctgtagtcctagctacttgggaggctgtgtcggggaggattgcttgagtacaggtgtctgaggctccagtgagctatgctgtcaccactgcactccagcctggacaactgagaccctgttctaaaaacaaaaagaaaggtaaagttctggagagttgggagttttgatgcccagatgtgtactttactctgttgtgttttaggatgttattgtatatagttgaaattatgacttcttaaacagtaaattttggtgcttaaatagatatttggagattaggagaattttgttagtacctgttttttacattgacctagtatcttagctgtaaatttacttaaggtgctctgaattatagttccttggagagcagtgatgctttaagttgctgcacaccttggtagacataagtaaaatgatcttcattttgcttaagatgatggaggatactcctagggtggaaagatggtaaagttaacattgaatgtattttgaaaattggagatttgatctcaatttgttgtattattagcagcccactgaatacctgtagatttttctttaacaattgaaaattaacggtatttttctttgatgaaatttttagagatctatttcagggttcaattttccctgtgaacattgaaataaaacataatcttactgttattacccttgaaatgattctcatacagtcatgaattgatagagaatctcattcataaaatggctctatgtaatttgagcatttattaaaagtatatattaaaaattcagggtagacaagtaattaaaatgctttattctatatttaagtgctgtaagaactcttacctgtagaaactttatcacatgtggctgaatttaaatacagttatcggatttctacaattattaaatgatctaacaggttaactgcctggaaacaggaaataatttatagttagatcagttcagtgccatacctgtgaattggatgttataagttcctgttaggccacctgtttgcttttatttatttatttttgagacagaatctcgttctgtcacccaggctggagtgcagtggtgcagtctcactgcaacctccgcctcccaggttcaagcgattctcttgcctcagcctcccaagtagctgggattacagacatgcaccaccacgcccggctaatttttgtatttttagtagagacggggtttcaccttgttggccaggctggtctcgaactcctgacctcgagtgatccacccgcctctgcctcccaaagtgttgggattacaggcttgagccaccgtgcctggcctgttgtttgcttttattgtaattacacttgcttgaattatcaatagataattttaaaaaatattagctatataaaaatgtcatttgagcatatttttaaaaggtagtaaatatagtacagtgcaagacaaatccaagtcctagaaccctgagattttacttttggaagggaccctgagaaccgtctaatccaagtccttattttgcagctgagctaaggacctttgttgagaccatttcatagcacctttgcattaagaaaagtttaattcagtagagatgtgctgttttgctttgactggagtgcagtggtgtgatctcagctcactgcaaccttcgcctcccgggttcaagcgattcttctgcctcaacctcctgagtagctgggattataggtttgcgccaccacgtgtggctacttttttttttttttttttgtatttttagtagagacagggtttcaccatgttggctaggctggtctcaactcctgacctcaagcgacctgcccacctcggtctctcaaagtgccaagattataggaatgatccaccgcacctggccacatttgattttggagaaataaagcaagaaaaacaaaagtgatttaataattgaaaaaatgaaaaagaaatgcccatttgcttacatagctttcatatatagtgtttttttgttttttttttttttttgagatggaatttcgctcttgttgcccaggctggagtgcagtggcacgatcttggcttactgcagcctccgctgcccaggttcaagcaattcttccttctcagcctcccatgtagctgggattacaggcatgctgaccaccatgcctggctaattttgtatttttagtagagacggggtttctccctgttggtcaggctcatctcgaactcccaacctcaggtgatccgcccaccttggcctcccaaagtgctggcattacaggcatgagccaccctgcctatagtgttaactgaagtaactaaatttagacatgttggaaaatagagtttgtttcttcaggtagacttgtatatgtactaatctcattggaaaactaatttcatgatagtatctattcaattagagttggtgagctctgttctatatttttaaatggagtcttattttcagtagtgaatttcctgtgtgacttcccccaaagatatgaaaagtttacattaaaaatcgtaatacagtgaactctaggatgagagattattcctttgaacagattatgtctgctccttttattgtattttaactattttctttcctctccttcgaactacgcagtcagttgctatgcagaattgatagtttgctgttacgaacctagatgttctcaaaaaaagaaaagaattatccagagtttatttgacagtgatggagaaaggaaggtgtataggtcaggagtagtttcacttttaggaattaattggttcagcatatagtcattgagcacctactgtgggccaggcactctgcttggaacagaaacagttctgtcttctctgggatgctaatgcaggtatttctattgacctggccaactgtaaggtgaagatgaaattcaaagactgcgtggagtaacccgagcaagttcctctttactttttctggtatcaattctaactttttgtttttttttggtgatattaacctttggaaggaactgtatgttagattttcggcagctgagtggttttgatccttttgggagatcaactgtgttggaatacgtttaagaggagtttttgtgaagacattggaactttagtgtgttcttttcacattgataagtactgaggagaatccatgggatactgtgattaaaagtttttaggccaggcctggtggctcaggcctgtaatcccagcactttgggatgccgaggggggggtggatcacctgaggtcaggagttcaggaccagcctggccaatatggtgaaaccccatctctacagaatacaaaaatcagcccggcatgatggtgggtgcctgtaatcccagctactcggtaggctgaggcaggataatcgcttgaacccaggaggcggaggttgtagcgagcctagattgtgccactgcactccagcctgggcaacagagcaagactccatctcaaaaaaaaaaaaaaaaaaaagtttttacccatgttataagggaaatttttgagctaactttagagtgtggtagttaatggtgagtttatttattaaagtgtttatttactatgtgccaggcgttattttaatgctgtatatatattaactcatttaatcctctaacataactagctactgttaggttagttagttattaataacataacagtaccagcagtgaaatagctactgttattttacaggtgaagaaactgaggcataaaagagatttcagtaacttgctgaagtcacacaaatattaggtggcagagctgggatttgaatttgggcagtctggctccagagtctttgtaatagccatactgaccacctcttaggagcagtaatgtatgatggctatcactgcactcaagtacagaatcgtgaatgtccttggtgttaacttcatagcacatttcctaattgttaaaggacaaattcccgcccgtcttcattgtgtccatttttctttttttgcagaacagatttgaaaattcactttggaccagtgataagaatgtgttaggaaccaaagattaggagtaatctagttttgtatatctgaggtccattaaaaaaaagtttcacctacatgccatttttttcccttaaagataatttctgtgctaactaattttcatttcagttgtcactaacattttctgataggcaaggtagggatcagttgtattgctataccagagtgctttaatttgggacagaaatactgttttccttgaatcatgggattataggtgaggagaagagtgtgtaactggcttaaatagcatcttcctctttgtaaatttctttttgaaatatagatattactgtaaggtaatttgttccatttacttcagttattcattatttatttagcaaacatttgaatgcctgccatgaacagtggatttaagatttaggtcctgtgaggggattaaagcagacagaatagagatacaaaataaattttttgaaagccttttttagtttatgaactgtaatttttttacattattattttttcataacaattaagtatcatgactcagaaataataatatgtttagtgggcaaggcaattatttgagactgtgatggtccatttaaaaaattatctttatatagtgagtcttggaaagattcaatttcctttcaagaatagttttcaccttgatttcaaacttctgagttcatttttacacactgacataatttacttgaatatatatagtttgtgttctgtattactagcccagaaaaatattctctttcatggtaatcagccagatcattaaaagtattgttatttggtggcatagtattttggaacagaattataatttgctaaagcgttcagttggacagggaagagtaggtattgtcaactaatgttattgttcaggttactcccagctgggtaacctggagcagaaagatccaatgataaatctcttgccttctactctaagttacatctcaatttggtcaactcttagtagagtccaaattattttgttttattggaatttatattttaaattatagaggaagtagagctttgacaggaatttagaatttaaattttcgatgtagagatactgattaaaatggggattttttttttttttttgagagatggagtcttgctttgttgcccaggctggagtgcagtggtgcaacctccacctcctgggttcaagcgattctcctgcctcagcctcccgagtaagctgggattataggcgcatgccaccatgcccggctaatttttatatttttagtagagatggggtttcaccaggttggccaggctggtctcgaactcctgacctcatgatccgcctgcctcggcctcccagagtgctgggattataggcgtgagccaccgtgcccggccagggatatgtttttaagttactgaaagttaagagtgatgaagttttgatttagctatttggaaatgacctttatagtagaatagttgcacattttatatgttagaatggtggtattttataagaaaattgttaaccaatataagcttggaaatttcaatttcaattactctgttgcgttgatactgtataaaaaggcaataaatagttgtccatgctattaaattcagggctatgtggactgcttgacagaatgattgttcactttggaaaaacaaaaaaaacaaaaaatcttctgaaggcaaaagataaaatattgaggatacagtgacgtggaaaatgtagctattatcaagtgtgaaatggattgatctcagtaattgttatatttaataatttaaacattttttatgacatgcatttcttttcttttttttttttgagatggagtcttgctctgttgcttaggctggagtgcggtggcccagtttcagctcactgcaacctccgccttccaggttgaagcaattctactgcctctcccctcctgctgtctgcgattacaggcgtgtgccaccatacctacctaatttttgtatttttaatagaaatggggtttcaccatgttggccagttgtgttctcgaactcctgacctcaggtgatccgcccacctccgcctcccaaagtgctaggattacaggcgtcagccaccatgcccggcccatgccgtacatttctgacatcattgtttataccatttgtttgtgactccaaatgtaccaggagcagtggcctagaaataaaaatttgttactaacaagtcattgaggtggattaattgtaaatctggttaggaattaattttgtcttagcagatttattcttcaaaaattcagaaatttaaaaataactcagagatatgtttgtaaaatagtatctgtttaagtacaatcagctgcacagtttttttttttttttttttttgagacggaatctcactcttgcccagactggagtgcagtggcgcaaccttggctcactgcaacctctgcctcccaggttcaagtgattctcctgcctcagtctcccaaatagctgggattacaggcatgcgccaccatgcctggctaatttttgtatttttagtaaagatggggcttcactgtgttggccagacgaatctcaaactcctgattggcttcccaaagtgctgggattataggtgtgagccactgtacctggccaactgtgcagatttttttgatcttctggttcacctatgagcacaatgatttttggtaattttcagtgcatgacatacctcgaaataaagctactgagctactaaagcttgggttagccattactaatccaaagttctataccaaaccaatttttcttttctttctttctttctttttttttttttttttttttttttgagacagagtcttgctcttgtcacttaggctggagtgcaatggtgcgatctcggctcactgcagcctccgcctcctgggttcaggcgattctcctgcctcagcctcccgagtagctgggtttacatgcacccgccaccacgcctggctaattttttgtatttttagtagagacagggttttgccacgttggccaggctggtctcgaactcctgacctcaggtgatccacccgccttggcctcccaaagtgctgggattacaggtgtgagccaccatgcccagccaccaatttttcttatgcttacaacctagacatttttctagcgaataagtactttactctttcttggtctaccttccaattggtgaaataaagggaaggaattaatgaagacatcgggtaccacaaatggcttcaggaatagaaatccagaggttctaatggtcttaacctcgttttttctttgctctgtatcaataggctaagggaacgtaaagagttgcttatagaaacctattaatagctaacatttgttaagggctgatgatgtgttagggacttttttttttaagtgttttaacatgtactttcttattgaagtctcaaaagaattctatatgattaaattttataggcataatatatttatataataggtatttaatagtatttaatcatacaaattttcggcagggcgcggtggctcacgcctataatcccagcactttgggaagccgaggcaggcggatctcgaggtcaggagatcgagaccatcctggctaacgtggtgaaagcccgtctccactaaaaaatacaaaagaaaaaaaaaaaatattagccaggcattgtggtgggcgcctgtagtcccagctacttgggaggctaaggcaggagaatggcgtgaacccgggaggtggagcttgcagtgagccgagattgcgctactgcactccagcctgggtgacagagtgagactccgtctcaaaaaaaaacaaaaattaataataataatacaagttttcattatgtcttatagaaaaccaaatggaaaatgaatataaggaaatgcaaaatacattaaatttctttttacccttgctgcctgttttttctttagttcatcctggacttgtgggccaatacttttttgttatgtttaatactaggagagcaaatacataacaggaactgtgatgaatctggaaagaaaatttatatcattcagtcttcctgaagctgtaagaatctccttaacatctattagatttattttctctttgcatttaaagttttggagaaaatatctttgtcatactgacttggttcttagctatgtaagaggactaaatctaggtgcggagtttgctggtttaaatagaattaaaaatttatttttttctggtgacctggagagtgtttcttaaaattataataatgaatacttttcatgctctgatttatgtataggaattattaagagcttcactctgataaagttatttaccacttggctactcaggggtggagtcatttcacaaaggatctgcagcgaatgaattagaccaggagtaacttcacccttctgcttgtcccagctggagcaggattaggactcattcagctgcagctggttcccaggaaaatgaaagcagttccttctggttttttcctttcatatgaaagtcatagttcccagcagatggctttcatcagccctgtacatgtatctgtaaattcaaggccaaggaattattttcaacttcattagggaacaggtgaagaaaccatttgtagtgtggcactattttattaggagttgaaattaagcatagagattatagtagtatgccattctgggtcaaaatagtttttaactgtcagcaatttaaagaaaaaaaaagactgctaaggaaaagtaagtctggctgtagtgttgattgaggtatcttttatggttgaattgtattatgcttacgaaacatagattattagaaaaaaagacttgtatcttctgcattgtgtagaatgttcagccagtagcaatcttggatcacagtgattctaatctgatttcacaaataatagggaaatttgagagccaaagaggttgaagtgtcttgtccagtgccacacagccagttaataccatctggaagaattggtcaggcccttctcaattttgtgcttttttcattatgctgtagtactgctttatagtattagagagcagtgagcctaaaataatttagttagaattctcttccttaatggaaaccatagaataaaccttgtctagagaatattggtggtatcgtaaaccacaaatatataaatctgctatttcagtgtgtgaaaatagctatacactcttgttagagttttgaaacaactttttgggaaaagactgctttcttatggcccaagttagaggaatcaaggttttcttatgttgttggctaaatattagaaggggaacatgttgagctaccttaatgctggaagaaaaagtactccttgagttttgggaaaaaaagtccatttaaaggtaagtctaattttcagtaggtctgcaacacaaatgacctctgagtgacttggatcattggttagaatttaaaattcttgagactgagctagagatagcaaggtacaaacctttctattaattaatgaagtaatttttaccaaagacattaaatatgggtggaccaaaagtgtatagtctagcacttctataaacatagtgtctgggaggagcttgagagatttgtaatgttacttgtaaacagaccgtgtggggaagaccgcagacagcacatcattttttgtctttattggtctttatgactaacacttcatctctgcatcacttctgctttgctgtaaaacttagcaagtacattaggatagtggcaaataaagattaagattgaggacagatgtttgtaaaataactgggcgattttaagattataggtgtaacttgttaagaagaagataactggtgtggaaataaaatctggcagccaaaaaaaaaaaaaaagctttcaatgtgttaaagaagatagttgcttcttttgccgtttaccttttatgtagaataggtgattccgcagatctagaggtgttgtcagacttgtactatgggctgcgttttcctccagggaattgtgaactgtagttgacctgaagagctgctaagtgttggtttttaattctttgagcttagtaaagtctaggttccttttttcttagtcattgggtacagtgaagcatttaactcctgagttttctagaacctttaacagaactctcagaaacattattactatttttgtgtgtggagtgtgattctgtactttaatagtttcccaatttttctattcagggcatctttaaatatctaacttactatttaaaccctctttcaccattttcctgccttacttttttccatgccactcagtttttctttaattctgtaacataaatccaaagccttattctttggaaagcagtggtacttggcactaaattcactttagcattacctgaggaagcttaaaaaataaataccaaactaattaaatttgactagtagtgaggcccaggtttcagttttttttattttttatttttttaagaatgtttatctgatgtgcagctggggttgagaaccattgctctaatgcttagaaccaacatctctgtagtggggactggctaagagagtcagaagacagaagaagcaggtactttttaacctcataattgacattcaaacaaatgatgaaatagcatgcttcacacacaccctcatgaacacactttggacccaggacagtgtacttctggaaatgtacattctgttttattgtcctccctggctataactactctaatcttccacctttctttctccttaccctcactgctttatctcaagaagatcttgtgtggtatatagttgcgagaaagttacctgcatgattccgacaggtgccctgccatcactctaatgctgttctcattgcttggccttatggcacattctcactcactcactactcctgcatcatgttggcaaactccagccatttaccaccttctccttttttttttgagttggagtcttgctctgtcacccaggctggagtgcagtggtgcgatctctgctcactgcaacctccatctcctgggttcaagcgattcttctgcctcagcctcccaagcagctgggattacaggtgcctgctaccacccctggctaatttttgtatttttttagtggagacggggtttcatcatgttggctaggctggtcttgaactcctgacctcaggtgatctgcccaccttggcctcccaaagtgctgggattacaggcatgagccatcgtgcccaacctctctgctttaactttggggaaaatctcatgaccatgtggtgggatgccacttacaaatttgtggcctccaatctgagctctgccctctgcttgaagatgtatgtctgtgtatagtctgttctgtctgcagaaattcagtatttcttcccacctttttttctcattttcagtagatactcccatatgctacatcatagagataatggaatctgtccaattgagctcattgagtttatacccctctcatgccatcctaaatacatctgtgcttatttctgcccgctttgctaccttgtcataggacagtgaaagaagtgtgaaaggctcatctctccattctttttcaggaccccattctctgctacctcaggggccgtgtgccatcaaaaatagtcccattttttgactctatcatctttctcgctcactttttagtccttagcaggcagaagactctcccgttagagtaaaaacaaccaaaaaaccactgcagatccttctttctatgtataccctgtctgtttccattcatttttaaacttcttgaaaaaagtctatattcattccacgtctgctgcaatctggcttttggccctagagcagcactatttgaaactgctcttgtggacagttttcagtcttattttacctgagttctcagctgcatttagcatttgttgaccattcttccctttcctctgggataattcttagatgtctcccccttcctcccatctttctggtaattccttttcagtttattggcgttttatcttttgcctgtatctagatgttggattccctaaggttctgttcttcactcatttcttactgttttctagagagttatctagagataactttcctgagttatttctagacctctgtgttctttactgatgactctaatttcatatcttaatttgagagctctcttctgatctctggacttgtatattccattgtgtagtattttatgtcagtctcttcagattcacaatggctcagatggaatttatcaacttcctttaaccggctgtcatttcttacagtggtaagagccattgccatcgattctgatgcttaaaatggaaactttggtgtcatcttccatacctcacttgtctgtcttttggattcagttctattccatcccatgtcttctctcttacactttttaacatctcttatttaacctcttctgtattcgaggtcctctgttagagcaggtcctcatcatttctctcctgattaccttagtagtttcttcattgattttccttcctccagtatcatcttcgtctagtccacattattgccaaaatgatcttactaagaaatgattaagaacacaagcgcaaagaccagaccatctgggctttctatcccacactgggactacttgctttatgaccttgggtaatttgcttaaccattctttgccacattttcttctataaaatggggataatacagtgcttatctcatagtgaagttgtgagaatttaatgagttaatatacatctgggctgacagaactttgtgcaatgatggaaatgttctatatctgtactgccctctgtgatagccagagccatgtgtagctattgagctcttgcaatatggccagttgagtgaggagctgaattttaaattttatttagttataatttaattgaaatagccacatgtggctagtagctgctataatggacagtacagaatatgtaaagtccttagaaatagtgtttagcacataagtgctccataaatgttaactgttattaccatctttctaaaattaaacttctctgcttaaaatccttcagtaccaaattctgcgatatagtatatatgagttgtaacccattcccgtgcgttgctccaaacttgtcaattgccacttcttcataatgccctctgtgttccactgtaccagttctcaaagtgtggatgtagaggacagcaccagcaatagtatcccccaaaaacttgtttaaaatgcagattcttgagccatatttcaggcctattcaatcagaaactgaatttggggctttgcaacccgtatgttagtaagtcctccaggcgattctgatgcacgcttgagttcgagagccattgtactgcatcagtctccctgcagttcctcagatctatcttgttttcccttgcccctatatttttctcctgtctggaatgattgttatccattttttcttcctcataaattagctcttcaaccttgcagacttagtttagtcaagtttctttctgtttcttcctccttatcacccaccctgctcccaggctgacttcaagacctgtcttaatctccatgctgcatatgtccgtacacacttgcatcatagaccattttacatagtacttttttagcctgtctcctattagtgaatttaggttcttgtttttcgtctttgtatttccatctatctggcagtatctgattgttttgtttatttttaatttttttaattaaaaaatttttaactgttttgtttgggttgtttcatatgtattaagcatcttccaggggccggcacagtgattaggagtgacagagtaggtaaagcagacatcgtctctgtaataaatacacatggtgataagtgctctgatgaagtaaaatagagcactgtggaaacacagaggagggggtggaaaaagtcagggaagtctgttcagaggaagtcacatgtgaagttagtgaagtggggaagcaaatgggtgcggtgggaaagagagtagttcctgaaaagggaacagcatgtacaaaggcctagaagcaaaacattgtatgcacatagtaactgtttaattggatatgaattttaaaaatcacatgtctaacttagctctcggtttcgaagacatcacccttcccagcaaacattgcattttatatgcttctgtatttttaaagcagttttcatacttgatatcacactttgagtagatggttatggtgtgatagggtaacttccaagccagcaggatacatctttttacttactgccttttaaagcagaaaaaaggatttgttttgtctgaaaattattccacagggccaggaacacatcagtggtgacagaggtaaacacattactcttattgagtaagaatagccaaggtttggccaggcacagtggctcacgcctgtaatcccagcactttgggaggccgagacaggcagatcatgaggtcaggagttcgagaccaccctggccaacatggtgaacgtctctactaaaaatacaaaaattagccgagtgtggtggtaggtgcctgtaatcccagctacttggaggctgaggcagaagaatcacttgaacctgggaggcagagtttgccgtgagctgagatgaccaccactgcactccagcctgggcaacagagcaagactccatctcaaaaaaaaaaaaaaaaaaaaaaaaagccaaggttttaaataagcattagaccattgagaaagcatatcattaggaaggctgaaggcagccagtgtgccagccacaactgttgtcacttttttagcctcactgtgtattggctctttttgctcttgttgatgccatcccacttcctgttctcattagccctccattgtaagagtaacgtggcattcgttaatgtgctgtgtaagctccaactattaatttgctactgaatatttgcttttgtctttttgagactttatataatttttagtaaaataaaaactcaccttttgctctctttgattgctttgcaaatgggttgtcttcataatttattaactttgaaagaagactgataaaaatacagttttgtttctcataactttagccaatcgggacaaacctagagaagaaggaaaaagggaaataaaatctgttcccctaaaactttatatggatggtaatattgaaatatttcagatattgaagaattttgctttcacatacatatattttttgatataacaattttgtacataggtacaaaagataggcagtccaggtgctatgattgccaagttttacttagtcagaattatatagttaaggtaataaatggaactagagcctaggtctgttcaatcttagtactccttgagccacatcaagctgcctgttgtgcaagactacagttcatgaaaatgacaagcattaaaaaacaagtactcctggctaacacggcaaaaccctgtctctactaaaaatacagaaaattagccaggcatggtggcaggcgcctgtagtcccagctactcgggaggctgaggcaggagaacggcgtgaacccgggaggtgaagcttgcagtgagctgagatcgggccactgcattctagcctgggcgatagagtgagactccgtctcaaaaaaaaaaaaagtacgaccaggcatggtggctcacgcctgtaatcctaggactttgggaggctgaggtgggtggatcacctgaggtcaggagttcaagaccagcctggccaacatgacaaaaccctatctctactaaaaatacaaaaattagccagttgtgatgatgggtgtctgtaatcccagctacttgggaggctgaggcagggagaattgcttgaacccgggaggtggaggttgcggtgagccaagatcacaccactgcacttcagcctgggcgacagagctagactccgtctccaaaaaaaaaaaaaaaaaaaaaaaaaaaaagtgaatgctccttcaatatttatttcatagatctgtgaaaccatttatcaaatcataggtattattcatctttggatccagcttgcagcactttctaacgatgcccatagagtgtttttataattgaaaccatcatgtttgaactagaagggggatgatagaaattaggttgattaaaaaaattattcagctctctttatcctctcaaaatttatagcctctagatgaaaaggagaaaatagggtatcagatgtattctagaaatgcttgatacctcagctgaaaagtaccatttgccacttccttcaagatagtatttgttttgtattacccatataatatttttaaaagttaaaaacacttttctgaataggtaatgtattcatcactgtgtaaaattcaaaaagtacaaaaacgagaattctgtgaaaagtattattctaagtcttattccctagctacttggctcccctctgggaggcagccggtgagctgtatgtttcttttgtaccttttgaaatgattgtatgtgtatacaaatgatcactttatgtatacatttctcctgtccccccccccttttttttttttgcatttggcagcataccttaacatactcttttgcatcttactttttttttctcaccacttaacaatatatgctcatgcacttcataacaatgttgcagtcaacagtagaccacatatacaaaagttgtcccataagattttaacggagaggcggagcacagtggttaacccctgtaattccagcactttgtgagactgaggcaagcagatcacttgaggtcaggagttcaagtccagcctgaccaacatggtgaaaccctgtctctactaaaaatacaacaacaacaacaaaaaatttgtcaggtgtggtggcaggcttctgtaatcccagctccttgagaagctgaggcacgagtatcactggaacctgggaggcagagtttgcggtgaaccaagatcccgccactgcactccagcctgggtgacagaacaaaactgtgtctcaaaaaaaaaataataataaaataaaataaaattttaatggagagaggtgaaattaaggaggcttaaagatgggtgactagaggaccccaacattcaccttctccacaaaggtggaccaaaacagccagtagataatcacattttgaatgcagcatttaagagagaacactgaaattaaacacggaaaggatgaggaacctctgaggcacaggaagagagggaagtgaacagctggcctggctgggattggcttggagccgggagaaagtccccagtgtggagaacaggtaagagacagatccccagtgatctgtgttcccaccatggactcctgtaatctggcctcaggagagcttcttggccttcatgggccctgatactagaataggaaaatagggagctgcctggagcccccttgtccgagacccaatgagctgcagcagggtgccattttgacagtccagcccctattagaccacatctttctctggcgcccaattgcccttgaatctccatatccgtagtgctctgatgacatgttcctgtgtccatccagagggctgcagcatcacaatgccagctggacccagcagtgcagagcatattaattctccagaaagagtccagtggaaaaaaagaaaaatgcctgagaaacagttcaaaataatattaaagaagctcagtgaaatacaagggtacacaatgtaaagaaatcagaaaaataattcatgatctgaatgagaaatttaacagataacataaacaagaaacagaaattgtagaactgaagaattcaactaatgaaataaaagctataattgaggtggtcatggtggctcatgcctgtaatcaatcccagcattttgggagaccaaggcgggaggatcgcttgaacccaggagtttgagatcagcctgggcaacatggtgagacccctgtctcttgaactgtgatcatgccactgcactccagtctgggcaacagagtgagaacctgtttcaaaaaaaaaaaaacaaaaaaaaactacaactgtgagtgcttttaactatagactagatcaagcagaagaaaggacatctgaatttgaagacagatcttttgaaataattgtcatacaaaaaaataagaaagcatatgtgacatatgggagggacaccataatgtgaccaaatatttgagtgttgggtattccagaagaatagaggggcaaaggcatagaattattactgaaataataactgaaaagttttcgaatcttacaaaagatacagacatacagatttagaaaactaaaagatttcaaaatagattcagtccataaggtgttctccatggcacattatagtcaaactgtcacaaagacagagaattctaaaaatagcaggaggaaagcagtgaatcacaatataagggaagccccatcagactaacagcagaaatcttataggccaggagagaatgggatgatatattcaaaatactggaagaatgaaactactggccaagaatactacacctaacaaagctgtctttttagaatgaaagataaataaattctttcccagataagaaaaaaatcaagggaatttatcaacactagatggccctacaagaaatgcttaagggagttctaaatctgaaagtgaaagggcaatatgtaccgccatgaaaacatgcaaatacataaaactcactagaagagcagacatacaaatgaaaaagagaaaggacccaaatattaccacaggaaattaccaaactgcagtgacaaccaatgagagaggaagaaaggaacaaggatacacaaaacaaccagaaggttaacaaaatacaggataagtcttcagctgtcaataataatcttgaatcagattaaattccacacttaaaatatgtagataaactgattttttttaagacccaattatatactgcctacaagaaacttacttcacctatgaagacatatagaccgaaagtgaagggatggaacaagatattttatgcaaatggaaaccaaaagtgattaggagtactatacttctattagataaagtggacattaagtcgaaaactgcaaaaagagataacatgggtcattacatagtgataaagggatcagtacagcaagaggatataacaatggtaaatatatacgcacccaatataggagcacccagatacataaagcaaatgttattagatctaaagggagagaacaactccaatatggtaatagttggggacttcaacacttcacgctcagaattgggcaggtcagctgtgcagaaaatcagcaaaaactgtggatttaaaccacactttacaccaaatggacctgactggtatttacagaacattttatccagcagccagagaatacacattcttctcatcagcacatggatcattctctaggatagaccaaacaagtctcaacaaattttttaaaaccaaaatcatatcatgtattttcttagaccaaaatggaataaaactagatatccagaagaagaggaactttggaaactatataaatacaaggaaattaaacagcatgctcccgaacaatcactgggtcaatgaagatactaagaatgaaataaaaaaaatttcttacaacaaatgggatatagcaaaagcagagttaagagggaagtttacagccaataagtgcctccattaaaaaagtagaaagatatcacataaactacctaatgctgcacctcagggaactagaaaagttaagaacaaactaaatcctcaaattagtagaaagaaagaaataataaaggcaggagcagaaataaaatagaaactgaaaaaatacaaagaatcaacaaaatgaaaagttttttaaaaagacaaaattgataaactgctagcgaggcaaaccaagaaaaaagagagaagacccaaataaattagaaatgaaaaaggagacattacaactgataccacagaagtacaaaggatcgtcagcaactattatgaacaactgtatgctaacaaattggaaaaccagaggaaatggatacattactggacacgtacaacctaccaaaattgaatcaggaagaaacaatacctgaacacccaataatgagtaacacaattgaatcagaaataaaaagtttccaaaaagagaaaagcctaggaccagatggctttcctctcaattctacctgctgaattttaccaaacttaagaagaagaactaacaccagtttttctcaaactattccaaaaaattaaagaggagggaattcttcctaactcactctacaaggccagcattatcccaataccaaatccagataagaatacaacaacaacaacaaaagaaaactacaggccaatagtcctgatgaacatacatgcaaaaatcctcaacaaaatactgatagacaatccaaacaatccagcaacaatcaaaaagataacacaccatgattaattggggtttatcctagggatgcatattcaaatatgttcatgttcaacctatgcaaatcaataaatgtgatacattgcatcaatagagtggacaaatatcttgataatttcaatagatgcagaaaaagcatttgataaaattcaacatcttttcatgataaaacctctcaacaaattaggcataaaaggagcatacttcaacattaataagggccatccatgacaaacccacagctaacgttatactaagtggggaaaagctgaaagccttttctctaagaattggaataaggcaaggttacccactctcacaactcgtattcagcgtagtactggaaatcccaaccggagcattcaggcaagagaaagaaaaaaaaggcatccagattggaaaagaggaagtcagattgtccctctttgcagacaacatgatctcatatgtagaaaaacatgaaggctctacaaaaaaacttttagaactgataacacaaattcaataaagttgcaggatacaaaatcaacatacaaaaatcagtagtgtttccatacaccaataacaaaagaatggaaaaataaagcaatcccacttacaaagctaccaagacaatcacacaaaacctagttataaatttaaccaaggaggtggaagacctctataagggaaactgtaacagtgattaaaaaaaaattggaggacacaaacaaatgggaagacatcccctgttcatggattggaagaattactgttgttgaaatgaccatattacccaaagcaatctacagattaaatgtaatccccataaaaataccatcaacattgttcacagaaatagaaaaaacaatcctaaaatttttacggaaccacaaaagaccctgagtagccaaagcaatcctgatcaaaaagaacaaagctgggggcatcacactacttgacttgaaaatatattacaaagctgtagtaaccaattcagcaaggtattggtataaaaacagacagaccactgggacagaatagagaactcagaaataaatccatgtatttacagccaactgtttcagtaaaggtgccaagagcatacactggtgaaaggacaatctctttaataaatgatgctgggaaagctggatgtccataagcagaagaatgaaactagacccctatttctcactttatgcaaaagtcagctcagaatggattaaagacttaaatgtaaggtctgaaactgtaaaactacttgaagaaaacataagacaagaagctacaagaaaacaagaaagcttaaggacattgatacaggcaaagattttatggttaagacctcgaaagcatggataacaaaaacaaacaatagacaaatgggaatatattaaactaaggagctactgcccaacaaagaaaacaatcagcagaatgaagagacaacctgtagattgggagaaaatatttgcaaactattcatccaacaagggactaatatctagaatgtacaaggaactcaactcaaagacaagaaaaccaaataatcctattaacaagttggcaaaggatctgaatagacatttctcaaaagaatacatacaaatggccaacaggtgtataaaaaaatgcccagccaaaagtgcagtggctcacacctgtaatcccagcactttgggaggctgaggagggcggatcacctgaggtgtaggagttcgagaccagcctacccaacatggcgaaaccccgtctctactaaaaatacaaaaaattagccaggcatggtggtgggcacctgtaatcccagctactcggaaggctgaggctggagaatcacttgaacctgggaggtggaggttgcagtgagccgagatcatgccactgcactccagcctgggcaacaagagggaaactccatctcaaaaacaaaacaaaacaaaaaaaaacctcagcatcactaatcatctgggaaatacaaatcaaaactataataagataccattctaccttgttagaatggctgttgtcaaaaagacaaaaaataagtgctggtgaggatagggagaaaagggaactcttatacatcgttgtgagaatgtaaattagtacagccattatggagaacagtatggagatttctcaaaaactgaaagtagaattgccatatgatccagcagttccactattaggtgtttatctaaaggaaggagaatcagcatatcaaagggatacttatacccccatatttattgcaacaccattcacaatagccaagatatggaatcaacctaagtatctatgagttgttaaatggataaagaaaattttataaatgtatatgtatatatacacaccatggaatactactcagctatcaaaaaagaatgaaactctatcatttgcagcaacacggatggaactgaaagccattattttaaatgatataagccagccacagaatgacagctgtcacgttctcacttatatgtgggagtaaaaacagttgactcatggaggtagagaatagaatgatagttaccaaagtctgagatgggcgaggggtggggtggatgaagagaggttaatgggtacaaacatacagttagaaggaataagttctaatttcattgcttagtggggtaactgtagttaacagcaatatattgcatatttcaaaatagttagaagatttcaagtgttaaccaacacaaatgataaatgtttgaggtgatggatatcctaaataccctgatttgatcattacgcattgtatgcaggtatcaaaatatcacgtgtacctcataaagatgtacaattatgaatatattaaaaattattacagtggcgctgaacagtttctacacctagtgatgtcatagacattatagtgtacatagtgtgcactactcagcatgtttgtggtgatattggtgtaaacctgtgctgccagtcttatgagagcttagcacatactattatgtatactacataatacttgattataagcaactacctgttactgctttatgtatttattatagttgttatcattattttagagtgtactccttcttattaaaaagagtttacggtaaaacagtcccagacaggtccctcaggaagtattccaaaagaaggcattgttaccacaggagatgacagctccatatgtggtatcaccccactttccagtggggaaagatggggacagtggaatacagtgatattgatgatcctgaccctgtgtaggcttaggctaatgtttaatgtttgttttttaatgcttaacaaaaagtaaaagaaaatttttttttttttttttggatagagaaaagtttgtagaataaggatataaagtaagtaggctgggcgtggtggctcacacctgtagtcgcagcagtttgggaggccaaggcaggtggatcactggagcccaggagtttgcaaccaacttgggcaacatgacaaaaccccgtctttacaaaaatacaaaaattagctggacatggtggcgcgcgcctatagtcccagctacttgggaggctgaggtgggaggatcacttgagcctggaaggttgaggctgcagtgagccaagatcatgccactgcactccagcctgggcaacagagtgtgaccctgtcttaaaaaaaaaagtaaatatatttgtacagctgtactgtacaatgtgtgttttgagtgaagtgttattacaaaagaatttttaaagtaaaagaaattaaaaagtttataatgtaaaaagttacattgtggtaaggttaacattattgaagatagaaatttttttccaaatttagtgtagcctaggtgttcagtgtttataaagtttgtattagtgtatagtaatgtgctaggcttttgtgttcactcaccactcattcactgactttcttggggcaacttctagtcctgcaagctccatttgtggtaagtgccccatacaggtgtactaatttaaaaaaatcttatatattgtatttttactgttccttttctatgtttagatactcaaaatcttaccattgtgttacaattgccttcaatattcagtatagtaacatgttgtacaggtttgtagctaggagctgtagcctataccatatagcctaggtgtgtagtaagctatacagtctaggtatgtgtaagtacactttatgatgttgcacaatgatgaaattgtctaatgacatatttctcagcatgaatccccatcattaagcgacacatgactgtatcttaaaggatgtttcatatcagtacattaggcttagtaatgtttcattgtatgagtgtatcataatttatacatttttatatgtagccccttgttaatggacatttgtttctaattttttttgtgatgacaaatagtgctgcattaataacctcatttgtatatcatttcacttataagtccctagaagtggaattattgggttaaagagtgttatggcgttataattttgatattcctgtatttttctccatagagagtcatcaccagtatgtgagagtaactgcttccctataccctttgcaacacactgtaaatttttttatttttggcagtctgacaagtgaaaaatcgttacccacttttgactacatgctttcactcacaggggagtttgctcttccagcctaatgaccaaagacaacatctaatttgtatttgtactgttaggctgttttaaccctgattttccaaaaaaaatgtacagttcttagaggtaatcaaatttttttttttaaactgttactatgttgctttagaaatatctaggtttttttgctgggtctgatttgaaagcagtgacctgataaatttctgttaaccttaccacagtgtaactttttacgtacagtattttacaaacctgatacagtatcaggtttgatactgataggtttgtcagtctttttaagtgcccattatgtagtacctgtatttgaaaacctgtataattttgaatacatattatatgctaggtattatatttagatcacagcaactctttaaagaagattgtctgtgttgaaggctcatagaggtcaaacgatttgccgtagtatattagaatgtagatgctggtagagtcattaaaagagaaaaatacacatttggagttgagataaactgaaattgttaaacttgtgcaataattaaaagtattaactgagttttgttttgttttgttttgtttttgagacagagtcttactctgttcaggttagagtgcagtggcacgatctctgctcactgcagcctctgcctcccaggttcaagcgattcttgtacttcaatctgcagagtagctgggactacaggtgtctaattagccagcctaatttttgtatttttagtagagatggggtttctccacgttggccaggctggtcttgaactcctggcttcaaacaatctacctgccttggcctcccaaagtgctgggattacaggtgtgtgccactgtgcctggtctaaagtactccctgagttttttacaacacaaattctcattagtttaggacttgagttaagagtattaagagcagagattccagtctcaccatttacttgttatttgatctttaaattacttaattctccatgagcttcagtttccttttctgtaaaagagggatagtattataatagtacctaaattacaaaattcataaagcaaccttacctttttaaagattgtgtttagcctgatcatgtcattgttgcagtggttttttagcctgtttcaaaaatagagagcaagaaatagtgctgacttccttctcttttctccagtaaaacaagacaaaacaaagtatcagtttgttaactcacaaaatattgccatcacattttaagaccatttgaaattttcatgaacacataaattttaatatgacatagaagtagacagataacataaaaccatttgtcacgttttataatctatttaaattaggatggattttttggatcatattcctttgggaaaggcaaaatatttaaacaatattcctattccccctcagtttggccctatttggaagtaacagtatatctctctttcctcaataaaagaacagtaacaaggacagcaaacttcctcataaaaaacaacaacaacaacaacaagcagagtaccccccccattgttaagttgttaaaataagtctttattttatatcttgaaagctcaagattagggtaaggatcaagttacagagctgttttttccccatgcaaagtggcctggttcatattaggaatgaaactagtgactgtaatgtaattaagcactgtgttgtatagcactgcttctcaagttttcctttggggattttgctaaaatgaagttccagatttttggtgaggtctgagattttgcatttttaaaaagctccccagtattacagtgctgcacaaaacacagttttgagtagcacgtttctgtagcactaacccatcttttactcttgagtaattatcttaaatcatatgcttattttcagacattcattcagcagatttctgctgaacgtctatgtccctgacactatgctaggtactggggttactagggatgctgggtagatagtctgctgtcaggcaagtggggaagccaaagaaataacaacaaagtatatgtaactggtgatgggaaagtccagggagctgataatcttaagcacaaaaattgctttttgacagatttatgaagacagtgaacctagtttatctgataccgtgacatctaggttcccaatagacgtagaatgggggatattcattggatatcagtctagaatggttgttggcaaactctttctgtaaataaaaggcagggtagtaaatattttaggctttgcgggccatacagtctctgctgattactcaagtctgcgaaccaggtaacatgtaaatgattgtgtgttccagaaagactttatttacaaaaccaggtggtagactggatttggcttgcaggctatagttctagattggcagcatatcactcttcacttataagatatgaaaatagtttaaaggaatgatttatttaaaaaaagaaggtaattacattgataacatcactgcatcactgattcatttgcatttgaatatgctatcttggaacattagttgtttatatacctaaggatacccctgagaatatattatacatgtgattgtcatttgtcttgtatatcattggaggaaaaaaaagggttaaggtctattgcttggaactttagttagaactcctaaagagctgcacaaatgcccatttttcccttctattatatgggggaaagaaaccatgatacatagaaggagttatagaatttgagtataggtatgcagtgaagcatatctgtaaattgctttttctggacaatattgaaaactgtgtaatccccagaccagaagaggacatccctggatactcaatcagttaccatcatttagggtaatgaatataatttgggctctggagtttaccttttggtttcatcacttaactcgtgtgaatttggcagagtagttaacctctttgccctcagtttcttcatgggataatgatactgcaacatacttttgaaaattataaaaaacacactatatttgatagcaactagtatagcactagaaaatagtgagccttctatagatgttacttttcttctcttctgacctgcctgcagtgcagtttactaatgtactgaaggaaactgaggaaaaaaatgttcctggcacataagaatcttaaaattgagcaatatactaatgtactgaaggaaattgaggaaaaaaatgttcctggcacataagaatcttaaaat

SEQ ID NO: 631 - DNA, 32744 bp, Homo sapiens
  source 1..32744: mol_type = other DNA
ggacgggtgtttgcgttcccagagttcctattgggttaacactggaggctctaagatggcggcagtggcaacctgcggtagtgttgccgcgagtactgggtctgcagtggcgacagccagcaagagcaacgtcaccagtttccagaggaggggtcctagagccagcgtgaccaacgacagcggccctcgactggtgtccattgcgggcacgcgaccgtcggtgcggaatggacagctgctggtatcaaccgggctcccagccctagaccagctcttaggtcggttcagagcggagatctgggctcagccgaggggaaacttagggaggggacctgtcggggaagccactttgaccccacatctctttctgacccctaaaccttcggaggaggagagaatagcctggtctgattgagatggaggggaatacgggttgtgtggagacttctgagcgctgttaactaaacatgttttagtgccctcgctctctatttcattccctgccctccaaccccttttcatattacggaggaattcgtacatgctttttaccctgaaatgctttctagtcaagggaagacattaatttatggagatggtttggctttcattcaggatacctcccttctgctttctccaggcagctcacggtttagaccagcctgcaaaagtttttataattgtgagagacagacttcattagaagatgctggaaaaaaatgatttcccctctttgaccgtcagactgcctgttctctggttctaaatcttaaaacattttggctttaagagagcgaatgttaaaggcttatgttgacacataatccttataaagtattttgagcctgtcgttgatatttagatagtgtctgcgttaaatctgtgtatatattttttattttttctatatacattttgcttcccagtattgattgctgctacattccatacgacatctttaaatttaactcacattttaacgagaaaagtctagttcttaggctttcctttaaaatctctggaattttttatgagaagcctgctgaagaatatgcttgtttcataactgttatattcaaaggaatgaccagattaagttggtaggacagatttgctgtgttaataaagcttctagattaatttctgaatgctgtttcattaaaaccccgtctgtgtttacataacttttttcatagtgtgtgatatgtgtctgttaaatcttgtacactttcataaaatataactcattgcttgttcttgtacttcgtttgacatttctttcggttattttcccctcaaagtaggcttttcataggtttagtgcagagaaagtaagaagaccagcaacctatgagaaagagtatggcttcttgattctctcatttcattttccggttatttctagataagtttaagtatttttcacttaattgtttcaaatatattttcctcctgagttgcatggtactgtaaatagaagtgattcaaaatatctagttagcaaatatatagtccaccgtttttcccttgtgagcctcagttgatatcctcttacatttgaactttaagtttggtagctatttctaggccttatatattttttaattcaatgggatatgtaacttcatttacttgatactaaaactttccaaacaaaaaggttatgtttctattataatgtcttcagttcctcattagaataacaaaatgttcctagtgtacctcctggcacttagtagattctcagtaagttgttgaatacaagaaaaataatgtgtagaaaaaaactgagacaagaaattatgaaacatgtagaatggagtttcatgtttgagctctaaaaacaaattaagtgatatgaacagtctcacaaaaccagtgaccatgtgtactgattgttaggcttcaaatttagtgctctttgcactaggctaccgctgtctgaaatttttacgtattctttccaggggttttgaccatttattgaacctcggattaatgatttaactatcgtctcttaaagtacccaccaaaaagagaacccaaagcaccttctatacgtgtttcttcagagatacaaacttgaacagtaatttttaaagtttccgtatttgcttggaatgggagactcgagtagggtatttaagtgtaacaagcttatgctaaaaattactgttcattaagatggtagaaacagtattggttgttgaatactttgaaatatattttgcatgtatgcagtgaattctcaaagtgcacaaaagttgaagaggttataatagaattgactacatcttgaaaaataaatatgtccagaagtattttagttttaacctcttaatgacatttttgtatctgattttctgtataagcagtttagactatgttattacttgaaaatgttatttgactcaagttgcgacaagcctaatatgactatattgtgacaaaaggtaatgataataggatgttatggtgttagaacggtaaaactatactgtaatattgtgattattgcctgaatatattatgtggttactgtgtaacaagtaaatattatagcttccgtgtagtacggtgacattttactactgccaccgtgacgtcattgtaattttaaacatggatgcaaaatatatttgaaaggcatcatacatgctaattgttagtcatttgatgatacactgataattccattacttattccaaagcatttcatgaatttgaaaattttcaatatctgcatttttcaaatgacctaatatataatgtttttgttctgacaacctaattgtattatgagatattgatatacatttcccaagttagctacattaaaattgtttaaattcccagattatctaacccatgttctcaaccttgcccttctgggatatttatattgttatttgaggacactgtatgtaaataacacttatattttggaaaaggaaagatagatattccatcgattgaagaggtactccatttctcttccaggggtttccaaagaaagattatagcaactaaagaattctggcagaaatgccccctgccctccgccccccctcccccgccccgcccacccaaccccattccctgtaaaaggtatatactccatcatagaaccatatatctaacctggaagaattaaccacaacttcatcctccagaaaaatgcttaaaggaagggtaactgcagatttgacctctgtgctgttaaattttgatagtgaagggaatgtcagatagggatttgaggtaaataatagtctaggaagagtaccctgaaagaagcttaatggtaacagccattttttaacattgatgtcaaaaagtaaacactagtgggcttatttcctttattatgttaatgtgtagcatgggataatatacattgagcttggactacatatttaacacaatcttggttatgatattttaccaaccaatataattagctgtatatttaagaaaaatgtattttttattgctatgtaaaattatttcatgtgacttaatctatagaactattcacagttcctagctttattttgattctcatgtttgtccagctaataattgtgtcataatgaagagtagtcactatgttttataatgcttggggaagaaaaagtagagttgttatcaaaataactgcaattaaatttgagatccagcattaattaagtagttaaggctattactatgaaccaaggaaagaatatgaacttgttttttacattgcattttcccagaaatacttttttgtaattttaagcaaaattattcctttatatagaggtctggaaaggactggcataaatcactgttatctttcttgactttcatttcttttcccttttactttctctaacattgaagaaaggctttcatattctagtgtattaatttgacctcatttacccaaaatgtatagcttagtcagaggtttctattggggagagtatggggattgaatgttgttcctttaaaatattaatagtactaatgtaattgtcttactactgcatgaattgaaataacaacaaaagccctttcgttgtcttatgattttgaaaatcgtggaagatactggcatttgcaagatcttaaattttctaatattatttcttaagtattaaatatcttttctggttttaagaaaaaatgcctatttttaaaatatgtgaaatcttgatgaaattaattgtctaaaatatcaagcttgctgagtatctttaacctttcaaacctttattttgattctcatgtttgcccagccaataattgtgtcataattattgaagagtagtcatgattctttaacctttcaacctcttgtattcttttgtgtacataaagtactctacttttatttttagtaagatggaaataagtatacatcttaaagacatctagaagtaaaaacaagagtttatttgctggccaggtgtggtagctcacacttataatcccagcactttgggaagccaagatgggtggattgcttgagcctgggagtttgagacaagcctgggcaacatagagagaccctggctcttcagaaaatacaaaaatcacccaagcttggtggtgcacacctgtagtcccagctactcaggaggctgatgggggagaagccctgagcctggggagttcaagtctgcagtgagcagtgatcacaccactatactccagcctgggtgacagtgagaccccatctcaaaaaaagaagaatttattttgcttagtgacttagaaagtgtgttggtaatttttctaagttaggatgaaaggggagaggaaatagtaaacaaggccgttttactactttcttgcctgttttcattataaaaataagatgattgtttgcttaccctattacttatctgtaatacattgtattgggaaaagatatttcagttttaattggtaactattagtgtgaggtctatgttgcttttggaattagataaaattactaatggattactaaatttaaaagtaaattaaaagccagccttcaaagaatatgtcaggatactctgttgtgattggttggttgttttagctttttatttatttattttttggttggagcatggctacaaacattcaaacttttaagttaaaatacagctagaccttccatttatcaagtaagagacatcaaaataccttatacaaaggtatcttgtggaaatgttttgagatcatgtctcactaaactcaagtttagaagaatagagaaattttgctgctgtatgcatgtgtgtgtgtgtgtgtgtgtgtgtgtgtgtgtatatatatatatatatatatatgtataggtccaaattattcctcttaaaacacatagagtaaaagcttgatttttaaaagctttagttaataagtttaaattagttaatgagttacatcttattccccacaactatccttcacagtgaccaaactttactacagccaatctaaatgtgaatctagtgaatttacatgatagaaccttcttacctttttgtaaaagaagtttgagaagatatttggtgataaaaatgattttaatatgtccccattatgtcttaatgttcaaattttctaaacattagaattttaatacacataagattttttaggttatgtggtcactcatgcctgtaatctcaacactttgggaggccaaggctggaggctagtttgagcccaggagttcaaaaccagcctgggcaatatagtgagaccccatctctacaaagaatcaaagaattaaaaaagaaaaagaattagccagtcatggttacatgttcctataatcccaactatttcagaggctgagatgggaggacccttgagcctgggaggttcgagctgcagtgaaccatgattgcaccactgcactccagtctgagcaacacagcgacaccctgtccccaccccccacaaaaaaaaggaattgccaaaatggtaaaggtagctctttctgagtacctttctgggccagatacctctacttggtaatcacttcatgtaattggaaaactgttatgtgatctgttctcattgtcccatagtgaatgttaaaaaatctttacttctggctgggcgcagtggctcacgcctgtaatcccagcacattgggaggccgaggcgggcggatcacgaggtcaggagattgagaccatcctggctaacacggtgaaaccccgtcgctactaaaaatacaaaaaaatttgccgggtgtagtgggaggtgcctgtagtcccagttacttgggaggcagaggcaggagaatggggggtgaaaccaggaggcggagcttgcagtgagctgagattgcaccactgcactccagcctggaggacatagcaagactcggtctcaaaaaataaaaaatctttgcttctctgtctgtcccagtggaggccttatataaattccttatttgaggagatgtaagtgtaactcaggaggttagataagaaacctaaatcctccctataggaaataggttaaagtaagaaactttttaatagtgcctgctctagcttagacaccataatgtctcttgtatgcttatatcaattcatctccttatatgtacagaaaaaggctattgggtaattaaatgtttatttctgcatttaagggaaagtaggaaagtaaggaagtgtgatataagatgttcaaatgaattataacattagtgtggcactatgaaattaaacatttagtctaatcttatcccaaagcaaaccctttgttctgatccatttgtttgtttgagactgggtctcacattgttaccctggctggagtgcagtggtgcgaacgctgctcactgcagccataacttcccatgctcaattgatcctccttccacagctccccaagtagctgggactacaggtggcagcacgccttgctaatttttgtattttttgtagagatggagttttgccattttgtccaggcttgtctcaaactcttgagctgaagtgatctgctcaccttggccttccaaaatgctgggattatagccgtgagccactgcacccggacctgatcctttttgatggctatcatgatgtacatttcagcttatgtttatcttttcatctgaagataaaagttatcctatgtagtctgttgcgactttaaatgctatatgaaggaacctgtctgaatgtgaacttaaaatataaagtcttgtaaatatataaacttaaacattaaaacatttaaatatactaggttttttcattatttccttccctaagagtttgaaatgttctacatattgtcatgaaattgatgtttagcctcactgtaaatcgcttagcacaagtctcatgttgcatattattctaggcgcatgtatgttaccagatttcaaactgtttaacacataatagttatgcttttttgcaaggcaaaaaataaacactatcaaaggaactttttttttttttgagacagagtcttgctatgtggcccaggttggagtgcagtggcatgatctcaactcactgcaacctatgactcctgggttcaagtgattctcctgcctcagctcccccgaatagctgggattacaggagcgggccaccacatctggctaacagggtttcaccttgttggccaggatggtctcgaacacctgagcttatgtgatctgcctgcctcggccttccaaagtgctgggattgcaggtgtgagccaccgtgcccaacctatcaaaggaacttttgttactaagtttttctgtatgacaaatgtgactacaaaacttttttgtggaaagttctttattagtgttctaaatatttctttcagatttgtatacaaaaaacaaacaattaacattgactccagttgtccaacaactttgagtaatttttttttttaatggagtctcactctgtcacctaggctggagtgcagtggcgcgatctcagctccctgcaacctccccctcctgggttcaagcaattctcctgcctcagcctcccaagtagctgggactacaggcggcagccaccgcgcccagctaattttttttgtatttttagtagagactggatttcactatgttggccaggctggtctcgagctcctgacctcatgatccacccgtattggcctcccaaagtgctgggattacagtcgtgagccaccgcacccggcccaactttgagtattttaaaaattatactttaaatacatttctactctttgatactcattttttaaaattttaagtgaatttgtgtttgagacattaatcaaaatggcaatagttttacaaatggagtgaagagcaaagtataagtactcaaatgtcttagtgtagtgctaatttctttaattcttttttttcttttttttttttttgagacagagtttcgctcttgttgcccaggctggagtgcaatggtgcaatctcggctcagtgcgacctccaccttcctggttcaagcgattctcctgcctcagcctcctgcgtagctgggattacaggcatgggccaccacgcccatccacttttgtatttttagtagagacggcgtttcactatgttggtcaggctggtctcgaactcctgacttcaggtgatccgcccgcctcagcctcccaaagtgctgggattacaggcgtgtgcaactgcacctagccataaaattaatttttaaattgatttttaatgattcaccatttgaattatatatttcacatatttcatgattatattaccatagttcagatttttttttttttttttttctgaaacagagtctcactctgttggccaggctggagtgcagtggtgcaatctcaactcacggcaatcttgccttccaggttcaaaaaattctcgtgtctcaggctgggcacggtggctcacacctgtaatctcaccactttgggaagtccaggcaggtgaatcacgaggtcaggagttcgagaccagccttggcaacatagtgaaaccccgtctctactaaaagtacaaaaaattagctgggtgtagtggtgggtgcctgtaatcccagctacttgggaggctgaggcaggagaatcacttgaacccgggaggcagaggttgcagtgagccgagattgtgccaatgcactctagcctgggtgacagagtgagactctgtctcaaaaaaaaaaaaaaaaaaaaattcccgtttctcagcctcctgagtagctgggattataggcatgcaccaccacatgcagattattttttttgtatttttagtacagacagggtttcaccatgttgtccaggctggttttgaactcctgacctcaagtgatccgcccacttcagcctcccaaagtgctaagattacaggcctgagccactgtgcccggcctaattcagatatttaaaagaacactagtctagtaataccgaaaatgtattttgtgatgatattctttttttgtttgaaatggcaaatacattccttttaaattgtaaatatatttagagcatgtccagactttgtgtatattattcataataaaaaagaattaactttaattatcagatctttactcagtcttactaaatttgaagataaatattaatgtggaatttctataataatctttgttgtacttctgtagtagttaagttactgtacacatttaagtcttgagtattgagttaatttattaacaagtgctaaatataacattattggagtccttaaccacagttaggttgaatgctgtgtggttctatcatagaagaaaggaggatagtacagtatattatggtagtaattttaggccgggcctggtggctcactggctcacgcctgtaatcccagcactttgggagcccaaggcaggtggatcacgtgaggtcaggagttcgagaccagcctgaccaacatggtaaaactccatctctgctaaaaatacaaaaattagccaggcgtggtagtgggcacctgtaatcccagctactcaggaggctgaggcaggagaattgcttgaacccaggatggggaggttgcagtgagctgagaggagattgtgccactgcactccagcgtgatcaacagagcaagactccatctcaaaaaaaaaaaaaaaagtaattgtaatgtgtagtatgtaattacatataatatgtaattatttcataatagcaccttgagcaaagtattgcaaaggtaattaaaatgttgttcacaactactgttttaaagttattgaagtgcctttccttcataaagcctaacttttatgctaaaggtaatggaaaaggtaaattaattttcttctggttttgtttcatttccaggtggaggtttagccgttggaacagttcttctaattggttagtacaaaatacatgctttgctctcctctatcattgttttctgttgtgcataatcattttatccaattcccattccaaaattatttaaatcactaacacgacagaagttaagataaattagagaggaattgacttaagttctattttaaattctaatgttgagctgaacttgaaataaattaggcaaatatatctgaacatgtagctcttataacttaaaaatgttcatagttcattgtgctccatttttttaaaaagactaaaattaatgtgaattgatttttttggagaacctcagtatttaaagtgggattattacagggatcaatttgggaaattgaaataccaagtccatcgtatatatcatatcattttatcattatctttttattgaaacaaaagtaacaaagtagtaaatcatattttagttcatctttaaagtggcaagagtcctaatttaagtatataaccataattgccttccttcttttttagtatatataggtcacagaatcttggaattgaaataaaccttgtcagttatataatcaaagcagccatattaatatttaattcatgtatctgtaacatatctattgttcctacttttgtcctctgatataatataaatttacgtagtttttcacgtgacacccttaaaatatttgaaaatacctattttttcatctcaaatattctccaaactaaatggacatcattccttaacctggttttatatgttagggttttcacacacctcactgttctgattattctttttatgcaccttctagtctggcattcattttctcctgaatcatgccccgacctaaatacagtattccaaatgtaatatgacctgaaatcaccatactgggactataaaataaatatgttaatctagacagagttattagtaccaggcaccaaaaaggttagtttctatttattgacccctaaggtaacaaaaaaagtattttggaagaattttccccaagagtgagtaaaatacaaagtggtgatgcttaaaatttggcatgtacgtaagaatttgtctagtaaaggaaaacgttatatagaacattttattcctcatctatgctggataattaaagagtaataatattagtagtgagagctgccttttatttaactcttactgttggtcatacattatgcaaagtgcattatgttttttttttttagcttaatacaacaacctcagaagatactaaatatacttcatgttatctcccttttatacatgaggaaatgaggctcacaaggatggggtagttttcccactattccatagttaatctgataaccaggacttgaattctgtgtgattccaaaacccattttttttgtaactatgctctaaagttttctcacatgttttgtttaatagcaataaacagtaaaataggaattacatccctttttagattattgcagtttcaagtagtaaagtaaaactcacatttatggagattttttcttttaatggattttcaaatttctcaacatgaaggaatccttgataaattcatgcacaataaggatcaaagttgcagcactgtaaaaatccttatttcacatgatcagcatttctccattccagtcaaaaagttttgtctttaaaatataaatcaatatacagggagtggttaaaaacatcttcagttgtacagtatttgttagatcagtttatatagttgtagcatattgctattaaaaatgtaatatattagtttacttaaattatgccatttaatcattttggtcctgtgttctctcaactcagccattgatttccctgttggctcttggctgtgaagtacctgccaacttcttaccagtcatttacttacatcaatacaatataatcttctggaaatttgcctagagtttagtgcctgagtatccagatagtagacaatttttaataaaagctaagtaaaatatgtcttatgagatacttatgtcacccatgagtcattaaagtactgtttaagacagaattattcctaacattacatgtaagagagaaaaataacctgtgatcaagaaattctagaaatgattatctcagttacatttttaagactatatcttatggtaaataaagaatgtctgaaggtgtctattgagaaaattatttacatgtttggtataaatacataaaatacaaaacggtgtgtaaagaaaattaggttgctttttcggatcctcagcctccgttccttgaaattatagtgtcctgggtattccacccaaatattgccatgtaagtaatatacatgggaacatttcacaccttgctttatctatttaatacatcttagacctcaatttatgtacatttatatagatgtactacttcatttttgttaacaactgcataggatttgattatatagatgtgccataatttattgtaatagttctctactgaaaaatttaaattaattccatctttttctattactaacaatgctattgtgcataatcttgtgtataacctttgcacacatatgtaaatattctagaataaactgtaagatatagacttgcttcattgcagcatgttaaattttgtagctattattagattgctctcccaaaaggttatactgtcatatgcttcagccaacaattatatcagttcaccctaatctcacccttgacaacacttgtatgttatcaaacattttaatatttaccagtccaattagattagattagcagatgaagttctccactttttttttttttttttaagagatgagtcttgctctgtttcccaaggtggactgcaacagcatgatcgtagctcactgcagcctccaactcctgggcttaagtagtcctcccttctcagtctcctgagtagctgggacagcactcacaccaccatgccctgctaattttttatttattaatttttttttttttggtagagatagggccttgttatactgcccaggctgttcttaaacttcaggcctcaagcagtcctcctgcctcagcccgcagagtgctgggatgattggtgtgagccactgcatctggccccagttctctacttttcttcattcccaagtctatgtgacttgtacaatgaattaaatccacttgaagatatggaagcatagtttcaaaatataaaaatacaaggattttagttcagtgtttaggagcctatggtattactatattgctcatcactgaaaaactttaaattccagaagtaagagaaaattaaaacatgaagattatttacattaataacattttactatagatttccaactttttaaccattttctcgtgaaatagtttattcatttaccaaggcagttttatgtagaagcatacctgtgcatgagtgtgggctttcagagtactgtatttacagcttcagtagcaatttaactatggaaactagagctaatgagcactgccagaaaaacctaaaataagtccactctagaccttctgaatatagcaaaataaatacatgtgaacagatgaaaggaaattctctgaggaataaattgaagaactaagggaccccactgtgtactttaaaaatttaagatggttgtcaattaataaaatcaaaaattgattttaaaatcaaaggtaaaatttgattttaaaatcaaagatagatttttcttaaaatgtttaatgcttaagtactggaataggctttgagatgttttatctatattactttctgacagtctgttacattggtaaatttggaacaccttaaaagtttcaaaagttaattgatagcataaatatttagagtttacacagtctctttaaataaaggatctttatttgtaaagatactgagcatcaaaaaggtttaatagaagttgtcacctattaaaataataggtgacatttatcaatgtgtttttttaaaataatcttttacattaattatgtaattttagttctagatatgggagataaatgatacacttttggataattaaacctattatcagtgtacttttatattacttttttctgtgtaacaatattaacacaaattttacagtttataaacaacatagatttatttatctcatagtttctgtaggtcaggaatctaagcacactcccacggagtcctcagcaagcctacaatataggtgtcagccagggctgagttctcatctgaaggcttgacaagggaactatctgctttcaagctcgtggttgtttacaacattcagctccttgctgattggcagccagaggctgccctctccatagggcatctcacaagatggtgtcttattccttcaaaaccaagaagagagaatgtccctcagcaaaatgttataggttttcataacagaaatgacatcccatcatctttgccataatctcttggttagaagcaagttccacattctgctgcaatcaaggggaagagatacacaaaggcatgaataccaggagacaggaatcatagggaccaccttagaatgtgttcaccacacttttcataattttaaatcatattatttcctgtaatagcaaaaactaagcactcttaatagtcctcacagaatattatagtatttcttgtcagtcatcttcaacctttctgaatttgctaagctatattattcttctacatcatgcaataaattctgagctaaccagcctgggcaacatggcaaaaccctgtttctacaaaaaaatacaaaaattaactgggtgtggtggcatgtacctgtagtcccagctactcaggaggctgaggtgggaggagtgattgagcaaaggaggttaaagctgcagtgatcatgccactggactccagcctgggtgatagagcgaaaccctgtctcaaaaagaaattaaaaattctgagcttttttctatgcaggaattggcctgctagctggtcacctatttttgtaaataaaattttattagaatacagccgtgcttattcatgtgcacattgtctacagcttcttttgtgccacaagtacagtgttgattagttgtaacagaaactgtatgaatcacaaggcctaaaatacttgctttctgattccttaagaaaaattttgccaatcgctgttttgtgttactatatttgatattctactaaacttactttagagtagtagaactttgttaaaggactgaaataggacaactgatatcagtgcagtcctttagtagaaccacctgatctttagtcctgaagcatttaagctcttacaatgtgttcagcactgttaggcaagataaatctctggatattggttgcatatggaataaccatgaacagtacatatataacatgccgatataaggagtatgaaaaagacttaaattgaatcaaagtatgggtagaaaggagtgatgaagaaaaaaaattgctcatatggaaaacaatcagtacacaatagaggatatcaacagagtatgcctatgtaataactaggtccttctaaagtagagagagtacatatttaggactagtgagaaggtaagtttggccttcttcccctggatctcttgcttcaactacctacttggagaattcacactgtaaggcttaaggacccttataccagtccccagaacaatagtgtgtaaagactaggctgtatacctgtaatccactcctaggatttttgtttgtttaactttatggccagccaaatctatcatgctttacctcctcgttatctttggtcattatctaaaaccaaattaagaccaaatctaattaagctgttccaatggtctggtcttttatctctataatactccgtatttttctctttaaactcagtttcctatttccttctcttccagacctttccagtttgccctctataacacctatttcatgtaaaataaactctgatatcctaaaatcttatccttaaatattttattgaaacatttaacatttattgaggatgtactgtgtgctgggcatcatgctaagccattgacatgtattgtatcatgtaatttcacaacaatgagaggaagtgtctttattttataggtaatgaaattgaagctttgagagaagctaagtaacttgcccaagatcacatatatggtagctgagattcacaatcaaatttctcattttatactaaaacatgataacttatcttaaaaatcccttatggggctgttccaccttctatatcgtctcattgctgccatatattgacttcttagttatttttattatttattggagactatcctgatctctaacgtcaagtaggctttcaacactggccagaaaacttttgtataaatctagtcacctcttttttattttcagtaatctcagtggccttttaaaccttcaaacatctaacatagtatactgctatgaagacatcaaacaagatgtcttcaaacatctaacgtagtatactactttatcctaatcctctgaaataacttacagttatgtcacacagaaaaaaaatacagttttatcagaggagaattcacccaagttcctaaaatcaatcctcaaaacttacctctattcacaaatgcagagatatactgtgccttctcctatttgagaatcatctttcatctgtactttaaatttcatctcattctaactttccaaggacctagcaatatcaatttcccttctctccttatctttaatctcttccactatattagttattttcaatgtgtactttaaccatactcaaatctatttttaagctttatttaaaaacaaggggaaaaaaatcttccctcttaaccctatccctttctccactattgctttttctcttccctttcatagtcaagccttttgtatagtctgtacttacatgttttataatatttcagtcattcatcaatctacctcaaatactaccatttcactgaaaccaccttaatgactttctcactgctaaacctagaggatacttgtcagccctcttcctttttaatgtctgttgcacttgatgttgttaatcactcttttcttgaagtactcccttcctttcttcttttgtaacattctgttctgattttccctctcattctgcttatgtttttaaagattcctttggctttatttcaaatgatggtatcctattccctcttctagtgctacatattctcctgaaaggtctcagtccctgccataactagaatgaacagggaataaaaataatcagtaatctccagacatcgctacatatataggatacatagagaaatgcagagagcatatttaaccccctattcaacatttcctcctaaatatcttatagacatctaaaatcaatgtgtttgaagctttccctacttccaaattctgctccattcttctatatctgtttctcttcctatggactctggattattgaatctaacaggtgacacatgccagagacctgagtgatacgcttgtctctcatacatccagaaaacattaaatcctaatgacttttatcctttaaatattgtgttaattttgtctgttcttcatctttgctgccactaccccaattcaggccataatcaataacctcactgaaactggcataacaggtatttcccttgcctcagttcattatcataatgttgccagaatgcactttctaatatgagaagctaatcatagtatatcttggcttaagacctttctgtgctccttgttgatcttaacataagatctaagctccttaacttctgactataaggcctttaacaatctgccactgctgattcactttagccttctctcttctcatcctctcactattcttcctcatactttgtgtttatcattctgagcttttaattccattctctcctgtctctagacctttgcttatgttctttcttgctgccttttattttcctcttgtttttgaagtccccagttagacatctcttccagaaagttttccttaactactgctttccttccctttacctacactcagtattccttctgtatacttctgtagtagtctttatttaccttatcatggcacttactacacattttttacatcaggtaatcatgaaattgcctgatcgtgattacttatttaatagactgtaaactctataaccatgggagccatgtaggagcataatgaataaatgagtgatttgaaagcctgggtaaaggcaattaaattatattggtaagaaatagatagtcatggagtgttttgagcaattaagaaatattatgatggatacactgcagaaataaagtaaaatttgaagtaatggaaactcctcattgccctaatctaaacatgaggtgatgtttgttactatacttttaagacttttgtcataaatttgctattttacttttctacttctgtatttcagtatgtatattagattctaaatgtttaacgggttatgcttagactgctctgatatgaaacaccatttttctacatatttcctcatttaataggtacctcttaagaaagccaatttctatttctgtgctatatacatgtgtaggtgatgaaggagagacagaaagtaggatgattcccagatttttatcctgggaaagtttagaattagtaccattaagtgaagttagaaaaggaaaagaatgagcaaatattgaggtgaggtaaataattcagtttaaacataatgacttttaggtactagtgaaaaacccaaggcattcaacctaatagaaagttggattttctggcatgaaatttaggctagagaaaaagatttaggatttttcaacattatttaactgttttattcagtgtgtgttttagtgttgtcatagacaaatggcagattgcccaggtttatacttgtggatccggaatggaactttgggagatctcttaactccctgaaattacatgaaaatttgtgtttggctatgtgtatatatatatatatatttgcagtgagtcaatatgccactgcactccagcctgcgtgagagtgagactccgtctgaaaaaaaaaaaaaaagttattatgaggattaaataaaccaatgcatgagaagtgcagtgcagtgtttagtatagagttagtgctcaataatattagctatttgctgttttttaaccacatgttgagtaccctagaattggtgagttctcacatacccacagtgagaaaaagaagacaaggtcttaagttttccctttcccacaattggggtcagccacctcctggcaggcccaaagaactagcacagatacttcctcatatctccaccaccgtcactgctgttaccaggcaataaagtcaaggactggagaaagcaggagtacaacatttatggtaaaaagtgaggcaagtgaggggatacaactccaagggcatcagtcgtagacattgaagttgctttcaagaagcagaacttgacattcctgtttcccagccaattccctgctaacctctagaacctgcaagcccatcaaattaaatagtgcaggaagagagttattgggaaagcctgctttatatctgctggattttgtcaacattctcaaacattaagactattacctgtttctcatataggaaaaggaggggggcctgctagaatagattgtgtaaacaaacacagctagaagaataatgacagtaatagtatttccaaagagagactgaggatgaattagtggccccaaaaacactagattctacctctttgaggggttcttcagtgacatatagggccagaatgaagtaaggtaccacccacaaaccacacttaacatctgcatggaaaccacctaattttagagggtataagcagcagacttaatacaacaggtcagagtgaggctagggacatctctctacctgtgccagacaggcaattacagaaactgatctctgccactcttctttttcttactttcccagtataggagctaggacttgaagaaaagacttgtaggaagaggtatcttagaacttccttttctcactgctgccccctccacttaacaccgccttactaagtatttcaagtcacaagccttagtggaaaatgttgtaattgactattgactaagtttttaactggacagttccaagttttaataactgaaactagtgagaatcatggaagcagctccggatatcattaaaagatgagaaaaggaagatttggcttgcatagctgaaagtagtgactagcaaaaagtacataaaatcatttcatatgtacgtaacaaaaacttgagagctctatataaactgtttacgtacacaaagaatggctaaagaaacaggagaaaagttataaaaactgggaaaaggtggggagggagtgtacagtagtttcatgaagaaagttgtcaatggtaatagttcccataaataaataaggtaaggatttacaaatatccaacaaattagacaattataaaataattggtgttggagagcagtcttggtggagtgatgatacagctcatttggatttttgtattaagaaaaaaatgatattcctgttgtttctatccactaggctttgttccaccccttggagccataatgtacaaatgaaattccatttccgttttatagtccaacagatatttgaagacagctatcttatgtctctcgggtctctttctttaagctaaatatttccatttctcattgtcacatactttcagctcccttcaccatcactgtttttgaagatgctttagtttgtgtaagtccccaaactgaatatattatcatcaggttggttgactactgtggaatagaacaggacaagcatctttctgaacctagaaattagactgttaattcagaccaaaattacatttgctttttggcagttctgtcacatcattatcatttttacttgcccagtgttatggggattcactaaatagattaattaaatgcttattgtacaacctcaaaatttgtttcacaaaattggtaattttcagcttgatgagtttagtgtttttgctaatccctaagtaggtgatctccctattagtttttcctgcctcatatgattctttgaaaaaacagaagtgataactattatagaatatatgtgtatatgtgtataaaatggtgtgttttcaaactatagtagatgtggatgatttataagacaagatcgatttttgtttgttgttttttcctctaattaattctacaaatattaagtatatgtatactatgtgccgggcactagagatacaataataggatgcattctctgccataataatcttttagcttcatggaggaatttcaggaatgtttattaaatactactaggggttaagagggtgctccagagcacactgatatcttacccagccttgagtaaagcttcttaataatggtgccacctaatcttggtctggaaggaggtgagcaaattagttagccagagttgtgaaggaatttatacaagggtcctgaggcaaggagcaatatgggtggtgctaacaagtagtttgctatccctggaatttatgaaatatggaagggggaatgtattgggaaagaaggcaatacaacatttaaagaggcttatatggcttgctttttgggtgtttttcgactgagagcaatgaaaagccatttaagtttttgaaacgggagtgacaagattagatttgctctttagaaaaatatactcttgagtaatgtggagaatagattggagggaggagtaaggttagagatacagggaccaattgggaggctgatagtgagaggtaaggatgaattgaactacattattgtcagtaaagatggaaggaagtggatggattttaaagatttaggaagttaaagccgtgattatttgtggggataaaaaggaaagggaagagctgagaatgaaaaccatagtagctaacatttattgaccacttaactacgcacaaggcactgatttaagtatttaaatcttgccacagtcttatgaggtaggtataattttattattcctatatcatagttgaagaaacctcaagcccaaaggaaatggttaccaaataacttaacgaattagcatgttaccaccagaagatgggcagcaaggaagaggaaaaaatacagtttcccatttggacatgtcatgaaattctgttggcacattgaagtaaagataagataacataaaacatgtttgctaagtactatgtctagttaacaatatgcaaataaatagcatgatgtcaatgcctggagcttagcacggagaaagctgagctagagataaagaaaagatcactaaggatagtatggggagcaagaaaaaagtcagaaccctcactcatttaagagataggtagaaaaagacaactgtgacatctagtttgtttattatccttcattactcataaatcactcagtttttttaattatctacgagtacatatccctactttaagtagtactgatctgatatagttcattctcttagttgagtattgtaatatgcatccgtaactttatgaaagttttaattcttctaattaaatagtttaggtttctttctctcattactaaaaagttgttaaacaacagtcatgtatattttatttttattttttaatttttatgttctcagggtgtacaagtacagatttcttttttttgttggttttttttttttttttttgaaatggagttttgctctcgttgcccaggctggagtgcaatggtgtgatctcggctcattgtaacctctgccttccggatttaagcaattctcctgcctcagcctcccaagtagctgagattacaggcgtgcaccaccacgcctggctaattttgtatttttttagtagagacagggtttcatcatgttggtggtcaggatggtctcaaactcctgatctcaggtgatccacccgccttggcctcccaaagtgctgggattacaggcatgagccactgtgcccggccacaagtacagattttttacatgcatatattgcacagtggtgaagtctggcttcttcatgttatcacccaaatggtgagcattgtacccaataggtagtttttaaacctttacccccttaccactcttccaccttttgtagtctccactgtctgttattccactctgtatgtccatgtagctgttgtcatttataagtaaaaacgtgtggtatttggttttctgtttctgagttatttcatttaggataatggcctccagtttcatccgtgttgctgcaaaagccatctcattctttttttttttttttttttttttttttgtgacagagtctcgctctttcgcccaggccagactgcagtggcgctatctcggctcactgcaagctccgcctcccgagttaacgccattctcctgcctcagcctgccaagtagctgggactacatgcgccggccatcaagcccggctaattttttttttctttttgtattttttagtagagacggggtttcaccgtgttagccaggatggtctcgatctcctgacctcgtgatccgcccgccttggcctcccaaagtgctgggattacaggcatgagccaccgcgcccggcctgaaaagttttaagtagggaaatgagatcatcaggtttgcattttgaaaatgttactactaaattgaaggaggaggattagggtgaatgcaaagaaataagagacagttacagtcatttaggtaagagttttttttgtttttgttttgttttgttttgttttgtttgagacggagtctcactctgtcgcccaggctggagtgcagtggagcgatctcggctcactgcaagctcctcctcccgggttcacgccattctcctggcacagcctcccgagtagctgggactacaggctcccgccaccacgcccagctaatgtttttgtattttttactagagacgggtttcaccatgttagccaggatggtctcgatctcctgacctcgtgatccgcccgcctcggcctcccaaagtgctgagattacaggcgtgagccacggtacccggccagttaagagttgttagtagtatgactcgtggaatgacattagcatggaggaagtaatcaaatcccacaaatactttgatactttgctaatacgtttcactggattataaggatggggagagaggtggattggtgtgtgtgtgtgtgtgtgtgtgtgtatgagagcgagagagagagaaagaggagatattggggataaattctggctttctgaaaactgaaagagggccacatttggtgcaagaaaatgagttactgggtttcatcttgggcatgttggacctgaagcatccttattcttctatatttagtaccaataaaaccctaaaagctgcatgaaaagtccatggtaagggggtatagctatgtaatgtatgtatggttcataagttttctagaatattattcagccttaaacatgttagctacaagactataaagcatgttagattaagtgaaaaaagtaggataccaaatccagtaatcactgaaaacatagaaaaagtactgaaaggaaatagagcaaactttaagcaaggattatttgaggactgtgggtgaattttttaaaatttaaattttccattttgtaaaaatatcaatcttagaaattaaaaattttaatgtcaggtttgtttcttatatcgatttataatgaccatggtttaaatgtttgcttctctaaactgacttaatagtaattacttcaggtaaaatcaattattttttaaacatgactttctagttagttccaaagttgagtgaaggtgaattcttagttatacaaagtaagcaatttttccagtgttacagctgtattaatcagtagtcagtgctgatcatctctcccatagttgtctctgctagcttttccatctgtcagctgtaagcaatgcagaagcattgaaaacattttcctttgccgtaacacactaaaattctcataaaatgtccctaaatcattaagtacattttgtgagtgacaaataatgttaaagaactagctatgtgttttaatatataaaattagactttgtgtaaattgaccatacttttaatcatggattttctctaagataatgtgctaagaaggtatctaaacaactcaccacctgatattttggtcatactttagggaattgttttaataaataaatgttattgaattttaatttatatacaataaaatgcacccatttgtttatttattttattgaattatttttgagccaggttctcgttctgttccccaggctggagcgcagtggtacaatcatggctcactgcatcctggagctcttggggccaagggatcctcccacctcagcctcccaagtagctaggactaccagtgcacaccaccacacccagctaattttttattattttttgtagagctgaggtatcactgtattgctcaggcttgtctcaaactcctcgcctcaaagtgaccctgccatcttggcctcccaaagcatgaggattacagaagcgagtgactgtgccaagcacatttacttattttagtgactttttacgactgtatatactcatgcagccaccaccacaatcaagatataaaacacttctgtcaccataaagtgtttcctggtgctcagtttcctggccccaagcacctaacctctcctttctgtcattagagattaattttgctttctatagaatatcgtgtaactgcagttttgccatatgtgctttttttgtatctggcttttttccacttagcataatgttttttgagatttacccatgttgttgcatgtatagtcaggcctctgtattagcatgtaccacatccttggatacagagggcaaaatgtaaggtactaagcatccttggattttggtattcatggagtatcctagatatccaatcctggatgtccttggtacccagtcccctgtggataccaagaaactactgcaaattagtagtttatttctttttattgctgagtagtaatccatttaggaatatatcatttgttttctcccttcagcaagtagttgatggacattttatttgttttcagtttttggctattaaaaaaaaaagctgtcataaaccttctgtataaatctatgcagacatatattttcaactctcatgggtaagtacccaagagtagaattcctggatcgtataataagtgtttgtttaacttttttggaaactgccaaactgtttttgttttgttttgttctgatttgtttgagacggcgtcttgctctgtcacccaggctggagtgcagtggcgtaatctcggctcactgcaacctccacttcccaggttcaagcaattctcctgcctcagcctcctgagtagctgggattatacgcatgtgcaagcattcccaggtaatttttgtgtttttagtaaaggcgggatttcgctatgttggccaggctagtctccaactcctgacctcaagcaatccacttgcctcggcctctcaaagcatggggattacagacatgagccaccgcatctggtctgccaaactgttttctaatgtagttatagtgttttgcattgcaactaacaatgttggagcattttatttgctccacatacttgtcagttgaacatcttttaatatgttttttggccattcatgtatctttttttgtaaagcatgtgttcacatcttttgctcatttttatgttgcccagtttgtgttcttactgcattatgaaagttgctaaaatatattctggataccagtcctctactatgtatatgtattgcaaatatcttctatctgtagtttgcctgttttaaatcttcctattagctgtcttttcaaaggtaaattgtaaacatttttatgaagtttaatttattcatttttttctccagttcatgctttcatgtcctaagaaacatttgcctactccaaggttgcaaagaaggcattttcttctaatagttttaattatttcagcttttttgtttaactctgtgatccatttcaagctaatatttagtactagtacaagaggtaagatggaggtttttgctgttttttgattgagtgtactatgaggcaagattgaagtttttatcgctttttgttgtttaaatatggatattcagttattgcaggaccatttgttacaaaaaaaattatttctccacctttgtcaaaaaccgattgtatggatttatttctggactctattcttttccactgatatatatttctgtccttttgctaattccacattaccttgattgctgtagcttatagtaagtcttgaaataaaatgataagttttccaactgtgttctttgttcagatttctttgactgttgtattagtcccttctcgcactgctctaaagaaataattgagactgggtaatttgtaaagaaaataggtttaattggctcatggttctgcaggccatacaggaagcatggctaggttagaaaacttaaaagtcatggccaaaggcaaaggggaggcaggcacatctcacatggcaggagcaggaggaagagaaagagtggggaggtgctacacacttttaaacaaccagatctcatgataactcactatcatgagaacggcaccaaaggggaaatccaccaccatgaaccaatcacctcccaccaggcccacctccaacaccggggactacaatttgacatgagatttgggcagggacacagacccaaaccatatcacctgtattctatgaccttggatttctttgtaaattttagaattaccttgtcagtttctccaaaaagcttactggaatttttattgggattccattaaatctacagatcagtttgaagatttgagtcttctatcccatgaacatgatatatctctccatttatttaggtcttctatactctcagaatgttttgtacttttcactgtagaactaattcatacacatatttcgttaaatttatccaaaatatttaattgcaggtgggatttctaaaatttcagttcctatttttgttactattatgtagaagtacaatcaatatattagtgtagtataattagtatagtattagtatagtataattctttaaatacttaaagccaaatccagtaatatgatatatattactatataaaatatattaatgcaatataattatagaattacaattctatatattacagtaatgacaatataattataattactctattatattgcattactatataatagttatataactacaatataattatattgtattatgtattatatacttatatgattataatatatataattattataattttgttttaaatgccataaaaccaaagccagtaacattacacagctaagaccttccatacgatattgattagaagtgatgaaagtgaatatacctccatttttcccgatctcagaagaaaagcattgcatcttatcatgtatgatgatacctataggttttttgtagatcccatgtgtcaagttgaagatgtaatattactggatttggttttacagtatttaaaaccaaattatattaattatatctaatataaatgtatattctattaccatatttggttttatgatatttaaagaattattttcatatattttcacgaggcatagtctgtagctttctgtttctgttgtatcttgttctattttggtattggggtaacactggcctcataaaatgagtttagaagtgtttcatcctttcctcttttctgaaaagagtacatgtgggattggtattatgacctcctaaaatttgataatgatgtgtagttttgtaaaactctttgattttgatgttagagtaatgatgggcctataaagtgggaattgtttccttttcctttttgctgagtttaagtattggtattattttttccttcaaatatttaaatttactagtgaagttccctatacctgaagtgtgtatgtatgtgcagggggtaattttgtggatatcaaagtgatgtagtagttggagaatgatgtctggaaccagaaagtctattaaaagtacctagttctggccgggcgcggtggcttacgcctgtaatcccagcactttgagaggccaaggcgggcagatcacgaggtcaggagatcgagaccatcctggctaacacagtgaaaccctgtgtctactaaaaatacagaaaaattagccgggcctggtggcaggcgcctgctactcgggaggctgaggcaggagaatggcgtgaacccaggcagagcttgcagtgagccgagattgcgccactgcacctccagcctgggcgacagaacgagactccgtctcaaaaaaaaagtgcctagttctcattgactctctttacaagtctcttagcctatctatctatgcctcaggaatacgcagtttttgttccacctcatatacttgttttaaggaaaaaaaatataaaaacatatgagtgtgcttgctgtttgatagccatttgattcttttcttgctatatgtttctaactgcaacttttcctttttacagaggaggataaatataatatttactcacctttgctcttcaagtatttcctggcagaaggaattgtcaatgggcatactttgttggttgcatctgctaaagaggatcctgccaacattttacaggtatagaatatatgaacttaatattgcattttgaatgtttcatgaaaaaatattgtttatatatgtaaacaagatatatgtttgtatatatacaaactatatttaaatgcattaacggaaccatacattttttaaaatctcagtaaaaagtatcaaatttatttgaacataggattacattttaaactaatgtttttgaacaaattttttaaagttcatatgagagttggggaaatattaagctactaaaaactgacactaaataaaattactagaccaggcattcacaaaagtcatgcttaatagcaaaaaattctagtttacacttcttattgaagaaaggggaaaaacatcctttaattttttgcttctaattataacatcttcattttgactactatggcaaagcaaattttccaaagtctaagcttttctatactactaacaaagtatcacttaactgttactcttaagaagtccttaaaagaaacttgaaatttgaattttcagcctgaaactgttagataaagtatatgagttacagcaaataatggaataaaaacaaaagggacatctatataatcagcaaattggctgataagaattttaaatattttacatttctacttagcacaagcaaaaataaactgattccaaggcactacagtatttgccatttttactgcaagctttaggcaattttttttcttttaattttgaagagatgaggtctcactatgttgccagactggtcttgaattcctggtctcaagggattctcccacctgggcctcccaaagttctgggattacaggcatcagccaccgcatccagcctactgcaagctttaatcataatttcattctaaatgtatctaaggaaattaaaatgttcatacatataaaaattattatatctgataggtaatattctacacagtcatgataataagagaattctggaaaacattagataaagaaaacaactgtagattgtttggtaattatattaccagtatgccagaggtataaatcagaagaatcagaaattagaagtactcattgattaatattagttttcttggagaatgccacaaatgattctcttctatgataaaatatgtcattgatgtactgaatctttaagccaaagcacactttttccctcagagaggacacttttaacttttagaattcttagtttctttgtccataacagaatcctaatttaagacattatttgaatagagttcataatctaaagtcatttttccataggatattttaattttagtacatagtttgcaaaatggcaaattagtcatttataaggaatttgtaacataataaatactaattcataatacctgtgaacaaatgccaacaaacttctttgccttagtataaaagtcactataatgctgaggtcaaaactaaaataattcgttcatatgattcagactttgcttgttaaataatattgttatgaaatccaaagcagaaacctgtatttgattgattttcctctggttgtagggcttatttttttctcaatctcttttgtagttgtttactttttacaatatttcttggtgttttcttttgctctgttttctggcttttatcatcttggccaacttctggacagtgctacacttgctaggagcagtggagtaaaggccaaaaccattgttgtaagtaagctacacaggttcttcatgacatattccacaatataccgagactaagattttatatcaaacatctatatagccatcataggaaaattttgccagccagaagcagaaatgcctgtatatgcttttgaaaataaagttttttatttttattttttcctctttcaacccaggtagctgatgttaaaaatttgcacagtttgctttagagaacacattaatttcaaaactaatccctgacatctttcttaggggtgccttgaatttgtacaagtaagtattaaaaatcttagtgtactttacatatccttctttagattatgtgaaggagtttgaagctataaaagaaatattacctttttcatcaagcttttataaaatagccagtcatttatgcaagtaattgggtgttgcaaagacttagtcatacaataattttatgatgtaggagagtaaaatataaaatataaaactacagttaaaagcaaaacagactcttaaaaaatacaccgtgtctgaccaagctgcacatgtctgaccaagatagattaacaaggtccagatttctcctcatgcctgaaatagctaaaaaacaaaaaacaaacataaaaagcagcacagggtataggaaacaacagttttcgaaacacttggcatcagataataaaagtgatacctgagatatacaaaacaaagaaggcaaaccctgtcatttccctaccttactgagtacagtgtttccaagccacagtgcaaagaagagaaatacaagataaggtgaccttcaggagacacagctaggatcacaaggaggtcaaggaaattctatttataaatcagagtacctgaaagggaagaggtatgcatcgagtgagttagagatctgcatagggtcggtctccctctagtcttcagatgagtgctcacctgtacttgtacacgaggagatggcctgaggctagagaaagaactacctgacaatattagaagtaac

SEQ ID NO: 632 - DNA, 13729 bp, Homo sapiens
  source 1..13729: mol_type = other DNA
tcacttcccttcccgcgatggcggcacagggagctgctgcggcggttgcggcggggacttcaggggtcgcgggggagggcgagcccgggcccggggagaatgcggccgctgaggggaccgccccatccccgggccgcgtctctccgccgaccccggcgcgcggcgagccggaagtcacggtggagatcggagaaacgtacctgtgccggcgaccggatagcacctggcgtgagggcggggcccagggctgggggcggggcggagctcagggccagggggtggggcggggcctgaggacaggctgtcagtgaggccaagatccgggggctgggagtggagaggaggaggggcggggcttgaggaaagaacgccgcgttccgggcgctgagaaaccagccgggttgtgggaggctgttgaccttgaattatgccgagcgacgcctacaaacccaccgctcaggccttcaccaggattgttcccattccacttccttgcccagtcttaggcttcattcctttttcttgctaacgctgcttcctcaccctctcttgtctctgcgtcttctttttccatttgtccctggcagccatccgcagagagaagaccttccagaaacaacaggcttccctttcctaaagttctgctgccttctctcattttcaaaattaaccccaaactccttagggtggcattcatttttgtgacctctccagtttctagccaacactaggaaagggcattgccaggccagaacacactgtgccctctgaagaccacacgccctttaccacctgtgccctttgcttggaatgctttttcttccctttctccttgtttgcctgcctagctcctactcatcctcttagcttcatatcctttgtgatgtcatccttgattccccttcaggcaaagtgagtggttcccttctctatgttcctgcaacatttttttcctacctcagtcatagtttttgtaacattatgttgtaattttctctctctgtcttcctccatcatactgggaacttctggagggcagcacttcttgtgattcatcactgtgtcctctgtacccggcaacaacacagcatagggccagacacgtagtggttgccttactcatttattgaatgctctgctaattgtcaggtgcgctgctaaaaattttggaggcattaattcaccttctaaggttggtactattatcccttttgtctttttttttttttttttttttgagacaggatctcgctctgtcacccaggtgggattgccgtggcacgatgacagctcactgaagcctagaccttctaggctcaagtgatcctcccacctcaccctctcagagtgttgggattactggcatgagccactgtgcccagctgttatcccttttcacagatgaagagactgaggctcagaaagatggaataacttgctcagttacacatagctaggaagtagggagctggaattttgtgtatttttttttgtttgtttgtttgagatggaatcgctctctgttgccaggctggagtgcagtggcgccatcttggctcactgcgatctctgcctcccggattcaagcgattctcctgcctcaacctcctgagtagctgggactacagttgtgcgccaccacacccagctaatttttgtatttttagtagagacgaagtttcaccatgttggccaggatggttttgacctcttaacctcgtgattcacccacctcggcctcccaaagtgctgggattacaggcgtgagccacgatgcccagccctggaattatacattaatgtaggttatcttaatccagagccagcactcatgatccctgaacaaatgaacaactgcgggtatgtggtaaaatgagcattgaatttagagtcagacttaaattcagttaagtattagctcttaccacttttcaaatctgtgaccctaggtaagcctcagttttgttctgttttttggggttcttttttttgagacagagtcttgctcttgtcacccaggccacagtgcagtggtacaatctcggctcactgcaacctctgcctcccgggttcaagcaattctcctgcctcagccttgcctcccaggttcaagcaattttcctgcctcagcctcccgagtagttgggattacaggtgtgtgccaccatgcctggcttttttttttttcgtctttttggtacagatggggttttgccatgttgaccaggctggtctcaaactcctggcctcaagtgatctgcccatctcggcctccagaagtactgggattacaggtgtgagccacacacccagccagttattttctcattcgtaaaatgagaataacagcctcaacctgatccacctcacagttgtggcagtgattgagtagaatggcagaggtggaccagtgaggttagctgatgtgtggccctgaactctggaaactgcttctcagtgtgcaggattccttttgttccagccttaccttcctgatgaccctagcctttttccatcacagattctgctgaagtgatccagtctcgagtgaacgaccaggagggccgagaggaattctatgtacactacgtgggctgtgagtggcttggcacatctgggcgtgggtgcagggagttggctgccctggcagcactcttatggcccatacttacagttaaccggcggctggacgagtgggtagacaagaaccggctggcgctgaccaagacagtgaaggatgctgtacagaagaactcagagaagtacctgagcgagctcgcagagcagcctgagcgcaagatcactcgcaaccaaaagcgcaagcatgatgagatcaaccatgtgcagaaggtccggatcccttcccatccacgggcccaggaggcccagcttctctgccagttcccttgggtctctcgggccccagtgccaaaaccatagcaaatcccatttcttaagctcctgtagtgtgtcagggactttacctacttcctcttacttacttttcataggtaagaaaacagacagagggtaagggcttcgctgcagtctcacagcaaggaaatggcacagctgggactagaactcaggcctccggcactggtagcctcttttgtctcctagtagctgtgtcttagtagaaaaaatgacttgaagttcagtgggaaagacgagaatgttattcggcagttgctatagccaagcaccctgccaagtgctgtatatgtataagctcctcaaatccttcccaacaattcaacacacaggaatagttacttttttggtaggtgaggaagcaggctgagagagattaagtaacatgcccaaggtcacacagccagtaaaacggtgggctggaattagaataataatgccaaacacttgttagccggtgagcagaagtattcagctaaatggtttttgtgtgtgtgtgtgtgtgtgtgtgtgtgtgttttgttttttgtttttttttttgagacggagtcttgctctgtcgcccaggttggagtacagtggaatgatctcggctcactgtaaactccgccacctgggttcaagcaattttcctgtctcagcctcccaagtagctaggactacaggtacctgccaccacgcccggataatttttgtatttttagtagagacgaggtttcgccatattggtcaggctggtctcgaactcctgacctcaggtgatctgcccacctcggcctcccaaagtgctgggattacaggcgtgagctactgcgcccggcctaagctaagtgttttaatacatgacctcactgacatttcacagtaggcctgtgaagtaagcatgcagaagagctacagataagtttagggacccagacaggaatttgatcaaccagctaaattgtgctacctcagagccagaggccttagcaatgattttggtttttttcttaagagacgggagtcttggtgtgttgctcaggctggacttgaactcctgggctcaaatgttcttcctgccttagccttctaagtagctgggactacaggagtgcatccctgtacctgccttggttttttcttgtattgatacttaataattgtacatattattgttattttttttttttgagacagcgtcttactctatcgtctaggctgagtgcagtggcacaatcatggctcacttcagcctcaacctcctgggctcaagcaatcctcctgcctcagcctcctgagtagctgggaccataggcacgtgccaccatgcccagctaattttttatttttttgtagagacgggatctgctatgttgcccacactagtctcaaactcctggtctcaagcgatcctcctgccttagcctcccaaagtgctgggattacaggtgtgagccactgcgcccgaccaagtctcagtttctaaatttataaaaatcaggagtgcacaccagagcaagatttgtcaaagtctccagacacccagacatttgttactttcagctattgcagcttcatccttctgagtacatgagttagtgggcaagcccaacatttaaatttctttaaatggaagaaagaaagtggataagatagaaaaatcagggtgttgcactttattaagtgtaggtattgttttgagaagcttttatttcacacccaataaaagtgtgcaggattcctcttgttccagccttaccttcccgatgatcctagcacatacttgtgtgtatatacagacatgttacagtgccaagtgtacttcctactgtggtgtgatttaaaaaattgaaataccctaaactggaagaactcctcaaggtctaaactgccgaatcgaacttcctattgtaatggaaatgttctatagctgtactatctagtaccgtagccactagccacatgtagctgttgagcacttgaaatgtgtctagtgtgacgaagaattaagaattttagctgggcgcggtggcttacgcctgtaatcccagcactttgggaggccaaggtgggtggatcaccaggtcagaagatcgagaccatcccggctaacatggtgaaaccccatctctactgaaaaatacaaaataattagccgggcgtggtggcgtgcacctgtagtcccagctactcgggaggctgaggtaggagaatggcgtgaacccgggaggtggagcttgtagtgagccgagatcctgggctcactccagcctgggtgacagagtgagactccgtctcaaaaaaaaaaaaatttttaaattatgggtgcagtggctcacgcctgtaatcccaacactttgggaggcggaggtgggtggatcacttaaggtcaggggattgagaccagcctggccaacatggccaaaaccccatctctactaaaaatacaaaaattagccgggcgtggtggtgcacacctgtaatcccggctacttaggaggctgaggcaggagaatcgcttgagcccaggagatggaggttgcagtcagccaagatcatgccactgcactccatccagcctgggtgtccgatcaagactgtctcaaaaaaaaattaattatcattttttaaaaaaattttatttttattttttcgagacagagtctcactctgttaaccaggctggagtgcagtggtgcgatctcagctcactgcaacctccgcctcccagattcaagtgagtttcctgccgcagcctcccaagtagctgggactacaggcacgcaccatcatgcctggctaatttttgtatttttagtagagatagggtttcactatgtttggcctcaaactcctgacctcaactgatccgcctgcctcggcctcccaaagtgctgggattacaggtgtgagccaccgtgcccagccaaaattttcattttttgagacagagtctcactctgtcacctaggcgggagtacagtggcgagctcttgggttactgcaacctccgccttcctggcttaagcaatttttgtgcctcagcctcccaagtatctgagattacaggcgtgtgccaccacacccagctattttttattttttatttttagtagagatggggtttcgccatgttggccagactggtctggaactcctggcctcaagtggtcctcccacctcggcctctcaaagtgctgggattacaggcgtgagccaccacgtttagctgagtataattttaaatagccctatgtgacaagtggctactttattggacagtgtagatctaagattaattcctcaactgttttgcactcaacaaagacatacctctgagttggcaaccagcagggtggataacgggccagtggtgataaaatcaaagaataggtaatgaaacaatcatccagttaacaatcagcaaggttcttcagagcctaattaatgtttaattctaaataaattgcaacaattaagaaaagtagtgtttttgtagttctttattgcatttgcagaagagtactgtattttgtgagaattgggaaatgtgttttaaagagatgtgtgaggaggaaaatctttcttcctcatctttacagtggttaggttcagaattggacagaccaggggcccatgcccaactctgctgagtaccagttctgtgaccttgggcaagtgacctcacctctttgtgcctcagttttctctcatacaacagggacaatgagcactcttatttcaaaggctcattgtgaggaacaaaatgaaataatgtcggctgggtgcagtggctcatgcctgtaatcccagcactctgggaagctgagatgattggatcatttgaggtcaggagttcgagatcagcctggccaatatggtgaaagcccgtctctactaaaaatacaaaaagaggccaggcgcaggcagaccacgaggtcaggagttggaggccagcatggccaacatggtgaaaccctgtctttactaaagatacaaaaaattagctgggtgtgatggtgcacacctgtaatcccagctacttgggaggctggggcaggagaatcgcttgaacccaggaggcgaggttgcagtgacgtgagattttgccattgcactccagcctgggcgacagggcgaggctccatttcaaaaaaaaaaaaaaaaaaaaggctatggctcatgcctgtaatcccagcactttgagaggccaaggtgggtggatcatctgaaggtcagaagttcaagaccagcctggccaacatggtgaaaccccatctctaccaaaaatacaaaaaattagccgggcttgctggtgggcgcctgtaatcccagctgcttgggacactgaggtgggaagatcgcttgaactcaggaggtggaggttgtagtgagccaagattgcaccattgctccagcctgggcaacaagagcaaaatttcatctcaaaaaacaaaataaattagctgggaatggtagcaggcacatgtagtctcagccacttgggaggctgacgtaggagaatcacttaagcccagaaggcagaggttgtggtgagctgagatctccccactgcactccagcctgggcgacagagtgagagtctatctcagaagaaaaaaaaaaaaacatgtctgtgccgtgcttgccacttggaataaatggcagctcactagtccccgagggtaagggacctcaccttgccctgcctgtttactactctgtaaaattgaaataacgcagctgggtgcagtggctcacgcctgtaatctcagcactttgggagtgcgaggctggttgatcacctgaggtcaggagtttgagaacagcctggccaacatggcgaaactccattgctactaaacatacaaaaattacctggatgtggcggcatgtgcctgtagtcccagctacttgggaggctgaggcaggagaattgcttgaacctgggaggcggaggttgcagtgagccgagatggtgccactgtactccagcctgagcaacagagtgagactccgtctcaaaaaaaaaaaaaaaaaaaaaagaaataacactctatgtaagggttactgaaaggattaaatgaggccatataaacatataggcacagtgctttgtggagggggttctgggtaaagcactggctccttcctcccttctcagctacagggcagggccttgtctgccctggtgtaggtcatggaccgtcttgggtcccccttccattgtcaggctgtactgggttcctcccacagggtctggcctaggagcaggatgtgttgtgagtgtggtgtgactcttagtctctgctttctaaggacttgaaaaatagaggaacccaggtgggcatacttggacagtgttgccctgttgaccacttctcgctgaacttgggaaggagggaatgttttctggatgggaagaatccagtcaggcctcctggagggggtggtaagaatctcaagccttgaaggatgggaaagagcacaataacaacagtgacaaaggatagatcacaaagcatcatggactcacctgactcatgctccgtgccaggctgaggaagtgttttctgctggcagtgagagaaggaagggcattctccaggtagaaggagctgtttgtgcagaagcatgaaggccgctaaaagggggctgctgatagcaatgaggaggctggggctggaggcagggagtctgaggcggcctagtaaattgtccagacctgagatggggccatgactacctggagcaggacagagaggagaattccagagagggcccaattccagagatgtcagaagtagactcgacatccactgtattaggacttggccaggccgagggagagagagtagtctgaggcaagcctagttatgggtcttggacactgggaccaagggtgatgttcccagtaaaatgagcaacccaggaggaggcgcaggtttgcagggaggagtgatgaggtcctttctgcacatcttgagtccgctgtccctgtgggagggacctctggggcagtcgcatgggcaggcagggtctggtcctcaggaaaggggtccaggaacatcggggaggtagtaacagttcttacgctgggcctggaaggcaaatctgttatttcatttgagtctcacaactttggcagagctggattgccccccatcgtgcagctgaagccccatcctgatcctaaccctgttcatctggcaaaaggtccaaacttggacatcagggatgtctgggatatcgggggtggggcgggtgggtgtgagaggagtctggaccagccagcttcagaaccaagtcagataggttagctattggtgtggttattattgccatccaggaatgaggtctggtagacggcagggaagccttgtgggtcctgacgggagggacagcctggtcaccacttctgttcacctctgcccacttttctttcctggcccagacttatgcagagatggaccccaccacagcagccttggagaaggagcatgaggcggtaagtggggctgggaagctgcctgcaggtcccccgtctccccttgccgaggagcccctgctgagccgtgcactgtgcctcactcccaccctgcctgcagatcaccaaggtgaagtatgtggacaagatccacatcgggaactacgaaattgatgcctggtatttctcaccattccccgaagactatgggaaacagcccaagctctggctctgcgagtactgcctcaagtacatgaaatatgagaagagctaccgcttccacttggtgaggctgggccggccgggccgagctgggcaggggcccggtgagaggcagaggcaggcatggagactgagggcggctgcgccggcagctccagggaggagacaggcccaaaggagcgagtacagggaagagctgctgggggtcaggaggcctggattccaggcctggctttgctgttgctggcagggtgaccttgccaacttcagacctcagctcctcttctctggaatggggacagtaactcacccccttcaggtcttttgccaaggccagctccatcccaggaagcacacatagcccctggcagtgggaccttaagtgtggatgaaattgggggctgtcaggaaggggcgctctcatcactgacacagtgggctgcttcccgaagtgtggaatctgaagcgaataggtgtggtttagggaagccattgtcatggacgggtccctccagagccaggcccacagagactcaaaaccccaccgtgctgtgtgatgtttggatctctgtgcctgggccttggtctgtaaaagcaggatcactttcctaaggctgctgggaggattactcgatgtaggtgaagtgttgaggggggaaacagagaggcagagacttgctccaaagcatgcagtggtgggttgggtgcctcctagcagagaacatatgggcagcgaacctgttctcttgtccccgaccagggtcagtgccagtggcggcagccccccgggaaagagatctaccgcaagagcaacatctccgtgtacgaagttgatggcaaagaccataaggtgagtgggtggccaggggttgggagaggccggggaggccctgggcacctcccagatgatcctcatcaccaccaaaggggagggggcagccttagctgagcctctatgggcagaatgcctctgaggggccgggcactgcagctcacacctgtaatcctagcacttttggaggctgaggtgggcagattgcctgagctcaggagtttgagagcagcctgggtaacatgacgaaactcctcgactaaaaatacaaaaaattagctggcgtggtggtgcgcacctgtaatcccagctactcgggaggctgaggcacaagaattgcttgaacctgggaggcagaggttgcagtgagctgagattgtgccactgtactccagcctggtcgtcagattgagaatctgtctcaaaaaaaaaaaagaaggcctctgagggcctcctagcctggcactaggcctgtagttggtgcataggaaacacagggccttgtggtggccccaagactcttctgctggtggggttaggttcaaacttgggttgttctggaacccagaggagattttcttgcctgaggctgcttttagaagtgctctctccttccgttggaaagaaaggtgtttgtttttgcctgggaggggactgctttgtgtgaaatttcctcctgagagagctctgtggctttcaaggtttgagttccttgttcctggccccgaatgacttcagcagggcaggttggggcctttgggacctgcctagctgttgtagagaacttggcctttgccttatcagtctgggagggtctggccaagtgtactggtttcccgcagatgggccatacagcacaggacagagagggcaggcttcagggtggctcatgttgccttgtcacttcctcactgaccacagacaagttacttaacatggtttgttcctgtttccttgtccataagacgggagtcataatatttaatatttacctagttgtgttgttagtggaataaatgagacagcaaatgtcaagtgtttagtgcagtgcttagcactagtatgtgcttaataaacacgggccttgttattatcggtgacctcttggggcttgattagccttggactcggagaatacgcaggctgagcccagcccttgcccctgctctgccttcctgagcatggctgtgtggaatagcagaagggcccccgctggagatgtgggggtgctttccaactgcgctctgccagctttgaggctctgggcaagcacttccactctgggagcttcagcttcctcctgagtaagatgggcctggcagtgctgggctcgcacagctgccgggttggatgagagagtggctgtggtgtcataaaccagggagccccttagtgtgtgccgtgaagccaaactcggtcccattgtccccctcctggagtgcagccaagtggacagacagggctcgaggttcctccattcagcagacgtttaccaggcacccagcttcatacttagactcgtgctaggcgctggggacacagccatgaacaggacggtctaaattcctgcctcggagcctcagtttcacgagctgaaacagagttaatgtctgtgaagactgaagcagatcctgcatggaaggcacccagctcgtatttggcactcagaaggggtggccgggcttcatccagctccactggcacctccgaagtgctgttgctctctcatttccagttccctgttcgtcagaggctgaccgaagactccttccagtgtgaaatccttctggcctggcgaggcgcccacttcgcgtgggctggtgccggccgctggaaccagctgggtggggcctgtgcctgccccctgagcctgtctcccccctcctcaaccctagatttactgtcagaacctgtgtctgctggccaagcttttcctggaccataagacactgtactttgacgtggagccgttcgtcttttacatcctgactgaggtggaccggcagggggcccacattgttggctacttctccaaggtgctgggtctggaaactcggggtggggagggtggggagggcgaaggtgggcatgaacagagagtggggcagagcctccccagcggccctgagcacctgcctcctgcaggagaaggagtccccggatggaaacaatgtggcctgcatcctgaccttgcccccctaccaacgccgcggctacgggaagttcctcatcgctttcagtgagtggttcctggcctgtctgggagggggagacctgtggggcaggggtgccagggcaggctggatcctaagttcctctttctactgctgccaggttatgagctctccaagctggagagcacagtcggctccccggagaagccactgtctgacctgggcaagctcagctaccgcagctactggtcctgggtgctgctagagatcctgcgggacttccggggcacactgtccatcaaggacctcaggtgagggggcctcccgggccctgggggcaggacttgccctgagatgggccacgatcctgcttcctcataccctgtcaccatcctggccagatcccacaagggcaccaggtctggcatttgctctcatccctttttgcagccagatgaccagtatcacccaaaatgacatcatcagtaccctgcaatccctcaatatggtcaagtactggaagggccagcacgtgatctgtgtcacacccaagctggtggaggagcacctcaaaagtgcccagtataagaaaccacccatcacaggtgggtggggggctgctgtgtgtcgggggcggtgggggagtgtcagtatatggactggtaggagtcaaggcctccttattgctgtcacatgatcccaaaccagtcagaccagctcccaggatggagcccggggcaggcctctcattcctgggcttccctacccctccccagcacagcctgcccttttgttctcacctggaggaggtgaaactggcctgagcccagaggagggcagccaggtgtgagctggcctggcccaggcccagccctgcctcccgccccttctccccacagtggactccgtctgcctcaagtgggcaccccccaagcacaagcaagtcaagctctccaagaagtgagcagcctggcccctgctgtcggacctgagcctcctggctcccagcctgtaaatatgtatagacctgttttgtcatttttttaataaagtcagttctggtggccctggactttggaggggaaggggaggccaaga

SEQ ID NO: 633 - DNA, 32744 bp, Homo sapiens
  source 1..32744: mol_type = other DNA
tccagttacagctatatcagagaatgagttaatctcctcagaaatcactaaatactactctgaggggcttagaaattaacagggtaagttgaatatcatcttaaatactatctggatttttatagtgaattcctaatttgggcctatagtgtgtcaggcaacagttgggcactgggaagaaaattccttctcttattttccatgcctgtagtggttttcagttttcttttggatcagggcccctttgagagtctgcttaaagctgtgtagatcttttcacaaacattcacacatgttcagtcagagtttgaagatcttcgaaaacttcctaaagttcacagaccattgggcaaccctgtgctttgcagtatttcagacgtttttacaggctttgtttctcttttaaatattacaactctatgaattagtgactgatattgatattttacattgaagaaaccggtgttcaaaatggtatgtgacttttcctgtaatgcagctgtcaaatgtgaggctagaattgaagactttcccaaattttaataatactgttggctttttttaaggttctttcttcttaatatgtcaaattgctccttagtaagattgtgtcagcctttcctcattgtcagcaagtgagcatgcctgcttcaccacattatcccattgggtgttcccccaccctagtgtttgctaaattggcatgtagataattgcatttcattttaatttgtttctttgttgtatttagagttctctatccacttatccattggagtcttaccaatttttgtagcattatatatgaattttgaatatattaagaatatttgtcatgttttgtgcaaatacatttaccctttctgtttgcctttttactttgtgattttttttatgtatagaagttttgaaatgtttaagtattcagatctactttttcctctacattttttctctttttttagtgtagaaatttccaaatgcttcatacatctcaatgaatgcagacacattcacagattttttttttaacataatggcaatctaaaagattaaaaaaggaatgccacttaagttacagatttttgacttccttttgtcatatgtttattggctattggtctttcgtcttctttaaatatttttaagtatttaatctttcataatttttataaatgatatgtagaaatctagattattagttctgatagcatttagtaaatgtttcatttttaccaagatttcaaagtatagtttacccaatgtaagattttcatatacacgtatatttctttgtctctattaatgttcctttgatctaattatctgtcacagcataattatgatgtatttttaatgttattgtagctttaaagtcctcttttattagtttttcaaaactgttttattctttgatatttttccaaattaacttgagaatatattcatcaaattaaaaagtaaacatatgaaggatttttaattacgattgcattgagttaaagattcatttggggccaggggcggtggctcacgcctgtaatcccatcactttgggaggctgaggcgggtggatcacctgagctcaggagttggagaccagcctgggcaacatggaaaaaacccgcctctactaaaaatacaaaacattagctgggcgtggtggcgggctcctgtagtcccagctactcagggggctgaggcaggagaatggtgtgaacccaggaggcggagcttgcaaagagccgatatcgtgccactgcacttcagcctgggcgacagagcaagactcggtctcaaaaaaaaaaaaaaaaaaaaaaaaaaattagctgggccggtgatgtgcgcctgtggtcccagctacttgggtggctgaggtgtgagaattgcttgaggctttttgtttgtttgtttgtttgtttgtttaagacaaaaatcttcctctcttgctcaggctggagtgcagtggcatgatctgggctcactgcagcatctacccatcaggctcaagggattctcccagctcagccttcctagcagctgggaccgcaggtgcacagtggcacaatctcagctcactgcaacttctgcctccatagctcttccacctcagccccagagtatgcccagctaatttttgttttttgtttttgtttttgtatagacagggtttcaccacattgccaaggctgctctcaaactctaggctcaggcagtctgcctgccttggcctcccaaagtgttgggattacaggcgtgagccaccatgcctggccagcttgctatacttctttatgttttttctacacatatgcaacttggaattagatctctgtcctctcagagactttccttatgctgtctggctcccaggagcctcttttcctagtcctttcactagtggcaggggttattctttctcttagagtcttagtgtcaccctcccccactgttttgccccagagaaatacatagtgaagattcttcccatattcttcctactaccctggaccctttcccgtttctcaggacagaaggacaggtttctcttaggctttcagatgtgctgcctcagtagtgcagcttcataacagactggctttgaggcagagtcagcagagaagaaaaaaaaaaaaaagaaactgggaactcccctcgtactgctccaaaccacacactgtagcccacagatgcttgttttacacccactagaaagagggggtttctcctggagttttgccatgtgtgtctgctgcctaattctgggactctgcccaccctcaggtcaaagtggtagataaaggaaggattaaaaaaaaatagtaaactcaccttcatattggttattcttcatattttgactttcttctccaacgcacctgacattgttatttttcagttttcaagaggttgcttttagtattctgcccagagtttttagttgtaattagtgagggagataggctgtaaagggcttattccatcttgacattcactgaaagtcacattatttcattttaaaaataatttttgttttgattttcccaaaattcttcttgttccttgactattataagaacagatttttgttgttgttgttctgtgcatatactggcctcttgtatctctctcaagataccaataaagttaggaacattttatttatttttgttgccttactgtattttctttgggtcattgtgtctctacttctacactttattgcctctcttggtttttattaagtggccagtgattgttagctttcttctttacagtattttcaagtaaaggtcacaatcagtggttgtcttacttgaatgtatatacccattgcttggcggcccaggtaaaatgtagattcctggtcccatggacaaaaatctgattcagtaagtctagagtagggcacataaacaccttaaattcttttgatgctgatagttgaatgatagcccttgaaatcttggaaactggtgtaattctgtacagctcattattcccctttacaaaatactgtcttacccactgagcatcatggctgaccatgggactctgcagttggcttcccgcttgctgtggtgagtgagaggtgggctttccctcccctcccctcccctctttggagacaggatctcattctgtcacccagactggagcacagtagtgtgatcatggctcactgcatccttgaccacccaagatctaggaaactttccacctcagcctcccgagtagctgggactacaggtgctcgccaccatacccattaatttttctgtttttgtagaggtggagtctctgtatgttgcctaggctggtgtggaactcccagcctcaagcaatcctcccacttcagtctcattgggattacaaccgtgagctactgttcctggactcatttttcttatcatgcacttgcagagacaaggctaatagcggggccctgtccctcggtttctgctgttggaaaggaatttttctgcagggagagttctgattagttctgagttgccttcctttttcccccctctccgttgagattgtctttagcctgctattatctccatttcaaagttcacactataagccctcagacaaagactttagactcatgataaatgctgtggctgacacttacttgtctttagagttgtactggccatcattggtgttttttcactcagtcgttttgtggcctgcccacacccccaggcccttctgacctcaggtctttagtaggagaagaggtagatgaatgggctcactctgccatcttaattgaatgtccactgttaatcttaaggtgatattggtttctaatgtgcaaggtatttctgttgaattctcagatataataatcatcatgaaatctgtagtaggatcacaccttatgtatactcaggtgtgcaaagaaaatatagcttctttatttttcttatctcttccttttgatgaaccctggtcactggatggccggaagaagagtaccagacttactcccatctggtaaactgggtcttatccaataatttaaatagttgtgtttggatatttcagcttctggatactactcattcaaatattatctctttcctcagacgtgcccacaacagaatctagacttatgggttggcttgtgtgaccttgtagtggtggaagcacaccaagaccctcaatctatctactgtcttttctggtttcttactggtctctccctggaattgtggccaccgaggtactaccagaactatcgtttgaggtactaccagaactgtctgagacctgttctttttgctcctagaatgcattgtccatctttcctggtgtcacagatagcctgaagtctggcttggccccctgagcctggtattctctcttccaggcctcttgctatggaattactttatccctctggcaaagtcgtcaatctgtatcttaagttacctttcccgtactactttagagcacacagaagtttcctaaggtacatttcctaaatgtaccttcttccatggcacatgagaaataagggagatgccagagctgatctcacattccttctcaatcttcctgtgtttctgtgcatatattttggagtggctatctccagcttctgttgagtaggcatagggagaggaaagaggttggtggtgtgtgtgtgtgtgtgtgtgtgtgtgtgtgtgtatgaaagtgtgtgtgtgtttgtgcgcacacgcgccacgtgtcagggaagttcctggaaggcagtcattttgtacagtcttagtgggaagtgaagctgactgttctagctcccagatttccttactccatcagacattcttttcttctgccccatctgcctgaaagatgatgatgggagtattggtcacttgcatcttctgtctctgtctcaccttttaatcccacaatccttcatccagaatcaggagtttggggctataattcatattttttctaatttatatcatctttctaccctaattgacaggccccatgttctgactgtcatgagcagaagggatatctgctctgtactgtggaagaaactataatcctactcttttcaatcttggccagaaaatattagtgtctaacaaattccttctttgggaaaaccagactttcaaaaacttttatcttagtgtaaaattctttctttaattcataaggtaaatattaactatttctttctcttttcatttttaaactttaccaaatatatggatgctactcatagaataggagggaagtcagtggaaggaaaagcaaatgagaaaagcatgtcagtatcttttcataatcatgagagcatatctactctcagtactcccgtttctcaagacttccttggcttttcttacatttacttttttaattgtagtagagactcttacaagattatgcttctaaaacatattatagttatttgatttgtattaagcttataactttgatatttttaattatagttttctcaaataggaaaatagtgtgtctctattttttcaaatcttctcaaaatatttatcaataaggttttataaaattttgaaatgtggatttaataaatatgtctcacattctttttaggaaattttttttctttttagtttttaagagtaaaatccaggttgcaactcagtttcttctgccttgtagctcttccctgtgtggacccatggcactttgtttatttgtcttttgtagaattcctcatatttgtgtttaccaaactgtagtcagctcaatgcagggaatcagacattgcttgtctttatttgccctagtgcccaacaaattcctgctcatgataggcatggggaaatcagcaattcctgtgctcctttcctgatttattttctccataggacttaccatgttctaacatactgtattgtttatttgttttatttattgtctgtctcttctcactgaattataaatagcatgcaggcagagattttgaacgattttgcttactactgtattcctaacacctagtggagcacctgtcatgaaggtgaccagtatttgttgaatgattaataaattatcaaaatttagataattgtctaaattatatcatatgatctataaaatactgtaagtataaacttctggtataaaaaatagtaatgtaattggaaaggtacattaaaagttaggaagaccttaatatataatctactatcccattttgtgaaatgagcaagaaataatttaagcacaaagcccaagctaattgtggaaatggaccaagaatttagaactcttaagtaaaacataataataatgtcaactggacatgtggtaagcagtatatatggttgtagttaagaaaaagtacaggttctgcaatcagacatttctaggcaagtttcttgatctctctgtgccttagtttcctcccctgcaaactaggaaaaaattgtatctttcttatagattgttctaagacatctatgaaataaagtgtagtaactcttagcacactgcctggcgtttagtgaaggctcaaaaagttagcttccattattactatttggaatatctgccatctgtagcttgtggatgtgagagttctttagtttttggtggggcttttaaaaaatagttcctagaggccaggctatcttttagtctttccttcaatccctctaatatgccaagctccccagttctctgaattgatgcatctactcttctattggcctagagaacactcttctctgacatgctttgcttctttaacacctacttatctttcaggtctcttcctgtttctctcatttttaaatttttattttaagaatttataaatatatacaaaagtagagagtatgatgaatccatcaccatttctatgtatccattacccaccatcaatagctgtggggatttgatctctttaaaaattaaaaaaaagttttcttgaaatcccagtaaataccttttatttttttcttcctagcacattaacacaatttgcaatcatgtatttaatgtctcttttctccattagtttataagctccataaaagctgttttctttattgtgatatatccagtgtctcatacagtgcctgaaacatgataggttctcaaatgtgaaaggaatgaattatttaataactgaaaacgtcgctaaggggtttgaaaagacgagcatttgatgaaaactttttgaaaaagattggtaagaatgacttaggcagctttatattaaaacaataggtaccgttaggctcagattcatatacttattaagcaaccttgtgctcttaatttttttccaagtaagcttctgtgtaaagcaaactcagtgaccttgtgaagagaatattatttgagtttataagatattgtccatagtaaataactaaattagctttgggggatcactcttgggcaaggtaaaatgatcccttgaggtgctgggccttctgggctgagagatcaagcaccttgacggctcatagagaagttatcatcttgaagcctttgcccagccatcaacctactccttgttgctgtagcttcatttgatgaaatttaagaaaagtgtttttctcttcaaattgctatcccctcctaatttttttttttttttttttttttttgatactgttttgaaccagtaaccatggtttcttgtagaggctccttgggagctttaacaacatcagtcagtttcacagctggaagcagagtgatctagataaaagcataataaaaaagcttactgaggtttttttcccccctgttataacaattctttcattagggagcactttgcataaagtgaaatgttctctgttcccactgaagtagacattttaatttaaattaacagtaacgtagtacctggttcctttttagagtctagaaaagggaggtaatactaccattcacctgtccttcacctgaacctaccctgtctctgtccccttctttttttgtttctattttcttaccatctttctgggccaatggtgagtgatagtaatactgacatttggggttcaagatggatgaagtcgtgaagttgtagctttgaattaatgagggaaaaaggagttaagtagcaataaaaacttgatacagtggtaccaggagtttatttgtcaggatcaagaagagtcaaggactggctcttgtcagagggccagagtaagtaatttgttagaagtcagcgttggcagcaagcactgtcttgacggatggcactattgagaagggaaaggaaacctatatttattaaactctttacagaaaagcttgccaaccctcattgagatagactggatcagtctaccctggactggatatgagaatggttatattgtggggaaagcacactcttaggttatactgcttgtggatattagtatagctgtggcataaaaggagcatgatgggaatttggatgagagtagtgggtcttctgggcctttctttatcgaaagtctaaaccctgcctgtgaaaggaaactccaaatgtaaacattgaatgtttatttttttttacacatttctttgtccttcctacatgtatacctatgtccatactctcacatggttttactgtaattctgttattcgtatacttacataaatgtggacttacacaagcatcttaattggaaatgaccttggagatcacgtttcaacatccttattttacaggtggcaaaaactaagtcccttacaagttatatgcctggtgtcacaaaagcaggttagtggcaagttttgggagtaaaaccctggttctttgaattcctgttgtcatgcgtacaggtattcacatatgaagtctgccctataaggcctcacccaatatgtatctttagctttaagtagcctttcttagaaaactaaaacagctgaagagaagagaagcattaaatctagattcttctaacttaactctgctactgattatctttgcaatttttaggaagtgtaccattctttgataaacagaaataaggatccagaagataaattgtaattataaagattactgtggactaagatcctgatatttgcctcatttcctgatccctttcacagtgtaatttatgtgaaggaaatgtacaattattcaagtaaacacggtactagattcacagttcctaagtataataatttataagtggaacattgaagaatccagaattcatgttgctgtaaacatgttacataagcttatttaaatgttttccttttgtgaattcaataaatggtaatttgtaatttataataaaacatacgattatgatttcgtaacttactgaaaaaaactttaagaaaattaggtatcgttcaactgaaaagacaaaaggaatataccagaaattatagccattttattttcatgttcctgatgggggtattgctgtcacaattggggcagagtcattatttttctcaaattcaggattagaaaggtctttgcctttattgcatcagaacataatcacagaatttcttcttgctggttccctggggacactctttagacaagagaaatcctaggagaaatttgcacaaaagatgtacatcagaaactaaactacaagagcagatattagcatgcttttggtttgttgtgcagatggtttataaaatccttaacatcggtattacttgcctacttttaattaacctctaaagaattgtgtaattgttacttctttccttctctatgataagtcagccctctcagctttctttcctgatacagttgaaagcattttaaattttatccttagaaatacaaatactgaacaaattaatgttgtagttcaacatacttaaccaatcttaattataaattaggatgcgatgagactgtttcacttttaaaatacatgattgatgtttaatctttcagaaatttaagctattatagtaatgcaattgcttatacttagttttgtgtttttattaaagtcttatctttaaatggattgtctcattgaagaaaattaaatgggccaaatgtttgtttaacttcggaattctaaataaatatttttcttatagttttattagaattgggattgatatttatgtaataataatggtttgattgtcacttatctggaactctgatttaccagcacagttcaattatctaagttaatatttttcagttcttcaaaaccatgtttctatttgatagttgtaaaatcacctcttcatctttgctattgtctgaaatttaaaataaatataacttgttttttaaaaatcaaaagaatcaggtagaaagtactgctttgttttcaaacttactagcacacctccaatgtattgaattctatttaaatttacaaaacagaagtttcttacatgagtttcatggaccacttcagaggctcattaaatctgatattatatataaagttttatccatgtgggaattcttttgagatgaaatatctgtagctttattggagtcttgacgctttccatcacctaaacaaggttaaaaactatttttataggacctctgaagtatcatactttccaaaagaatatttaaggtaaaattgctttgctttctagaatcacttaattatagaatcttggtgtagccagcctccatttttacagatgccacaagttgtgatttacccaatgatattgtagtttaatctttgtcaaattagcaggggacacaatgaggcgtcctaattggtgtcctaattgtttttggtgtcctaattgttttttagggcctttttagccttgcagcctctgcatagaggttatggagctctcaactaggcaagcaggtattagtatttgaatacaaagcttttatgggcacaatagagatctccgataatttgcctcaattatttcatgaagtgttaatgtgatactgtgtcatctctttgctgtatatggtgtatgttcttacactgtatatggaagcccctgtagttgcagaggaaaatctgtctttgacagcatctgtgttgaggtagactttcaggagtgagatcatgagatttcagactataagaatctcagacctgtgagcatttcatttattcatttaacaaagatttattgtgtgcctgcttatggagatgtaggttttactggttttgggataccaaaagagccccattgtgtcccctgctaatttgacaaggattaaactacagtatcattgggtagatcacaacttgtggcatctgtaaaaatggaggctggctacaccaagattctgtgattaagtgattctagaaagcaaagcaaatttatcttatagaatacttgtggaaaattatagtactgtgttcatttaataatatcggtttggttaatattgggaaatgtttttctgattacttaacctgaagaataaaatgccatacagtaatactgacagcagttcttacaaaatagtccttagcgtagtagtctcacagagttatgaaattctcagactactaggaattaaagaaatctcctaatttaaatataggaccaaagcccaaaaaaaatctttgttttatttaccattttgtactatttgataaagatttgactgtcgggcttaagttagtgattttttaaatgttttaatttagaggttatgtttcacattgtaaacctagatcctgaatttttatatttagtaatataagatggcatacttaacaaatgcaaaggctacaacaaattaattgagagtattcttaaataaacttaaattttaatcatttttgtgtatacttaagatgatttcaaaataaaggttttatgatttaatgtgctattacatttcaaagagttaaagacttacgccattctacaatattcattttaactggtatacttgaggtttatgaactgtgaggttttgtgtgtctttccaatccctgttaatccatttggcttttcaaactggaacaagattcttcaatattctaaatcctattttaagattccttagccagttcagctcatgtaaagaaatcatccaaaaggaatattaacaatgtaatatttatattgtgtttgtttttacacactgtgcttttgtggttttactttatatgcttagggtgtataattggtttccaagggtcaatatgtgatcaacagtgttttacctatgggaagtggggttctattgatataggaacctcaattatacatccttcctctttgttcccatgaatagtatcctgagctcataacctataaccttatgatgtttacatgttattttaattacctcttatctcaactaaatctccctcaaatccttgagaacagagacatcagttaaatcaactttgaatcctcagaatgtagcacacagcagacatgcaaatattttttaaatgaatgaatcaattgtgagacatgagggcttatcttggatcctctatagtcactaaacaggattttaaactggagaatactgtattggccaatggttatctggaaaaccataatcaatgggagtattgtttgtgtttgtggcaggggctggggctggggctggggaagattttcaggaaatggctcagtaattgtaggtgctggagagtctgaaatctgtagagtgggctggcaggctggagacccagggaagagttgatgttacaacttgattctgaaggcagtcctgaggcagaattcctttttccttgggcaacctcagtctttttctcttgaaagccttcagctgattagataaggcctactcatattatgaaagataatctgctttactcacagtttactgatttaaatgtgaatctctttttttttattattatactttaagttctagggcacatgtgcacaacgtgcatgtttgttacatacgtatatatgtgccatattggtgtgctgcacccattaactcgtcatttacattgggtatatctcctaatgctttccctcccatttcccccctccccacaacaggccccggtgtgtgatgttccccttcctgtgtccaagtgttctcattgttcatttcccacctatgagtgagaatatgcagtgtttagttttttgttcttgcgatagtttgctgagaatgatggtttccagcttcatccatgtccctacaaaggacatgaactcatccgtttttatgtctgcatagtattccatggtgaatctcatctaaagaataccttctcccagacagctaagctggtgtttgaccagatatctgggtacaatgccttagttaaattgacacataaaattaaccaattaagtgattaatttcagtgggaagattcagcattctcgtaaatgaaattagctataaaaaattgaaattattataaggaatagtcacaagttataaaagaaacattcattgctatggccaggaatatattgctatattggaatctttaagggcagaatggaaaaaaaatgaaagcatatgaacaattattacataacatataaattaggaaattttaaaggagaaatgatcagaatttaggaaagtattcttaaaggatgtgaattttgataaaaatttgaagaaagtatgcatgctgtgcatatatggagttggcagagaagcctgataagtagagtaccacaggccttatgagaggcttggggaaggaaggacagggagaaactggcaaagagcgttgcatatacattttaaatttgtttagctggagaattaaaaaaacaaaaacaaaaaacttctaggagttaattaggaaggaagagattaaatgaaaacatttcttttacatttttcttttttttaattttaagacattattttagattcaaggggcacatgtgcagttttgttacatgggtatattgcataactctggggtttgggcttctattgaactcatcgttcaaataatcaagatactacccaactggtagttaaaaaaaaaatttcttaaagatctagttttacatgtatgatggactagagtggttgctaagcccaagtacaggagatgaggacctggacaaagatttataaatagaaacaaaatccaaatagagaattgagacttctcagagactgctgagagaattgacagaactttgtgatttaatgttggagacaacacaagagaggatatactgattttgcctaaattgtcaatctagtattgtaagaatgatgttgttaattttgacagtgatgtggaaatttaccaagatgggcaagtggaatataaggaatgatgtacacatgtgactcagatattctgtggggcgaaagtggttttatcattgtattccaatatactggacattctgagacacaaaatatggtatcttcctattaagggatgttattctactaggggaaactggcatacttttattataaacttcatagtataacatataatatttgaagatatcagatatatcacataaatggtaaatcatctctctcagtatagtcagtgtctactgtgacaaagcaacaaaaactgtagcagtttaaagtgggaaggtatttacatgtattttctgcgaaggatttatgagtgtctcagattgaggcccttatacgtaggatttttaaaaactttatttacacagtgggacaaatagggaagcaggaagccccataagttggaggcttagctatgacttaaatatactacatgtttttttccctaaactattaatttggaatatcttgtaacttatatacagcccttctactattttattatgtatgattgatctttttttttttttttttttgagaccgagtctcactcttttgcccatgctggagtgcaatggcatacatgaccttggctcactgcaaacctctgcctcctgttttaagcgattctcgtgcctcagcctcccgagtagctgggattacaggtgcccgccaccacgtccggcaaatttttgtatttttagtagagatggggtttcaccatgttggccaggttggtctcgaactcctgacctcaggtgatccacccgcctccgcctcccaaactgctgggattgcaggcgtgagcccagccgattaatcatttttatatgcctaagccttagtcctattatataaatcagagccctgtagcttcacttttataaaatccttttattgcatattccccattcccttctttagtctatcagtctcagaagttcgtcaaagtattgggcatttcttgggagcagcattgcgattatgtttttttgttgttgttgttgtttttgaggcagggtctggctctgtcgcccaggctggagtgcagtggtggtgcaatgttggctcactgcaacctctgcctccctggcccaagccatcctactgcctcagtctcttgagtagctgagactacaggcatgtgccaccacgccctgctaattttttgtattttttgtagagatggggtcttgccatgttgtccaggctggtctcaaactcctgagctcaagtgatccgcacgccttggcctcccaaagtgctgggattacaggcttgagccaccacacctgtctgcattgaaattattatgttttttatttcccattcgttgttattttgttgttacttatactgtgtatgcctttgctttcattatttgcacatagtcctgacaatggcattaattgggatattccttgggccagagatacatattcttactattgtcactgtgcttgagcctacatcctcttgctttctttccagataggaatttctttcggtgatagtatttattcctgtgcttgtttctcaagccctattctaatttccatcctccaaaccttattgcctcttactattattactctcatagtaaatatcttctttggattgcattcatagcaatttatatgatacgcatagaatgtgaattactgaaataaaactattctgttcacctcaatattctgtacctcagttttcgttaagtcaaactgattttctctgcaagtagtttgtgttttcagtgtttcagtacatgttattatcttacagtatggaaatattatctagtagtgtaaagatttgtcacataaaattactagaaaaatagaatgtttaaaatatgcatgcaatttacatgggaagctttacacagttctatagttttagtgttttttttttaaatgctgttcatttataagagttaatgagtcagtgaaactacatttttaataataccaggaggaaaggatttaatagatctttaacatcttctgttttttttgtttgtttttgatagaacctcactctgtcacccaggctagagtacagtggtacaatcagagctcactttaacttccaactcctgggctcaagcgatcttcccacttcagctttccaaatagctggcactacaaatatgtaccaccattcccagctaagtttttaaaaaaatttttagagatggcatctcactatgttgaccaagctggtctcgaactcctggctgcaagctgtcctttcacctctgcctcccaaagtgctgggattacagccatgagccactgcatctggtcagatccataacaccttaatgccacatctttttctgacagttttattgattgggattactctagagatcattctttggaaaacagctcctccttcctccttttttttttttttgttttctttctttcttctttttttgagatggagtctcgctctgtcgcccaggctagagtacagtggcgtgatctcagctcactgtaacctccgcctcctgggttcaagcaattctcctgcctcagccttctgagtggctgggattacaggcacacaccaccacacccggctaatttgtttttgtattttagtagagacagggtttcaccgtgttgcccaggctggtcgtaaactcctgagctcaggcagtccacctcccttggcctcccaaagtgctgggataacaggcgtgaaccactgcgcccagccacttcgtcctttctttaccggaagtcagaatacaagaattccttccttatcaggtagtttaatctttgttagaattattatgccttcaccgtttaattttttcttgttacttcttctgtcgtttcaaaaaatactcattataattaaaatttaggaagaaccctggaacttaatgtagctgtcagagagattaactacaatttgctgacaagtcatgtgattggggaagaatagcaacaagtaattggattgttaagtagtaaagtttagcaagtttaaagtaaaggcagggtctcagtttgtctcccaggctggaatgcagtggcgtaatctcaggtcactgcagcctcgacctcccaggcccaagcagttctcccacctcagcctccccagtagctgggactacaggggtgcaccaccacaccgggctaatattttaattttttgtagatatggggtctcaccatgttgcccaggctggtctcaaactcctaagctcaagcaatctgcctacctcagcctgcctaagtgctgggattacgggcatgtgccactgcgcctggcaacagtaaggttttaaaaaatacactctaagttattttccaaatttacgtagtaactagcactttcttgaatatttctttaggtaatcaagacaataaatatattttggctaataaataagtaaggttaaattaaaaatttaagttatttttaaataaaataaatattatttaaataaaacgttttaaataaaatattctccaatttctttaatcattttataaaaatttgttatcctccatataaaagtagatataaaaacattgtttagtatgttaatgtgaactaagcagtgtcatgtacatcagcctcagaaatggaattttaccaatactgtggaaactccctgtgtaagcctgtctcaacttattcctcttcctgcactgttccccagtgtgtgaacactatgctgaattttgactgttatgctcttgatttttaaaaaggttttactgcgtatgtatctattcctaaattatctattgatccacttattttatcaaactttttaaaaaagataagacgtacctacaagatattgtgggttcagttccagactaccacaataaagcaaatattgctataaagtgaatcacacaaattttttgcttccccagtgcttataaaagttacgtttatgctataccgtagtctatcaagtgtgcaatagcattgtgtctaaaaaaatatatataccttaattaaaacatactttattgctgaaaattgctaacgattatgtgaactttcagtgagtcataatctttttgctggtagagggtcttacctcaatgttgatggttgctgactaatcaggatggtggttgctgaagattggaatgcttgtggcaatttcttcaaataagacagtgaagtttgctgcattgattgactcttcctttcacaaaagatttctctgtaacgtgatgctatttgataacattttttacccacagtatatcttctttcaaaattggagttaatctcaaactcagccactgctttaccaagtttatgtaatattctaaatcctttgttgtcatttcaccaatgttcacacagtatcttcaccagaagtaggtaacatctttaaaaaccactttctttgcttattcataagaagcatctccttatccattaatgttttatcatgagattgcagcaatttagtcacttttcaggctccatttcgaattctggttctcttgctgtttttaccatatctgcggttacttctactggtcttgaactcataaaagtcatccatgatggttggaaccaatctattccaggctcctgttaatgttgatatttgatctcccatgaatcacgaatgttcttaatggcatccagtatgatgaagcctttctagaaggtttttagttactttgcccagatccatcagaggaattactatttatggcagttatagccttatataatatatttcttaaataataagatttgatagttaaaattactcattgatccatgggctgcagagtggatgttatgctagcaggcaggaaaacacattaatctccttgtacatctccatcagagttcttgggtggccaggtgcattgtgaatgagcagtaatattttgaaaggaatctttttttctgagcagtaggtcttaacattgggcttaaaatattcattaaactatgctgtaaacagatgtgctgtcatctaggatttgttgttatagcacacaggccaggtaaattaaacgtaattcttattggccataggatttttggaatagtcactgtgcactgtctttaccttcaagtcaccagctgcattagcccctaataagagttgagttagcctgtcctctgaagctttgaagctgggtgttggtgtctcctctctaactatgaaagtcctgaatggcatcttcttccaatagaaggctgtttcatctacattgaaatctgctgtttagtgtggccactttcatcatagttagatcttctggataacttgctgcagtatgtccatcagcacttgctgcttcaccttgcacttttatgttatggagacagcttctttaaccatcatgaaccaatctctgttagcttcaaacttctgcagcttcttcatctcgctgtcttcatagaattgaagatagttgggggtcttgttctggattagtttttggcataaggaaatgctgtagctggtttgatctatccagaccactcaaactttacccatatgagcaacaaggaggctgttttgctatcttatcatttgtgtgttcgctggagtagcactttaaatttccttcaagaacttttcttttgcactcacaacttggctgactggtgtaagaggcctagttccagccggtcttggcttttgacatgcctttttctctaagcttaatcatttctagcttttgatttaaagtgagagacatgtgactctttcacttgaacagttaaaggctattgtagggttattaattgacctaattttagtattatcgtgtctcaggtaatagggagatggctggtttggtggaacagttagaacatacacatttgttgattaagttcgctgccttatgtgggcttacatgttcatggtgccccaaaacaattacagtaataaaatcaaagatcactgattacagatcaccataagagagataataataatgaaaaagtttgagatattgtgaggttttccaaaatgtgacacagaggcacaaagtgaacacatgcttttggaaaaatggcaccgacagacttgcttggatcagggttgccacaaaccttcaatttgtaaaaaacacaatatctgcaaagcacaataagtcaaagtgcaataaaaggaggtatgcctgtatattgtatgtattctactatctacctcttaagtttttaaaaatttttaagatttatttatgttgctctgtagaacatttattttcctgggtttatactattcagttaagggtatgtgacagtttgttctattgttgattgatacattgtttttttctactatgaacaattgagctatgagtattcttattttgtggtatgcatgtgcaaaagtatcccttcctagaagtagaattgctgagttatggggtttgtgcatattcaatttcagataatgccaaattattttccattttggtttgtggcagagggtggctagatatacactgaaaatttcctcttcttcctgggcacagagttaggttgaattttccacctctgttgcatcaggaatggccatgtaaatgaattctagtcagtagaatgtgagtagaagtaatctatgccacttttaggcctggcccacaaaaatctgccatgcatcatcattcagtttctcttctcccatcttttggccaagttttgtttctttcataccaattcctgtaccttttcctacctgttactgtgctggctagacttgtacagcgttgtatagaagtggggattaatgagtgttatttctaattttaaagagcgtgcttcttatatttcacagatatctacagtacattctgtgttctctagattacctttatgaagcaaggaggttctctttaagattttttttaaaaaaatttatcgggaatgctgaatttaatctgatgttttaccagtaatgattgagatgaacatttgggatttctcttttgtttccttaatcttgtgaatgatatttataccttcataatttttatttttttatttttatcattattgttattattattattttggtgacagagtctcactccgttgccaaggctggagtgcagtggtgcaatctcagctcactgcaacctccacctcttgggtttgagagattctcctgtctcagcctcccaggtagctgggattacaggcgcctgccaccatgcccagctaatttttgtatttttagtagggacagagtttcaccatgttggccaggctggtctcgaactcctgacctcaggtcatccacccgcctcagcctcccaaagtgttgggattacaggcatgagtcaccatgcttggccttataccttcataatgttaaactgcacttatatttctagcataaactcagcttggtcatgagatatattaatcttttgttcatcactttcttcagtttgaagtattttttgctgtctccatattttcagtcttagtttggatagtgagaaataccatgttatatgagtatttcagatactcccaaactttccagttcatggtgtcctcaagtcaaagaaatacctaacagctacgtttatttagtttcaaacaagttagtatttatgtccttataacttattagttatttgaaaaaatcatatgcataaattcgatatatttttattttaattgtaaataaccacagtcccttgctaatgggatatgtgtgcacctcagagcaatgcataacttctcaaaccttggaatcagataaggcattgccattgccaccctcacttcttgttccatgttgattttcacttggggatgctctttttcacagcaactaccataaactcagatttataaggataacacatcattgaaaggaaagtggtactatttaattttgaaattatttggtgtcagacagatgttgtatagcataatttgggaaaccctgaattttggagagtgaatagttagaatgtgaacagtgaggggtactgtgttttttttttttttgagtctatttgatatttatattttattaagataagttggaataacaggatatcagctatatctttaataaaatttgctatagtcattttctgtgttgagtttttaattatgagggatacttgtgttttatgtactgttttgcatctatgatcaagagtgagattggctgggcggttttgcatctatgatcaagagtgagattggctgggcgcacggtggctcacacctgtcatcccagcactttgggaggccaaggcgggcggatcatgaggtcaggagatcaagaccatcctggctaacacggggaaaccccatctctactaaaaatacaaaaaatttagccgggtgtagtggcgggtgcctgtagtcccagctactccggaggctgagacaggagaatggcgtgaacccagggggtggagattgcagtgagccaaaatagtgctactgcactccagcctggatgacagagcgagactcttgtctaaaaaaaaaaaaagtgagattcacctactttagtttcttacactatttggttttggtattaaggttatactggcttcataaaacgagttggggaatgaatattttctctttcttgaagagtttacataagactgaaattgttctttgagtttggtaaaactcaactttctttgtgagattttaaaaaattattatggttgaattcgtttttctttttgcctacctgtattttcttatttactgtaataccatacaatacacttttaaggctggacaatcttataccaagaacacaaaacaaagcctgtttggagttgattctaagtaggtttatcgcttagtcaccaaatcttgtacttttaagcaaaactaactcatagttttagagaagattttaaactgttgatttagtttccttcatgactataggattatttagtcttttcatgtctttttgtgtcatctttcaaaaaacttttttagcaataattttagatttacagaagagttgtaagaatagtatattgaattcccatatactcctcacccagttcccctattattattattattattattattattattattattattattattattattttgagacagtcttgctctgtctcccaggctggagtgcagtggtgcgatctctgctcactgcaatctccgcctcctgggttcaagcaattctcctgcctcagcctcctaagtagctgggactacaagcacgtgctaattttttgtatttttagtagagatggggtttcaccctgttagccagcatggcctctatctcttgaccttgtgatctgtccacctcgtcctcccaaagtactgggattataggcatgagccaccatgcctggccagttctcccattattaacatttgcattaccatggtacatttgtcaaaactaagagactgacactggctcactgaacttgacaccttatttagatttcaacaggtttttttgttttgtttttttcttgttgttgttgtgttttttttttttttttttcatttatatcctatatcctctttctgtccagggttcccacagtatcacattgtatttaattgtcatgtcttcccagtctcctctggtctatgacactttctggttttccttatttttgtgaccttgacagtcttgaggagtactggccagatattctctctgttggggtttgtctgatgtttttcttgtgaggttgtgggaagactaccatagagaggaaaggcccttctcatcacatcattttagggggcacataatatccatgacatcactgatggtgttaaattaacctccatcacttggtaaaatagtgattgccatgttactcactgtaaagtcattattttttcttttccttacttaattgttgtttgaaagcaagttactaaatcaccttcaaggggtgaggacatgggaattaagtttcacctcccagagggaggagtagctacataaattatttggaattcttctgtaagaaagatttgtttcttgttctccatttaaaatatttatttaaccatatgtttatatcactgtgtcctaggttagttttagtgggttatgtatctttttaattgaatttactggttacatttgttttcaaatctattacttaaatgttttcaacaaaaacattgatctttgctttgtcagttgttaagttctccctttcatttataattaccttgtattattttctttcttgatctcattggcaggatttttaaaagtcatttcaaagaaccaggctgggtgtggtggagcagggccatcccagcaactctggaggctgagactaggaggattgttggagcccaggagttaaaaggctgcagtgtgctatgatcatgcttgtgaatagccactgcacctccagcctgggtaacatagcgagacctcatctcttaaaaaataaaaaaggaccaacttttggtttaattattctctttattgtgcatttgatttctgtttcatcaatttgtgcttttatatttgtgccttttttttttcttggtgaggaaattctttctggtaacttcttagacatttagctcagttttcagtcattcttttctaatgaaagcattgatgggaatacattctctgagtattgcttttactacattttatgattttgaaatgtagcgttttcattattttttcattcttgggtttaaaaatatttataattttttccttgagtcatatgttatttagtgatacggttttaagttttgaaatgtatgacaattttatgtctttttcttattggctttgatttcattgcattgtgatcagggaatgtagtctttctggtagtaattgttccattttctctaccatgtcttttaacctttctttcatattttgcatttctttgtgactataggctgcattcttttttttttttttttttttttgagacagagtctctgtcgctcaggctggagtgcagtggcgtgatctctgctcactgcaacctccatcttccggttcaagcgattctcctgcctcagcctcccgaatagctaggactacaggcacttgccaccacgcccagctaattttttgtattttttctttttttcttttttttagtagagacagggttttaccgtgttagccaggatggtcttgatcttctgacctcgtaatctgcccaccttggcctcccaaagtgctgggattataggtgtgagccacagcgcccagcctttacgctgcattctgaattgttttgtcatttctgtgtaacagttcactgactctgtttatttacttcttccattatgattttacttgtgatgtttttcaattctagtagttctgtttggttatttttcagatttgcccattcattttttatattctctcgagctttactagtatttttatttgttccatctttttctcttaatatattaaacatatttaatattctatatttgataattctaatatctgaaattttacaacaaattttgttgtttgttttctctggctctttctaatagtgccttatttacttgtatttattgtggttttttttttttgaatcatgaacttcttttttttaactggaaccctgtgtaactgtggaactctttagacttgagttcacagtgcattcctccagggaagattttttatttccttctactatgtgcttggagttaggggtctatgaacataggttttaacttgaaattctccccttttaaaaaattttttaacttttattttagattcagggagtacatgtacaggtttgttacatgggtatattgtgtgatgctgaggtttggggtgtgaatgaccctgtcacccaggtagtgagcatagtacccaacagttaattttttaacccttgctcccatctctccctccctgctctgttagtcccagtgtctattgttgccatctttatgtccatgagtgcccagtgtttagttcccactcataaatgagaacatgcagtatttggttttctgttcccttgttaatttgcttagaataatggcctacatccacgttgtcgcaagtggcatgattttattttcttttacagctgcataatatttcgtggtatacgtgtaccacatttaatttgtctgatctactgttgggcatctaggttgacttcatgtttttgctattgtaaagagtgctgcagtgaacgtaagagtacatgtgtctttttggcataacaatttatattcttttggatatgtacctagtattgagtttgctgggccaaatggtagttctgttgtaagttatttgagaaacctccataccgtttcccatagtgggtgaagtaatttacattcccactaaaaatgtataagcattcccttttttgttttatgaagttggtgctccagtgggtttatatttaggatagttaagtctttttgttgaattgaaccctttattgtaatgtaatgtccttctttgttctttttttactgttattttaaagtctgttttatatgatgtaagacttgcaacccctgctcctttttatttttcatttacatgatagatctttctccaaccctttactttgagcccgtgggtattgttatgtgcgggatgggtctcttgaaggcaacagatagatgagtcttttttttttaatccaattcatctctgtgccttttaagtggggcatttaaaccgtttacattcacagttaatattgatatgtgaggttttgatcctattgtgaagttgttagctagtcactgtagtttctattgtgtggttgctttatagggtctgtgagctgtgtgcttaattgtgtttttgtggtagaaggttatttttctttcatttccacgtttagaattcccttaaagatctcttttaaggctggtctagtggtaacgaattctctagcacttgcttgtctggaaaagattttatttcttctttgcttatgaagcttagtttggcaggatattaaattcttggttggaattactttaagaatgctgaaaataggcccccaatcttatacagtttctgctgagaagtccactgctagcctgatgggatttcctctgacctttttctctgactacctttaagactttttcattagctttgaccttgaatcgttttgtgattatatttcttattgatgtttgttttgtgtagtatctcacaggtgttctctgaatttcttgtatctgaatgtctacctctcttgcaagattcgggaaattttcttgaattattccctcaaatgtgttttccaggttgtttgctttttctccatctcaggaatgccagcaattagtaaatttggttgctttacataatcccatatttcttaaagactttgttccttttttttgaattcttttttctttatttttgtctgactagatcagttcaaaagggcagtcttcaagctctgaaattctttcttctgcttggtccagtctattgataaagctttccctaatattttgaaattccttaagtgagttttcaattccagaagttctgattgacttctttttaaagtatttaccgcttccttcatttcttagaatgatttagaagtttctttgtgttgattttcaacctttttttggatcccagtgagcttccttgtaattcatgctttgaattctttatctgtcatatctgagtttccattttggttaggggccattgctggagagctagtgtgattattgagtggtgtcactacgatcagatttttcgtttggccagaattcttgcactggttccttctcatctggagacactggcacttttgatttttgtaattattttcatgcaggtaggatttttttctttttttgttcctgtccctgtaatattttttttttctttccctttccattccccaactccctaggggatatgattgtagagaatgctgggtagcatcttttggctttgcttctatagcctatgtacttctttgggcagattttatattgggctgtagggttcaacctacaagccagtagatggcgcttacgggtaagatcacttagccagctgtagccagtgtgactaggtatacacttgatacttgtttacaggaagaagctctctgttgcctcaggcattgggctgatacgtggagtgcacagtggtctgagctacttgctcagccccaggggagtgggaagcaagatgagtggggccaggccacctacagtcccctgatggcaggcacaatcactaacactgagggagaagccaatgggcagccaccaagcacccagaggtggtcctaggcatggagctggcaaacctccttggccccaagttctctacacaggcaggggtggaggcctgaactcttaatccaggagagtgggtactccaggtacctggagatctgcctgggtgctgcgtacagagggccctgctgtaccacaatctctacacaggaaggatggggtgtctcaggctagcaatccatgcaaatgggtcctctgactgcctgaagctatgcccgggaatggggcagagagtgccctgctttaccatggtcttggcatggggagagtgggctggcttagcctgctgatcccggtgaatgggtgctccagttacctggagatctgcctgggtgtgaagcagagaaggtcctgctgcaccccgacttttgagttttaggagtattcacatagcatagatgattcaggcaccaaatcctcatgatgtctttgctaaggccaagaggttttctttgatgtttgcctttgaaggtgtttttaatgtttgaatttacccttttcctggtgttattgtccttcttgggccctgtctttgtctgatagtgtcttacctgactttcagaggcctaaacttttttctcaatcctttccaaccctaggttactaggattcatatatgccccaggagtatctggaagctttattacttgcttttctgcctattgtatcgattcatttccattcttttttttttttttttttttttttttttttttgctatggggtttcattctgttatccaggctggagtacagtggtgtgatcacagctgactgcatgcagcctcaaccacctggggtcaggggatcctcccacctcaacctcctgtgtagctgggactataggtatacaccaccacacctggctacttttttgtttttgttttgttttgtttggagagacagggttttgtcatgttgttcaggctactcttgaactcctgggctcaagtgatctgcctgcctcggccttgcaaagtgctgggattacaggtatgagtcattgcacctagcccattttcattctttatatcagacgtttaaaatagaaatgttttaagatctctagcccagcatattctcatatctcaggcagtgggaatcctcttggaaaattttcaaaagaatagtttctaaagcccaaccacacctacatgtcagaatctctagggtgcagggcctgtgggtatgtttaaaagcctcctagataattctgatgcactgcaagtctgagaaccactgacatagaaaaagttatttcttcatgtaaacttagataattaaataataacagctagtgtttattgaaaataaggtaacatatattgtaagcatgcactaattctagctgttagtattaatattgttatatgctaggctccattctaagtccttcacatatcttgtcatttattattcacaagaatcctatagctaccacttgtattcccattttagagattagcaaatcaaagcacagagaaattgaattattcaagtttatatagctagtgggtagcagaattgttatttgaatccaagtagtcattctgattccagagcatgtaatcttaacctaccatctttacagtcttccaggtgattcacagagttaattttattgattcccaaagggtttgtgacattacagaatatagcaagaaaaatatatttggataaattatgtatttatgttgattttgtgtaggtattgaggaagcagaataacacagtagaaatggcctcagtttacagtcagatagacttaggcatgaatctctgctcaactgcttgttactagtagctatgagaaagtaaattatcacagacctcttattattttgttggtaaaggaggataactatttttacttcatggggtttttgaagaaataacataaaatagaacctgtaatatattgcttggcacacagtagatggttagtatcagaacttaaggaatcctctaagaagttatgttggcttctctgcaggagattgtagtaagccttagtctaggacgttgttgatggaatagctgatgggtactggtcgatggtgctggtgggggccaatgctgactgtcaatgttgagaatctaacaagtgccaagcattgtcctaggctctggagataaaacggtgagtgagacatagtctcactgctttcaagaagcttgcagttaacttatctatataatcagatagatacatacacagttactttttttgttagatgctaggacacataggagggttactcagccaaaccattgcagatgaggaatggctttctagagggaagaggatgagaatgtgagggattagagtagtaagtccagataggaggaaaagtaaaggctggctgaaatttgtcattactacaaaggtgttccattcatccaacatttatgaaaagatcagggatcttaggaaacttttataaggacagtgttagaatattaagagcctacttttaggttcagtttttactaaagcagacaatttttcaaagtaaaataaaaatggcactctttatatgtaatactgaattttctatcaaatagcactttttggagtctacatgcttgttacttggtagcattgtcacattaggttatacattagaggaagagagaagagaaacaaaggaatagtaaccttcagaggatggaaatgatgatttgtatgtggggtgaatttcatcatgagttgtgtctgctatttgcacatttcccttttcctaccatcctttttcacagatgatgaaaaataatttgttacatagttaccatagtacatagttttaatttgataccgtttgttgctcttgtatggatttgatagttgagatttctttccatctttctccaatgttcccaataaaatagcatattaaaaatgcaagagaaataccatttcttttggcaaaactgggaaaagtgaaagggaatgaataaagaatttcttggaaggggaggaatgtgagtctaggggaaggaagatgatgttgtaatggataaaatgatatcggggattataggaaaataaatgaagttggtctttaaaaatacccccaaaacagaggcagcagttctgcatgttttggtaacctgatgagtgtgacttgatataagagtacacttttgatctcctacttgcatatctgtatgacacctacctagaagtactgtagttttttatatgtactgtagtcctgctcaggacatgagcagtccctgactagaactgaggaaagtagagcagttagtgtgggtatttggaaacattggaaaacagttgttaggggacttaagctcttaatccctgaggatttagcagaggctagaaagaggaagggaaaaatgaaatccagtctgtaaaaaattgattctgaaagcgatactttggaaagtttataaaatgaggtcgaaattgtgaacatagacatgtttactgtgatgacaaatcttagtatactaggagtagccaaaaccttggatggagagatacagttttagacaccacccctcaaaaagagactttataatactgtcctacaaacttaccatcaaatacttgtttgcatctttatggtatgaagttggggaggatggtagaaatgttgaacataaaagcatgttgctccaatgactgtggtgttgttggggtatgttgaatttcagggccctttgagagaagagtattc

SEQ ID NO: 634 - DNA, 32746 bp, Homo sapiens
  source 1..32746: mol_type = other DNA
ctgcggggcgctgttgctgtggctgagatttggccgccgcctcccccacccggcctgcgccctccctctccctcggcgcccgcccgcccgctcgcggcccgcgctcgctcctctccctcgcagccggcagggcccccgacccccgtccgggccctcgccggcccggccgcccgtgcccggggctgttttcgcgagcaggtgaaaatggctgagaacttgctggacggaccgcccaaccccaaaagagccaaactcagctcgcccggtttctcggcgaatgacagcacaggtgaggagggggtccggggcggcgggggcccggggcgcgctgtcacccccacctgaaagagagcgtccgggggtcgtggtcgcggataccgatcgagccgggagctcggagcaggccccgcagcccgttcccctcgccccgcgcgggagggtggaagttcgtcgcaggactgtcactgggcccgagttggtcagcacacgcccggtgcactcggcctccccgcacccgatcagccctcctcgcggggaccctagtggcactccaggagggaagaagtaaagtgcagcgtgtgggtttgtttggtaatgtcctacgcatccatccgcggccgtgtccacacgcgtggccgtccagaggaatgacagcggagggtacctttgatgcttagagaaagcaagatcgcggccaaaggtagggcagtgtgttttctggattggcgacacattgaccaggctgcattcagaggacactcacagcagccgccagcttgcgagttagaaccgaagtttcttggaatgagtgagttccttggaaagatgcttagtgcttattttcaaaactccttgttttgtgtgtgtgtgtgtgtgtgtgtgtgtgcgcgcgtgtgtgtttttagtcaactagtcattccatttttcaaaacccaaacttcgttagcaagatgtcatgaaagttgctgtggtgtgtttcatttccatgtataacttcaaaagaaagttaaacagcaggtttaagttcatttgggctgcaatctccatttgagtttgtgttgctttcacagtgtagatgtacaaagaattaaggaatgtaggaattccaatttttcaaaaaaatggagcaggatactgaataaatcatctttttgtttgtttcctttcattaaacggcttccctggaaactttcttaagttatcatagctgcttaagagaagtatttagttttctattaattcagtaattctgggtcccactgcgctggttcatggtaacatgaactagttgtatttcctcttttagagctctctcctttgccgcaaaaacttgtgtgccgctgcgaacaattccatctccagcgcagcttgcatttctccagtagtcttgcagtggtagcatctgaaaatcagtttctaatgaatgagtccaaattgaattacatcgctgccttcagatttgcactagacacagctgttcaacttgtggaaatagttctgtgaccgaccactagcatattaaaaaaaactgctattgctgttgaaacaaaacctgaattttgtggcttaagtttgaatacaattcctggaatcaagttatgataagcgacgtttaatattaatgtagaagtgaaaagcgatttttaaagatcaatcataaggagattcttatctagttaaaatttgttaaacagtggggaggagtaaatgatgctcatggtatataaaaatcactaatgcttttctttttagctgataaaagttgagtttgacgttaatcttataaaatgaacttattgaagtgagaaatttggaaacagtagtttaaatgccgttgtactgcaaaacagatctccgttgcttcattaatcttgctgtgtttgagtagtcttcagttctgtgagacgtaggtcatacgtggcgagttcagctttgaagcttgtcttctgaaactggtaacctggatggctttgtagctttgctgttgttgaatgaatttgttgtagattttgtcttaaaaagggggacaattagtaacacaagacttaacaaaaaggcatgtccttatatgtacatccagctgtttccaagatggagcccaaaggttagctttttccatagtagtgtccattattggatgatcagatgcttaataagttgatcagaaaggattttccacacttaaccaccttttcccccttcctttacaattttgatccttgtaaggcacaggggctctttcgtgggaccaaaagtcagctttaaatggctccgatttaatccaaagtagaaagtcaacatcatacttaagttgggtcatgtgttacacattcatcaccatcacactattgtgaaagggtctgttagtatgggggaccaaggaagggctcattatcaagcacattaaacaaggggctgctgggcgccatggctcatgcctgtaatcccagcactttgggaggcggaggctggtggatcaacttcaggtcaggagttcaagaccagcctggccaacatggggaaaccccatctgtactcaaaatacaaaaacatagccaggcatggtgacatgcacctgtaattccagctacttgagaggctgaggcatgacaattgcttgaactcgggaggcagaggttgcagtgagccaagatcgcgccactgcactccagcctgggtaatggagtgagacgctgtctccaaaagaaacgagggacactttgtctgttgtaactgctccactaagaaattgagtaatgagatggacagagatcttagggatgtattttaaacaaataaatggcttgagtttttacattaaatacattcaaaaactgaaggcatttggttaggtgggacagacctgagaataacattcttgaggaactcaatcttattttagtgacgggatgtgtctctgaggctcccaggggaaaattgggcctagtggagcagggtgtgtgcccggtgcatgtgatcaaatttgagggaggggacctctgtctaggagctgaggggttgaaaggaggaggagcccttggcagcctgagaaacaggatctacttggactgcagtgcatgtctgtagagactggcctgtggggccaccagtgtcacttagatgtgtctgtgaagggtggcagtgagctgagagaaaaatgcacccgacattggggagctgctcagccagggtgctgctcatctgggggcatggatgttgcaaacagcactcccgaaggtcatgcagcacctcagagtgatgaatgtcactgccactgatgacaaacaagttgccgaagcctgggaagcttatgcagagatgatgcagaaatacggaatgtgctgcgaatgagggtagcaagagagaaacggtacctttcaccccactgaagcagcagccctggagaggcacagaatttgatggcctcagatgttaaagtagcattttcttgtattatgtagaagcctttacactttctcatacatgaggtcttcctttacttggcacccttacaataagtggggactttatattaccggtatatagttagttgggtgttttggaaacttctttatttaatatgtccaagttaaaatagcatattgtgtctttcaacatcagagattcatgatttaacagtataagacaaatatccaggcaagcagtagacttttgttttttgttttctgggttgtttttttttttttttttttttttttttggtcagctttattgcaaaatttgcacacaacagactgtttataaagttttttgaaattgcaggccagggtggtggctcatgcctataatcccagtgcttagggagactgagacaggaggattgcttgaggccagcagttggagaccagcctggacaacatagtgagaccccatctaaacaaaaaatttttttaattagttgggtgtaatagtacaatcctgtaatcccagctattcaggaggctgtggcaggaggatcgcttgagcccaggaggtcgaggctgcagtgagctgtgatcatgccactgcactctggcctgggtgacagagtgagaccctgtctctgggggaaaaaggaaaagaaaaactacattctgaagattgaacatagctgtgtttcatcctgtgctgtataagtggctctaagcagttgtgattacattttatgacgtgaatccttttaaatgcaatagggaagcttatttaaagaaagctggtggcgaatatggttgtcaaccaaatggtctgttatgtatgtctggtactttatgtatcagagtgcttttctccacgtcacctcagtttgatccttacagcgtcctgtgaggaagggaagatgctgttactgctattttctaggtgaggaactggacttgagaggtgatacagggtcaaaaccagatccaaactagattgttaaagtccgtagctctatatatttattttctaagtctctatctgtaaacaatgcatttacttgaatcgacccaggaacctgccaagcttagtgagtttcagtagcggccttcccgcacatgaatgagatcactaagggggaggtttgtaaccacctgtggtgggggcagccaggagtgtattcttcctcctgggttagggcgtcccccttttccctctggttctggtgttatcctcagcgtgacgtgtgtgggctcgtgttcctgtttacctcagggagaatgagaaacggttatgttaccccatcagtgagttctggctaagtaggaataaaagttgtcatagagacttttaggactaggacatttcatgaccgtgcttcgtttttgaataactgagaggggtgagagcggtggccccattcaaaggtcgtcagggatgaaggtaggcaaggacaagtcatgtgcagggcgccttagagggccttcagaagatggaaagtcgctcctggctgaacattcagatttgattctgtaaacagaattgaacataacttacaaagagactgagtcctgcagttggaagttgatgcttagattagtcgcctgtgttttcacagcttctaagtagtgtgttgtaattgtgtggcaaagtatgtgattacctggggggtccataattgctgacttgtgtttttacttgatgtatttgaaaacagttaggaaaatgattttgccaaagtgtgtcttaccttagttaagatgaaatgtaccttattgtgagtttctgaagattgcaaaagcttgtcagtttagtttttggggtcccattagtgagggcacccctctttaccttactcaaaccagctcttcacatgtattccaagaaactagagggcatgctaagaggtatttctcaacaaatggtttgtgctcagatgctgttgcttgtagctgaggaatttgactgcagactttcccagagccttggtgtcctgattgggcactgtgagagaggggctacagttggaccactctcaatcctgtttgacgctagaactctttttagcctattatgggtccgcagacttcctctgcaaagggccagagagcacgcatttggctttctgagccatatggtctcttgttgcaactactcaaggctgccatttcagcaagaaagtagccataggcgagtgggcctggctgtgttccagtaaaactctagttgtaaagactggcatctgaggacttcgcccatgggctgcaatttggtgactgatataacgtgggacttcattctctgagcacccgttggggagcactggcctaccacggctgcacagacagctttaaggaaaacagcagcagggcaagttttctgagctgcatgatgtggagcccgggagagcccaggtgagcagcaggctagcttgggtctcctgtcttggagcacttcagagcttagcagggccctctctctctgtcttttttgttcctctgtaacagttatatggatgacttgatttaaaatcagacgaatttatcagaaagcctggtgaccggttgcatttttctttgttcttttgctttttgttgaccccagtggcccacatggcatttctcgtccgtctttgtcatctcaggctctaggcttgctccccttcctgtgacaccagaaggtgagcgtcagtaagaactccagagcctttccacggccctcttcccagcacttccctccccaggggcagtgcctgacacatagtaggccctcaggaaatatttgagggaattagtgaaagaattatatagtatttgtcccttaaagttcttatcattttcttgttaaggttttactttcaagcagattgccacctatcttctaattgggtctgttatttgcttccgagttccgtacccatgggctcccacccggccaccaaaccagctggccttaggagtgctgaggccagagcatgtttggggcaagttacatcagctctctgagctcagagtttcctcatctgtaacatggagataataacaattcccatctcagggtggttatgagggtagcctgagatgatgtgtgtctggcatatccgcccaatgggaactgacactagcgttaaccagggacgttgtcgtaccttgtaagtcctaggacttactgggagtgctagtctgattggagcaagacctgtttctcagcagttctggaaaggacagaagccatgtgtgctcgtatccacagaaaccagtgtgcaggcacgcgtgtgatagtgtagcacctcagcagatacatagccgggaattctgtcatctataccattgactctgtctccattttttattgtatttttaaaaataggaacgtgatggccatgaaagcttaaaattacgaaaacttaaatggtgtgtgttctgaattattttttcttttaaatcaaatcaggatgtacactgaaaattattgataattttgaagcatatttcatggactgtttaagcagcagacaagtatgtgattctgtttgtttactgtgtataatttatcttgaggtacctgttaagcattagcagtgtacacaggattctgatagatgcctgtgagtacttagaaccatcttgagaagatgaaacctcgaggcaaaacttaaggaaagggtacagaaatgcagtcaagtgcaaaaactctggaaccagaaagggtgatctgaataaggcttcatttactccctcccctgtttcctgagtgtccccgtgtgcagaagtccagggccgcatgccccagtgggaggcaggccctgggatggttgaggagccttgggctcctgtgacagctcttctgctgagccagcacagagccaggagttggggaagcctgcctgttttccatgcattcctggttgttgggaaaagcaccctgaccatgacagtttgtttcctggggtatcgttgtaggcccatggcttgctcacatctgagtcctcttctggttgtcccgtctctcctaggctctgaagctcctggccgtgccgtctgctttttagcacatgcgctcagcgttccctttagtcctctctgaggtcttttccttgcagtgcatccctccggatacactccttgctttaactggaaaaggatgctgctcttctcagtcaggctcaaacttggctttcggcaaaattctcctattgcatgagtctttgatgcagaagtgtaagccttgggagcagtgcctgtgggggcttttgcctgttctcctttccctggggccgtgctctgctgacaggggtgctacaataggccacgagcagagtccccggggcgtcctggagtggtcaggtctttgccatttgagctgtgacttgaagagatttgagcaagggcacacaaatcaaattgggcaaggctgtgtgaaaggcatggaagtaaacaaaagtggcccctctctttttaaagttttttttattaagttcctagacaatataggcggtgactgtggctgtatttaaaatactgcctttagggtgttttctggttctaaatttaggaagcaaggctatttttgagctctgtctctaaaagttgaattccttttaaaacttacccttaagaaagatttggatattatcccgtgtgacattttccccggtgtttcatttccattaatcaaaagactgtttagttgaaccattgctaagaatagtaaaatctaatggggaaaataattctacatgattaaatctgactttactttcccatttctagttgtactgtctgctattgtttgaaaatgtcttaatttgcctttctaatatgcctgtactatattgtatacagtaggtatattttccagttgcacctaattcaacctttcgaatttgcataatctgtggtaaggagaaaaagtagttgtgtagtggagttgtacaattctgttgtaaagcaaatctttttataattcacaagctgcttctcctccccctagtttggatttttcttattaaaactgcaccacctaaacatgttttaactttatggttaaaataaccagtgaaatagaaaaataagtcactgttctgtatgataacatgtagagaaggcttgtacaacatttaaataaggagatttgggtatttgattacaaactgaatgaggacattcaggagctatagaaatttatcaggtaattagggtttgcttagacaattatagactctacgagtttgacccagttgctttggattaaaatattttgagtatttgtcacctgattaaaagtagaaccttctaactgtgagtcacagttgaaggaaatgtcagctttttatacggggaggcggtcagtgtggtgctgaggagggagccctggctcctgctcagagtagactgtgagtcccagctcccagctcggcagcgctgtgacttgggctggtgacatcacatttgagttttgcagggtggggtgtgtgtgtgtgtgtgtgtgtgtgtgtgtgtgtgagtgagagagagagagagagagagatctctaaaaggggctttttaccctgcagtattccatttgtttcttttctttctcttctctcttctttctttcttttttctttctttctttctcttttccttccttccttccttctttttttctctttctttcttttccttccttccccttccccttcccctccccttctttacattacttttcttctttccaatggggtcttgcttgcccaagctggtcttgaactcccatccttcagcaatcctgcctcggcctcctgagtagctggaattacaggtgtgagatggagccactgtgcctggctctacttctgcttactttgattatcttggtacatggggctactagggtgcctggcatatagcaggttgaggcagctgtttttattgtttaattgtatgggaaaatattagccatcacctacttcttgggccagtgaggactaagatgatgtagcctgacccggaatcaggaggcttctcactgaatacatgggaagcttctgcccctgcctgtttggctttcagtgccagctctagtgcagtttgggaaccagtttgtaagaaaacgaactaagattcgagaatcttacaaaatgggtaatcgtttgactcattttactccgtctgtgtttgcagttcaactgttttttattggaaaattgaactcttaattaaatggaactctgtttctagttattgcttcagaacaagggcttgatttagattaggacttagagaaaagggaaaagtaaatgcagagaaattataaatatagtattttattgaaaacagagttgggaagaaaatggccttgggatcactgtccagtttagtcaggttggttgaaaggaataccagtgaaactcaattgcctctcgggctcagctacacagatcttgaaaggaacagattcagctctgtgctgtactgtgtgacttttctcctcctgcagattctatagtaggaaattcttttaatggagattactgtttttctgttctcctagatttggtgtgattttttttttttataagtaaaagttaccccgtggtggacaaaatttttccccgatttgtggatatctttacttaaatctgatttacatattcagaacgtcacctttattgaaaataacaaaaagacataacatattgataggttttctgtgtcattgtggttgttcctctactactgtgggaatcggtttttgtttgaagagcacacctgcccgtagttgaacttctgttgagaagtctctgagggaatcatttgaatgatggcaagagaatcaagtgttttgctttcactgatggctttctcagtcactgaaactttaggggagaacggattctttcccaggaggaagagggtgaattgagatgtttccttgtttggggatgcctgtgttctcgggatgccctccaagccagcgctgtccagtggtcgttattgggagggcggctctacgctgtgtctatatgacacagtactggaaccacgagccacgtgtggctgttgagtacttgaattgtgattagtgtgacttaggaactaaattttaaatgttacctggtttgagtaaatgaagatagccacatgtagttagtcactacggtattggacagcacaactgtaagtacatttacttatcctctttgtctagagttttctttaagatacgtatcacctagatatttatgacaaagttcctttaaaacgatcatcttttaaagatgcaagactccaaattaaaaatgatgaaagactccttcaaaaatattcacggcttaggtcacactgttcaggattattcactaatttagaaaatatttgttatgctgtgatgtaggccctggcgatccagtggggatgtgacaggccccatctctgccctcatgggtggtgatggatactggacaggtaactgcagtcaggtgtgaccttggaggggacatactgtgcattgactgaggcaccagatggggactgagcctgttttgaagggtattggaagtccccgggggctgtgacgttagcactgacacctgagggtgaataggagatggcagatagtactgttccaggcagagggaacagcactcatagcagggtggaggtctggctcttgtgacagtttttgggttatgttcactgggctaccagaatttaggaggcctcatggttttgcttctgagatggtggagactaaaggtgtggttctgccctgcgggggttggtcggcccgggatccagtcttgactcctaccacttcattcttttattcagcaaatatttaagcacattttacgtgtggggcaccctgctgggctgtggtgatgacagtagtggcagaagctgcttctgtcctcatggaactctgagttgtgtggtgtggtgggtgagcagtcccgtggtgcccaccgtggcctatagcatttcacactcagctcgatgtctgactggaaggaagtggatgcctcaggctgggtggtcagggaggcttgttggaggaaggacaccagagctcattgagggtgagtagagcatcagcttgggcatctgaaggcgagataacatcaccaagggccttgaatgtcagacctaggagtccaggttattatttttttttagggcttataaaacaaaattaagctttaaaaaacccgtgtccagagtgattgggggagctcctgtgatttattttccagaagtctagattagctttttcaaggtgtgttttttcatccaagttcaggtctgtagggagagtagacaatgctttcccctcctgagccccgtttttggcaggaaaagggccccatgaaaagcagcttaagaactggaactagtgttcttatttaagatgttagtaaatttttgtacaaacaattttcttttaaaagtttttttaagttcttgtgagtagataatatattcatatggttcagaattccaaaaaagcagagtaattggtgaaaactcttcctcctgtctgtttctggggtcactggtcattcccctccccataggcaaccagtgttagctgtttcttacgtattctagagatggactgtgcgtagccaggcaaatatggtctcttcttactctttttgccctaagtagcccattttatgtaactctactatcagtgcctttcagactgatacatatctcagagctgttggaaatgttagtattagaaatgcaggctttgttctatttttttaaatttatttttatttattttgagacagggtctcactctgtccgccaggctggtgtgcatttatttgatcacagctcactgcaatgtccaccttctgggctcaagcaatcccacctcagcctcccaagtagctaggatgacaggtgcatgccactatgcctggctaattttttttttttttttttttttagtagagatacggggtcttcctatgttgcctaggctggtcttgagctcctgggctcaagcagtccttcaacctcagcctcccaaagtttagggattacagatgtgagccactatgctcggcccaggctttcttttaattaattaagtcttcttttttaacggtaaaatgttttggtgctgcatttagataaataacacaaaacaattttaatgttttctctatgttatataaataggaataattgaagttttcttgttttttgtttgagacggagtcttgctctgtcacttaagctgaagtgcagtggtgagattatagctcactctagcctcaaactcctgggctcaagccatcctcccacttcagcctccgcagtagcttggactacaggcacgcaccaccatgcccagataattttttattatttttgtagagacagggtcttgctatgttgcctaggcttaaagtttttttaaaattaattccatgtcatctcaaagaatattagaggttttgctactgtcatcaaaatgcatgtcatgcagccagctcacacagaagttgtgtttattgtttctcaattcctggaatagattcttaaaacttctggtttttattacccaccttaatagttgaaatagaaatatctgtaggttagcaacctacttcaacaccaagcagataaagtttcttgatgggtaggacttctaagaacattttcattaactccagaccttttcgttaatttagttaattaatgtagagattgtaaaacactgagtatgactcagaaatcctttagaaaagaaagggtaaaatcagtgaagttccttcagaagagtagctgagttccctggcattgcagatccagttgagggagagtgatgggtacttaggaggggagaaaagactgagaatcaataaacaaaggatggagagcaaaaatgataattagatctcttttaggggtagaaagatatgctaatggtgtatgtaggaaatttctagaagggaatctctagaaattgtttttcggggttgagctagagatgttttgggggctgtttttcattttatattctgagggttttttttcaaacaaagcaaaaaaccataaatgtatttactttcatagtgaaaaaagaaaaactagttaaaaaaattcaaaacaaaacattttgggggtatatatgtttttgtattgttttatttttatatttgtgattaagagaatctgttaaatggtgagaagcaaagttttagttaattcctgttgcaaaacctttagacctctaatgagaattatttgaacaaagtacaaattacccctaagaggcgccatccagagataggaaaatggattgtgttttagtgtggcgtctgatcatcacttgctttgtcacaagctccatttttaacatcatctttatattagaggtttcttcattgatttgctagaagccacaagacatgacagccaactaatttttgagtattttgaaataatgtcagatttccctgtgtgagcgttgggtacaaaatgttacatgtcgattgtcacatccctttagaaaaaaatactttcgaaaagttcttctttaaagtgcccttttcttttctagccttttaagcttatttgtacactaaatatattttgaactaatagtgaacccatttcacattttatcctcaaatcataaggaccctaactggaaactggagcactgggaaccattccaggtgttaccacctggtgctgaagttaatcacctgggccagtatatccccagtgggggtgccttaaaaaaaaatcagtttcttggccgggcgcggtgggctcacgcctgtaatccctgcactttggaaggctgagttgatggatcatgaggtcaggatatcgagaccgtcctggccaacatggtgaaaccccgtctctactaaaatacaaaaattagccgggtgtgatggcgtgcacctgtagtcccagccactcaggaggctgaggcaggagaattgcttgaacccagaaggtggaggttgcagtgagctgaggtcgcgccactacattccagcctgggcgacagatcaagactccatctcaaaaaaaaaaaaaattagttcctttaattacttaaactagtagttcattcacatggctcagaaaactcagaggacaaaacctgtagagagagcctccctccacctagctcctcccaggtaaccactggaagtagtgctgtcttccagggtttatctgtattcaggcagacgctgttgactcttagttctctcttcccccttcctgcctttttcttcttaactgaggtagcatagtgtacacacagctgcatacgtttattgtcttcttacagttgtctaccattccattatgtgacctgtgccataattgctttaatcctctccccactggtggacatttaggttatttccagtcttgtcttctcacaaacagtgctttaatgaatagccttgtaaagttatgcggacaggcaaatctatggaacagattcatagaaatagaattagtggttaaaaggcatatgcatttatagttttgatcatagcaaattttccttcaagagcctgtgtgttggtagagtcttaaaatgtgaaaggcagcacatatattctccaggtatacattgctagatgtgttgcagatattctttttttttttgagacagagtcttgctttgtcgcccaggctggagtgcattggcacgatcttggctcactgcagcctccacctctcagattcaagtgattctggtgcctcagcctcctgggattacaggcatgcactaccatgccccgctaatttttgtatttttagtaaaggaggggttttgccatgttggccaggctggcctcgaacgcctgacctcaggtgacctgcctgccttggcctcccacagtgctgggattacaggtgtgaaccaccatgcccagccacggatattctttatcagcatagtctatgatgagtaacactaaggttgttcttcagcttgtgattctccatcatgttgtgcttctcagttgtttctgaattctctcattttatggtgtacctttttattattattttgagtcagggtctcactctgtcacccaggatggagtgcagtgacgtgatcttgactcactgtagcctccatctcctgggctcaagcagtcctcccacctcagcctcctgagcagctaggactatgggcatgtgccaccatgcctggctaatttttgtacttttttttgtagagaccgggtttcgctatgttgcccaggctggtcttgaactactggacccaagcagtccccctgcctcggcttcccaaagtgccaggattataggtgtgagccaacatacctggtactggcatactttttggacttaaggcattcattttctgtttgtggctctcaaatagcccacacgcctccacgcgttgtacatggactggcacttccaagtctgctttcacgtctggaatatgctctttccccctttcttgacttcttgttgccgcctgccagctacatctcacagcatttggggcaaaggacctggtctctggatgtctgtttgcttgttcttacaatatggctggggaatctgaggtggctgggaatctggggtctggggctgcttctgcaaaggctagctcctagctcagcccccacattcttcttcctccaggactgttcttggctggagaatcctctccctgtaagcagggtggataggcagctgactgtagcacctctccggggtctggtgcccctctcagctgtggtggtggtaaacaacccgtttttgctcccctgtcccagatgattgggctaacgtgcaggggctgctgggtcattactgtgttctggtggcagctggctgctatgacaggcaccttccattccacccttgtccccacccttcagggctgagggaagcagcacgcaaaccatgttgaggaaactaacgttgtcttggctgtctgggaatggcacttccctgtgactgctaagtgcaccaaataaaaatagacttggctgcatttccaggacagtttagggtcccaggtgacaaagaactttgaataaggactgtctagggttttttgtttttgtttttgttttgagacagaatcttgctctgtcacccaggctggagtgcagtggcgcgatctcggctcacggtagcctctgcctcccgagttcagcaattctccggtgtcaccctcctaggtagctaggattacaggcacccaccaccacgctcagctaatttttgtatttttagtagagatgaggtttcaccatgttggccagacgggtcttgatctcctgacctcaggtgatcttcctgcctgggcttcctaaaatactggaattacaggcatgagctactgtgcctggccctgtcttgcttgggttttttaaatggaaggtaaatagtaatcattcagcgaagcaggatgttttttgatacctgatacagagtacagccatcaagtgcatttgagaatgaataaaaaagctaaaattttataatcaattatgcaaaagtagattttaccttttccaggtagcactcttgaatattgtattaagtgcattttgataaatcagtatttcccttctgattcacattacagtttctaaggttctgtaatttttattgcagttagtttaacctgataccatagcttgatttatttccccttaattcaaactttgaagttcatcatgtttccatgttaaatgaacttactaagcacatttccgtgtaaaagagtccccctggatggacccttctgtgacatgaagaatatttgtcctgtaatttagctttcaaataagaggcaaactctgagcagaacttcagagggaaaggacactgagaaaagacagttccaaagaggcagggacggaagacagcaaggcaggcaggcaaagctggctgctctgccgtggggagcttcaagggaaaaacttcaagatggcaggagcccctcggtaggtacgaattcgatacagtgggaagggcgtcactttggtaggtatgtggatctgatacagtaggaagaaccccactagaatgtcgtatatgaagaatggacttcttggggaaggtcgttgttaatgtccacttaaatatcgttcatcatacaaaacacagcatatgacaggaaaacaagaaaacccaaattctaagctctagtataaatgtaagtgctgtgttgagggttttaagacaattcggtttattaaacccaaatttaataacccgagattgtgtcactgcactccagcctgggcgacagagcaagcctgcctaccgtagtgaggcccttcccaccgtatggaacttgtacctaccctggggctcctgccatcttggagcttttcccttgaagttccccacagcagagcagccatctctgcctgcctgtcttgctgtcttctgtccctgcctctttggagttgtcagtgtccttttcctctaaacttctgctcagagcctcttatttgaagcctttcctacttttgttcactgccttattccacttggctgtaaaatatgacatacgtgttaatttaagtttgtggcttggtgtccattggctgtcttcctcaattagagtacagtcctctggggaggccgacttctattctatctcaaacccagccggtcctgcaccgagtgagggcccctgagcagtgactcgcttccttctcctggggaggagagggtgggggctgccggccgagctctctggctcttcagcagatcagtgattctgaggaggggcaagacttactcaagataagatcactgttcagaatgaagtacaacctcattgttctgttctaattagggattggtgtgtctgcataaaagaagcctgaattacggaagattttagaaggaggttgctttaattatttcctaatagtcattgtaaaaaaaaaaaaaaaagttagatgtcttttgggaacttgtttaaatgcctagataaaaattacttacgatggcataaatattaataaaacagcttttctctttcttttttttttttttttttggtatagagagttgttccattatatttatttgcataatccccaagaactttcaaagcaaagtaacctttaattctactagaattgccacagatcagcagggatgagtttattagcaagtcactaccattgataagtggcggctgttgagcgcctgctctgtaccaaccctggagtgccaggttcttaaaggctttggctggttcagccctcataggtgccttgggagatgggattgggacagtgatagtaatgactaatattttttgagtccttactgcatgccaagctcagtgctaaatgctgtatggtttaattctttcatcaacgatcctgcgaagcaggtgctactgtcctttattttattttatttatttatttttttgggacagagttttgcccttgttgcccaggctggagtgcaatggcgcgatctcggctcactgcaacctcccagtgattctcctgcctcagcttcccgagtagctggggttataggcacctgccaccacgcccagctaattttttgtaattttcagtatttttagtagagacagggtttcaccatgttggctaggctggtttcgaactcctgaccataggtgacccacctgtctgcctcccaaagtgctgggattacaggcatgagccactgcacccagctgtccttccattttagagctaaggaggggtacacagggaggcagtagctgtggtgacagctgtgatctgaaccagggcttggttgagtactcttctcactacaccagactgcacttcctgtgtccgtagtgtctaattagtaatagatcagtaaacacaccgagagcgtagtgtggcctccaggtcatttaacaataataataacaacactgtgaatccttccaccactctctagattcctcatctctaggagtgaacttttccaggatgctttgcccttgctggatcaagttttttgtatgtagtttttttccttcaaattttgttttaattaacaaataaaaattgtatgtatttatcatatacaacatgatgttttgaaatatctatacattgtggattggctaaattgagccaattaacatgtgcattacctcttcctgtgtccgttaacttagaaattaaaaattctttttggagccacagtggcacatgccagcagtcttggctacttgggaggctgaggcaggaggattgcttgagtccaggagtttaggagtttgaggctacagtgagccatgatcacacttgtgaatggccactgcactccagcctgggcaacacagaccccatctcttaaaaaaaattccttttggaagtttttcgagggtaggtaaataggtgaataaaaatgtttagcttttgaaagatttaatagaagcatttgagtagtcagggctatagtacaagtctgaggatgtagggaaaaatcaggtttctcctatactcctttattcctatactcagtgtcaacagtcgacacagaacacctctgggaccagatttgtggagatgcccccagccacacacacacaccgagtaggcactcggtgctgcagcagacgccagctgacaggcagatggtgtcagatcccacggttgagggctcagtcctcaagactgcccccgccccccaccatttgcaagccccaagttgttttacctgtgcttctgactggctataaatggggttcccacaagcccctccttgggttcaattaatttactagagcggttgacagagctcaaggaaacatgtttactggttttttattgtaaaggatattatgaaggataccactgaatatcaggtgatagggcaaggcgtgtgagagggccatgtagcctttttgccccgtccaggtgtgccactcttcaggaacctccatgtgttcagctatctggaagctctctgaaccctgtacttgtgagtttttatggaggcttcattacataggcatgattgattaaaccattggccgttggtgatcaacttaagctttagtatctctcccttccctggaaattaaggatgggctgaaagtcccagtcctctaatcagtcatgccttggtcttcctggtgaccagctcctgtccgaagctacctaggagctgccagccatcagtcaattcgtgagcatacgaaaagacattactggttgggtgtggtggctcacacctataatcccagcaatttgtgaggccgaggcggatggatcacctgaggttgggagttctagaccattctggccaacatggtgaaaccccgtctctgctgaaaatacaaaaaattagccgggtgtggtggtatgcgcctgtaatcccagctacttgggaggctgaggcagaagaattgtttgaatccgggaagtagaggctgcagtgagccaagatcgtgccactgcactctagcctaggcgacagagccaaaaaaaaataaaaataaaaaaataaaaaataaaaattctattttggagattccaaggattttaggagttgtatgccaggagacagggtggaagaccaaatacatagtcacagtattacaaaagtaatgcaaaagacaatctaaagaaaccatgaaaaaaaaatctaaagaaaggagacctttttcacaggaaatagggatgtgagagagaaattaggagtgggtgaggaagagaaaatatgtgtgggagggaaagcagagaagtatgaacacatcacaaaacagcatctgaactcttacatgcttatttcttacactactgttgctcatcctacattatgccatttaatctgtgtatcaattctagggttggggttcattgatgctgagtttgtagccaaagagtgaaatatacttgggtggtcccctaaaaggtaaagagggcaataggaaaaagtcttaaagagaaagatgacccagtgtaatatttctagagaattcgttattgtttctgttttcagaaagtagtagtaaacattaagattactgctttatatctttgactagacaagcagcttgttgatactgtgtatcctctataatgtgagcactcattcagcacgtgggtttattgagtgcctagtacatacgaagcattttatgctaggcactgagtagataagcaagacaggatccctgctttcagggagcttacagccccacgcacgttataacgtgaaattgttagcataattttaacgcattgtgtctgtaggagcataaaagagttcttatttccaggagaaggtgtgatagaccagtcctgtcagtacaaataatctggggctccaagtggaattcaaagaagaaaataaggtattatggaagaggaggctgtagaaaacctgaagaaaggtgtgttttgtggatactttggctgatggctttgaaatttttttcagatgaggctgttttcaaatgttattggctgcacagattgatttagccacccacctggtgtttgattctagtagttcattccttgcttaaggtgaaatgctgatttctgatcatcattattaagaatggatcctggaacagatgtaggtaccatttgtctttcagtgtttaggagtgatccccacctaacagtctgcatgcagaccaccggcttgggtttcctagtatagaagtgaatgtcctctgtaccttgcttggtaaacagttgcctttcctgaggctggctgagtttggctgtaactttctccttcctaagtccctactattttcctcattcctcactgggtcttcccagcctcgtatgagtgtgatagaaatggggaaatgtgtagcctctcttttctctcatttcagcttaatgaaaggggtagcctcctggttggcagccaggaagctgcaaaagggaaaattcctttccctagctatggaagtatgacaggcagtgttcgctatttgatatcggctggtgaagtttccttgaggtgcaaatgctctgggtgcagggtgcccacagtctccttttctttgcattctcccgggccccctggtaacggtcagagagaagagggcttacctgggactggatcgctgtcaatcgtgaaccttaggaacttccgatgatacagattgctcttgcttaacccatgtgttgggacactttggtgtgtagaaagcaaagctgtgttgtgttgcaatatcctggcctgcctccttcactcccctttgtcagttttgctgaactagggaatatggaaatgtggtgacagtggtaaacagaagggtgatggtacgactacgtgtgcgccctatcttgccttttaaaaagccacacctgtatatttggttttacacatattcatatggtgaattacagaagaagaatttgtctaactctgccttcacccaaacagctggtatatgtatttggactgaaataggatgaaaaagtggtcacggtggtcagagtgtagcagaccagtgaaaaacaaaaacactagcccaggacataagccctgcttacaactttgaaacttgcctgtgaatttgataagaactagaataaaccataaatgaaaactgatagctctgagagtggcaggatgatgggtgaagtttttaactctggggcgttggtacccttgttttacaggtgagggtatgaagatgcagagatgaagcagtttgcctaaggatgcaggatttcaactcctgtgctcagcttccagctgttctgttcccattgttctacactgaggccagccctgccctgggtttcactaagtactctctgagtttatctgctcttctgtggcctggcctccctctcctaggaagagtgcttagggatgttcaaaatagccagttaggtcgccttttgcagatttttccaaacttaaatataaaatatttggcccttgtttgcttctgggttacagtgcttgacacggtctcttcatcctcgccctggacagaaaggaaggagagctgatctctaatggtaatggctccagttcctggtttagatgaagtttcattttcatgctcatcagttaaggaacactgcatttttaaaagtagttattttgggctgcagtggctcatgcctgtaatcccagtgctttgggagactgaagtaggagtatttcttgaggccaggagtttgagaccagcctgggcaacatagcaagaccccatctctacaaaaaaaaatttttttaattagctggcaagcctgggaaacatggcgaaaccctgtctctccaaaacagtacaaaaatcaggtgggtgttttggtgcagggcggaagctgcattgagcctgcaacttcactgcactccagcctgggtgccggagcaagaccctgtcaaaataattatttaattaattcattaattaaaaataaaataaaaaatgagctgtttgtggtggggcacacctgtggtcccagctatagggggctgaagcgggagaattggttgagtccaggagtttgaggatacagtgagctgtgattgtgccattgcacagaggtgacagagcaagaccctatctctaaaacataaaataaaaaataaaatgttgttatttgggggggtacatattttcttttttccttttatttgtagttgacatgtgattgtatatattaaggggttacagaatattttgtaacatgcatgcaatgcataatgagcaaatcatagtaattaggatatctaccacctcaaacgtttatcatttgggttggacaaaaatatttattaaggagtaccgagtaaatttgtgtgtgcaggtggacaaagcctggagggcaacaaacaaaacagtagttatgatagagaggactttttaatacatatttaataaatattgtacagtttgtgtctggacacctcagtgaatctccaaatttaggatagcaaaatagcgtaaaaactatggattggaaccctcagaagcatgttgagacctatttcaccaggtacaggccctgtgccctcatggaactgtctgctgtatccgggatcagattcctttctcttcaaaatgacatgccctgtaaccatgaggaggtaccccaaattgaaggaccttctacaataacaactggcctctattcttcaaaaatgtcagttatggccgggtgcaatggctcacgcctgtaatcctagcactttgggaggcttaggcgggcggatcacctgaggtcagaagttcgaaaccagcctggccaacgtggcgaaaccccgtctctactaaaaatacaaacgttagccgggtgcggtggtgcacgcctgtaatcccagctattctggctgaggttggagaattgcttgaacccgggaggcaaaggttgcagtgagcctggatcgtgccactgcactccatctagcgtgggcaacagagcaagactctgtctaataaacaaataagaataaaatgtcacttacgaaagacaaaggccagggaacctttgatcctttttcgattaaacaaggtgacaaagacatgacaattaaatgcaccatgatcctgaattagatcttggatcttgtaatctcatggctataggacatgtcattttgaagagacagatgtgtgataaagatcattattgggacaaccagcaaaatttgagtaagggcagtatattcagtattgtatcagtgttacatttcctgagttgcacatgcatactgtgattatgtaagaggatgttgttaggagatacgtactgaagtacttaggagaacagtgttatttcgtctgcaacttactctcagtctcggtttttcttcaaaaactgttacatgcatgtacacactcctaaatcacatctcattccttacagacaggtgggaagataacaagtgtgtgttagacgtggttttctagactgacaagagggactggtctgttctgcaggggcagcccaaagaaagtcttcatagttgctgtgtttaatctgagtgggaactgaggtgagttttagaatgagagattcaagaagaaagattcccaatgcctgtgccagctctcagtgttgtggctggaaagtagggggcatctggtgttgtcctgtaaaggaaggccaagaagatagcctcacgtgccatgagaaggtgtttgaacttcttccatagacatgatgggtctgttagggttagggtgaggttaaactccagctaaaatggcttaagtgatagtaagtgtattttctcacataacatgaagtttgaaggtggggaagtactagggttgcatcactcagcagttcagagatgatctccccaccccaggtgtttatgtttttggctacagccatccttagcatgcaagtggtgtctgctctcctggctacagggtgattgtcacctgcccatgacgagatctggtgaagaagaggagggagatttctttctgagcatccattgctgtgaggaaggaacaccttttccacaatggtcctggttcagtgtaccttcagattcccttagctgagattgtgtcacttgcaaaggggaacgtgatcgtggtggtgggcttatctggttactctccctcctgtggccagggaacgttcctcagaggaacctcccaggcagccacttcagatcatgtgggtgttgccagcagcatggggccaggggtattgggtgagcagacattagggtctgccaccatgcagaaaaaaggttttaattttcttttctttttcgtgtgtgtgtgtgtgtgtgtgtttgtttgtttgtttgtttgtttttgagacggagtttcgctcttgttgcccaggctggagtgcaatggcgatatctcagttcactgcaacttccacctcccaggttcaagcgactctcctgcctcagcctctcgagtagctgcaattacaggcgcctgccaccacgcccagctcatttttgtgtttttagtagagatagggcttcgccatattagccaggctggtcttgaactcctgacctcagatcgtctgcctgccttggcctcccaaagtgctgggattacaggcatgagctaccgtgcctggccgatgtatggtgttttttgtttgtttgtttttttgagatggagtctcactctgtttcccaggctgtcatccaggctggagtgcagtggcgcaatcttggctcactgcaagctctgcctcctgggttcacgccattctcctgcctcagcctccagagtagctgggactacaggtgcctgccaccacacctggctgattttttatatttttagtagagacagggtttcaccgtgttagccaggatggtctcaatctcctgacctcgtgatccgcctaccttggcctcccaaagtgctgggattacaggcgtgagccaccgcacccggcctgatgttttaaagtattatacagccgcttattaaacctcctgttatggatagcagtaataataatagacagtacttagcatttaccacccataggcactgtttgttctcagtcgtgttttacacttacttattcatttggtcctcacaacagcgttatgaggtgtaggggccattgttacccctagtttccagatgaggaaactgaggcaaagaaaggctgagtaacctaccaaggtcacatcactaatgaatagggagctggaggcagagctggtgtccagtgtgggcagccccagtatagagtctgtaaccactaggaaaaactgcctctgggtattttttgtgctttttttttttttttggatgctacagataatactaagatgaacatatttctacatacttcttccttgcacatacatgaatagcctggccgttgtgggttagagtgcgtgggaaatgagagggtagagatgacatgtgtagaccacgcttcagagaaaagttactttgaaagggaccagaaaaagggttgttttagttcccatttgtttccttatcaggaaagacggattattttgtttagtgttttatttccctttggggtgaagacctgcttatgtcttttgtccatttatagtcgggagtcactgtgcttctcatcttcctgtatgattgacatttacccctttcatatactacaaatacttttaggctcttatttttaactctttgtagtttctgtgtatgtctttattatcatttgctgcagcttcaacacttttaagaaatcactgatttcattttgcgttaaagctagtttacttcttgtattttaacttttaaataatgtaatcggccgggcacggtggctcacacctgtaatcccagcactttgggaggctgaggcctcccatggatcatgaggtcaggagatcgagaccatcctggctaatacggtgaaaccccgtctctactaaaaatacaaaaaattagccgggcatggtggtgggcgcctataatcccagctacttgggaggctgaggcaggacagtggcgtgaacccgggaggcggaccttgcagtgagccgagatcacgccactgcactccatccagcctgggccgcagagcgagactctgtctcaaaaaaaaaaaaaaaaaaaaaaaaacaaatttaagattggctttactgtcctcaaattgctgttcatctaagtcaatgcccagttactttgttacacacatacattcttttttttttttttttttttttttttttttttttttttttgagatggagtctcgctgttgcccaggttggagtgcagtggcacgatctcagctcactgcaagctccgcctcccaggttcacgccattctcctgcctaagcctcctgagtagctgggattacaggcgcccgccaccatgcccggctaatgttttgtctttttttttttttttttttgagacggagtctcgctctgtcgcccaggtcggactgcggactgcagtggcgcaatctcggctcactgcaagctccgcttcccgggttcacgccattctcctgcctcagcctcccgagtagctgggactacaggcgcccgccaccgcgcccggctaattttttgtctttttactagagacggggtttcaccgtgttagccaggatggtctcgctctcctgacctcgtgatccgcctgcctcagcctcccaaagtgctgggattacaggcttgagccaccatgcccggccacacatacattcttaaaagcattttaaaattataattcagtgaatttggagtcttcccattgttttcttttaatttgtatatctgagtttgccctcaacaccacactatttaattattgttttagaatatgataaatatagtagggctgtccttctcatctctgtttaacttttctgtcttcagaatttgaagggtattttttctttattttcccaaacaaacttgtaaatcattttgacattactctttttttttttttttttttaattttttttttttttttgagacggtgtttcggtcttgttgcccaggctggagtgcaatggcgtgatcttggctcaccgcatcctccacctcccgggttcaagctattctcctgccttagcctcccgagtagctgggattacaggcatgcgctaccacacccagctaatgacatgactcttaagacatgctagtgttcgtgctgaatgccccattaggttaagatcatagaaacgtggcagttggagagctgtaaaggttgcttagtttctcatttccatttctgtttaatttctagattttggatcattgtttgacttggaaaatgatcttcctgatgagctgatacccaatggaggagaattaggccttttaaacagtgggaaccttgttccagatgctgcttccaaacataaacaactgtcggagcttctacgaggaggcagcggctctagtatcaacccaggaataggaaatgtgagcgccagcagccccgtgcagcagggcctgggtggccaggctcaagggcagccgaacagtgctaacatggccagcctcagtgccatgggcaagagccctctgagccagggagattcttcagcccccagcctgcctaaacaggcagccagcacctctgggcccacccccgctgcctcccaagcactgaatccgcaagcacaaaagcaagtggggctggcgactagcagccctgccacgtcacagactggacctggtatctgcatgaatgctaactttaaccagacccacccaggcctcctcaatagtaactctggccatagcttaattaatcaggcttcacaagggcaggcgcaagtcatgaatggatctcttggggctgctggcagaggaaggggagctggaatgccgtaccctactccagccatgcagggcgcctcgagcagcgtgctggctgagaccctaacgcaggtttccccgcaaatgactggtcacgcgggactgaacaccgcacaggcaggaggcatggccaaggtaagtgaactgaagcactttcaatacttcctacctaaccgcgggctttccctccgagtaatgcgtaaaatgggaccacgtggcccactcctgtttttcctcttgggctctccacgtgccactcatgcttggaagagacagatttctttctaggataaagatctctgccccatttctgtctttaaaatgagaattcttaaagaagtaggacagcttgcaggtcaggcagttggaaagtacagggcctaatgtgtccgtgaacctggtagaggttgctttctgcctgtgtactgcccactgaggaggtgatcactggtctgtatgctcctctgtggccatccagtgaagtatctgttggcacagtatccatttcactgaatgagaaagctgtgttccagggttgtcagctcactccctgctatgttaacaaggaagaggtggcagagccggggagaagcacaggcattcgggtcccagaggaaacaccagtgcagtggttcttcaagtggggtcccctggaccagcagcagcagcagcatcccctagaagcttgttagaaatgcagacttctttattgactcagaagctcggcgtggggcctgggctttaagaagcctccagatgggtgctggacacagtgactcacgcctgtgatcccagcactttgggaggccaaggtgggtggatagctcaactctaggagtttgagaccagcctgggcaatgtggcgaaaccctgtctcttggaaaaaaaaaaaaaaaaaaaaaaaaagcagcagcctccaggtggctccaaggtcacgcacatcacacacacacacacacacacacacacacacacacacacacacacacacacacacacacacacacacacacacacacacacacacacacacacacacacacacacacacacggccaagagctctgctagggaaaggcctggactgggatttgcagccaccagccttgcagctgccttctagagtaggaactggacttggagaagggggaaggcagatgcctggatagatgtgagacagctggaaaagcccaggactgacaggagcacagagaaggaagggcagcctattcccactgaagtgacaaacactgtggatgctctgcggccagaggcttctcaacagcagccaccaggcacgtcttcaggcagtggaattcagcacatcccagaacagaaaatcagtttgggctgttctttggatttgtttagtcccaagtaggggtgagggagaataagagtagaacacagtttccccagaaggttgatgagagcgttgggtgacggatgcaaaaccctgtgaatgtcggaaacgagaggatttttttttaacttaagaaatgaagatgaagtaatgctcaatgtttaaattgcatttgtcttttttgaaatgttagtagagaggaacgtgaacttaagttttacttgtacctggcattttaagaagagtctgtatgagtgtgtcaattgagaaggaatttctcatgggtttatggttcctggagagattgatccttgttccttttcccagttcattcatcactctactccttacttttaaaactctgtctattctggagagtttaaatcatatgaagtcgacataatagtataaagcaatgattcccaaacttttttttaatctcaagactcctgaataatcttaacaattactgaggaccccaaagagatttctttaacatgtgcagtatacctctcaatatttactatattaaatagtaaaacagaatattgaaacacatttcatcatccgtccagtgcagtggaatcacacatcacaaagtaactagaaaactagatctactgtgttcttgggagagaatcagagggaaaaggcaaatcatatcttaggattttatggaaatagttttgacatcatggtccccctgaaaggtctgggaccctggactgcacttcaagagcttttgataacatgtatgtagaagttagactttgtacacctaaacacaaagccattatcacatgttaacagatttaacagtaacttcatgtcagccagtatccacagaatagtcacgtttccagtggtctcatatgttgtaattttttttttttttttctgagatggagtttcactgttgcccagtgtctggagtgcagtggcaccatctgggctcactgcaacctccgcctcctgggttcaagtgattgtcctgcctcagcctcctgagtagctgggattacaggcgcgtgccactgctcccggctaactttttatatttttattagagacggagtttcaccatgttggccaagctggtctcgaactcctgacctcaagcgagccacctgcctctgcctcccaaaatgctgggattacaggcgtgagccaccacgcccggcctataagtagtttttatagatttttactcaaaatctacatttcagttagttgatatgcctcttaagaatctgttctctgttggtctgtgggatccttacaatttactgaagaaacatgttttggttgttgtctgctatttatcctggagagtgtcttccagaagttggactttgctgattacacctgtaacacttcatgcttctctgtccacccaggcttttcattccatcctggggttcctttatacagagtggtctttctttccaacagcaactcgtggatgtcactggaaagtgagcctcgttagcgtgctggggacagttgtctcttgtttcctataggtatctcaaagcagcccactagaggtggatagagtgcatttttttaaagatgtgtcgttgcctttgggtggaatgaaagaccaagtagtggtgggcagaaagtaagagggagagacaagtccattttaaaccattccctctctagaaccttacgatagcagagccaactag

SEQ ID NO: 635 - DNA, 5327 bp, Homo sapiens
  source 1..5327: mol_type = other DNA
gaccggctccgcgcattggcccgccccgtgcgctggcctgtcccgcgcattggccaagcggccgggaggacgggcccggcggccgtgcacttccggccggtggccggcccggcgcgcaccgccccttccgccgtcgcccagcgagcccagctccggtcccagccccggccgtcccggcgtcgcttcggagcgcggcggcagctgactgcgccttcacgatccgctgggacccgcgagccccgccgccgttatgaacatccgcaatgcgagggtgagcgcccggggcgggaggctgtccgcgccgcgtgggcgccgggccgggtggctgccgcgcatgctcccgagggccccggccgagcccggcccggtggccctgagtgtgcctgcggccgctggacctatggggctggcccagcccgccgaagaggccggggcgcggggccggggctgcgattccctcctgtttgcgtgatgtcgggcctccgttgggtgggctccggggacctccggggcgcccactcctgttcctgtgctccgggcgttgtgcaaagtcagatcgtcacagtgcctgcccagccccgagggagcggggccgagcagaccgacggggagcaggcttctcacccgtggtcaccgccgccttagactgagcgcgttccactgccctccttccctgcagccagaggacctaatgaacatgcagcactgcaacctcctctgcctgcccgagaactaccagatgaaatactacttctaccatggcctttcctggccccaggtgggcagcttctgaatttgggcatgggggaaagcaggccgaggaaaatcccatctggccatcttggagggagtggacaagtctgtcagagcccagggggctgtatggtcggtggcgtcctgggtgttttcagctggcagacaggggcaaaggaaaagaaggcgcccgaagggagcagagaataggggcaggatccccactttgcgtcttctttctgggtatgggcagggcacagtgtggcgagggggagaccaagccactcagcccggaggtcatgagccatcacacaactcgccactcgtccagtttgtgtccctctaaagggctcttctagctccgacaagaagttttctcactctgttttcctgtcaccagctctcttacattgctgaggacgagaatgggaagattgtggggtatgtcctggccaaaatgtgagtcaccaaggaggaagacagaagctacacgtgtctggtggatgcctctgtgggctttaaaaaaaatgaataggcttcttcttttcagtacagttgaaagtttatagaaaaattgaacagaaaggacatggagttcttatagcacccctcagcatcccctccctgccagcttcctctgttagtagcatgttggatttgtgtggtccacttgtgacaagtgataaatgaatgtgatatgttactattattattattactattattatttgagacggagtcttgccctgtcgcccaggctggagtgcagtcgcgtgatcttggctcactgcaacctccaccccctgggttcaagcgattctcctgcctcagcctccttagtagctgggattacaggcacatgccaccacacctggctaatttttgtatatttcagtagcaatggggtttcactacgttggccaggctggtctcgaattcctgacctcaggtgtttccacccacctctgtctcccaaagtgctaggattacaggcgtgagccactgcgcctggccgatatattattattaactaaacccatagtttacattactgcacttctctttgtgttgtaagccccatggttttgaccaaatgacatgtgtccaccttcatattatcgcaggatagtttcactgtgttccacgcattcatccctccctctccttaacccgtggcaaccactgattttttactgtttgcatggttttgccttttccaggatgtcacagagttggaatcatactatatacagctttttcaggctggctttttttcacttagtaatacacatttaagcttctgccttgtctttgcgtgggttgacagctcatttctttttttattttttgagacagggtctcgctctgttgcccaggctggagtgcagtggcatgatcatggctcactgcagcctcaacctcccaggctcaagtgatcctctcatgtctgcctcccaagtagctgggaccacaggcatgcgccaccacatccagctaattttttgattttttttttgtagagacaaaaaaaagtgttgtccaggctggtctcgaactcctgggctcaagcagtcctcttgccccggcctgccaagtagctggaactataggcgtgtgccccacacccggcaggcttggggttttcaggcagcagagggtggcaggatcggctgctctgatccaagaggctcccggctctcccccagctggggtcttagggggctgtagtgcatgtccactctacaaatggcaggggggctggaggtggctgtgcctacactgagctcctttgcagcctctcctttctccctctccagggaagaggacccagatgatgtgccccatggacatatcacctcattggtatgtaaggtccacccaggctctctggtgggggtggaagtgggggttagttggggcagccctcaaggtcccagtccctcaccccatctctgctcttctcccaccaggctgtgaagcgttcccaccggcgcctcggtctggctcagaaactgatggaccaggcctctcgagccatgatagagaacttcaatgccaaatatgtctccctgcatgtcaggaagaggtggaagccgggctgagggaagggggattgagggggagagatactgccttgacgggggtcctggggtacctcagcttttggtgaagatccaggaagtgggattggggggaaggagggaccaggaggaggggcaagacctggacgtgctacccctccctggccaaatccgtgcagctcagcagtgccttgttcccctgcagtaaccgggccgccctgcacctctattccaacaccctcaactttcagtaagtagatctcgatttttctaatgggctggggttgatcccaggtctggcccatcagggcacctgagaccggctgagttgccttccaggtcgggggtgggccggctgtggggaagaggctgtggaccccagcactgccaggatacctccacattcactcggcggctgatggttgaaaagccggcatggagacagcacctgcctgctgaaacgtgctccatgtgttgtgatggaggagctctggcccatgatggctgaggctggcgaagggcacacgggctgtttagtaatgtttgggaatagagaggtgtgggtccctggcgtgagcagatgctgaggagcaggactcaagcatgaccaagcacctagaagaatccaagagagagcagaatcgaggagaatgcacattcaggaaggaagggccagtggccaggcagcctagtggatgggggaggtctgcctgaggaccaggaggccccgtgtgcctagcacactagagagaacctggcagttggcatgcccagtagacagtggaaaaaagtgcttgcaagtgaagctggggtgggctgcctgtggagggacactaactgcactcagcccgtttggtaggggatgaagaagagggactgttgggaagggcggtggcctctgggctggatgctggcaagagggatctgtgacccagatgacgatgtctggtgggaattgctttatagctaagtcagcaatcctcatgtcttaggcctggcagggccagcctaggccattgagtccagctccccttccagggacatggccacgcgagtctgcacacacacctgcccagtgtagtcacggccccagagctgctcaggcagggctcaccgtctttcctgggttctgatggctgttgtgaggcagctcagtaagggacagggcgcagggcagggagggaaggggaaggctgaattcagggcttcagctcacaagaaaccgcagaaatggatccttagtatccaggctaaggacacagaacgggggcaggacgggtggggcgggccgctgtgtcctggagcctttgctggagagaacagagggcaggtcacactggacttgttgtctcaggatggagccttcagggagaaaacatggcaccttgctccagtagccacgataccaggagtggaggagggtgtccccgggatacaggtcttcctccttgctctctaaccctctgcccccaggatcagtgaagtggagcccaaatactatgcagatggggaggacgcctatgccatgaagcgggacctcactcagatggccgacgaggtaagcgcctgcatgaagccaagcaaggcgagcgggggcggcactcaggagccccaagacagtggctgcaggcgagaccgactttggatgccagctcttgtggctacgttgccaggagtcacgacctcagtttcctaggctgggctttagaggaggccatctgcctagcagcctggagggtgatgggagaggcagagggaggaggcttttagaagggaagtggggaggtctagggaccagtgggtggcctgcctgctcaaaggtagttctgagtcagggttctgcccaaggctcatcgggtggcagggctggtcaaggggcagcgctctgtcgtgggggcctccatggtagtcggtaagcccaggtagcggtggactggggctccagccaggtgtccccactcagtcccgcgtgtcctgcctagccctgctgcctcactatgcccctctcctcagccagcgacagggccaggctccctttgtctggaaacttaggccctgtctctttgcccccgcttctccctgggttcctggtggcagctgaggcggcacctggagctgaaagagaagggcaggcacgtggtgctgggtgccatcgagaacaaggtggagagcaaaggcaattcacctccgagctcaggagaggcctgtcgcgaggagaagggcctggctgccgaggatagtggtggggacagcaaggacctcagcgaggtcagcgagaccacagagagcacagatgtcaaggacagctcagaggcctccgactcagcctcctagagcctgccccatcccctcctcaccccacgagctttcacaataaattcgctccgtggcactggggaactttgtgtgtgagcgcgcgcacatttagagggtgtgtttctccaggtcctctggtggggatgtgagccttggccttttgacccagagcatcct

SEQ ID NO: 636 - DNA, 32744 bp, Homo sapiens
  source 1..32744: mol_type = other DNA
gctgacgacgcatgcgccgggagggggcgcaatcacggactcggcttgcggctgccggtttaaaaaaggaaaccccggagagcgagagcgcgaaggaaatctggccgccgccgccgcgagcgctcccggtgagaggcgcccgcccggtgggcccagggcctgccgagtgccggttggcttccttggcggcgcatgcgcgctcctgggctggtggaggaggggaagggaagggagggggaggaggagctggccacaggagcggcgaatttttgggggggtgggtggggggcgccactcacagccccaggtgctgctggaggtgggagccgcggcgcctcctggacacaggcggggtagtggttccgagtcaccgcagcgggagacctgggtgggggagggaagaagccggagccgccgcaagccacacggtgagggcgcggggaaggggagggagcggggggcggcgtgtgtggggccggggggcggcggccaagggtggggaaggcgggagctgaagcccaagtttggcgtgtcgttctagtgtgtcttttcccgggacttcgggccgaggcccgccctgcctgagaggccctctggggcagctggggttacctgcggggcaggggcgggagtggggtgcacggcggggccgggcggcttgagggcgcccggagctgcggccgattccagcagctgggaggcggggaaagacggggaccgggtgccgagagagctttcgctggggacccgctaggccttgtgacccactttattcctgtcaccactcgggcacgtttggagcagcgcccaatggggcgccggggcggccagctcctccggggaacccccgccctcccggcgcccggcccgcgtgccgcagtccgcagtccgaacggccgccgttgccggccgcgggctggttccgttagtggtggtggttccggggttccgttcctaggcagcgcgcggctattagcgtctgactccagcgaccgcgcgcgggttcgagggttggcggcgaggcgctcggtttctcttcttccgtccacccgcgcttcccgttccccgtcaccgccgctggcgtttgtagatttctttccgccagtgaagctgggttttctggagttggctctggcgctctggcccctggagtgtaatttcctacacgcagcgccgcagagtttatattctttgaaagtgtttgtagctttgtagaggtcctcttgttgatggtaggtgagcctaattctgcaagataaaagcctagtctctgacctggcagatgaaagatcaaatcagattgtggtttcctgctattagaatgccgtgctattagactttaaggctttttagccttctttaaaaaataaaaaaatttttacagtggaagaaaagcacaagaagtaaacttttacagtcgttgatttgactataacgctgatccccccaaatcaaaggtaatttcactttgaagattgcgttctgatttgtagctttaagcgattagagaaaattgtgcaatattcccctctacctgtttgaaaataaacattcttaaaaggatgtaatttagataatgaattgctttctctgaaacttatcccttgggacacctcaaatctgattggttttcaaagcttgggggaaggaaattaattcctgtgataagtggttggctgaacagaatgtcttgaaaggttagcctgtagcattaggagaaatacctaatgtaaacgacgagttaatgggtgcagcacaccagcgtggcacatttatacatatgtgacaaacctgcacgttgtgcacatgtaccctagaacttaaagtataataataaaaaaagtaaaaaaaaaaaaagttagcctgaagaaagcagactgaaaatgttctaaagctaggcgtaatcagttatgaaaaaagaataaggaagctttctacgtactaacatgcaaagattgcaaaaatttgctatgaagtgaaaaaagcaaggtgtagcggtactttgtgaatagtgtgttacatcttaagggcgaggtgtaataatacaagtttatgtttgctctttatataaagaaattatgggaggatttagaaaactaacaatagaggagagggagaaatagtctgagggaatggtgggaaatgagatgtattatgtgtatgtcttcatgttttcaaatttttgtgtgtattatggactcataaactggattaaacaaaaatcctcctcccccaaataatttgtgtgatttttgttgcctaatttatggtgatttgagtcattttcaatatgattgcttttcatattttttaggaaaatcaactaaaaaggaagtttgggataccttttatgactatttacactttaatttttaagattgcagaggtcacaggcatttatcttttaaagatgtttagttatatcttgccttgctaaaatatatgactgtttacatttggcattatggctggattatgctgctttcagagtgtagtttgtgtttccccctcctctttttttcaggagtcatagatgggtaaaattttacttaaccccaaagtttcatgacaaacaattatgaggaggatgtgaacattcccttaaagtgctagtaaacttgattgtctaggttagtttgcttttcaggttgggaaacttttctttcttttgaggaaatcaaacatgaaccccagtgaaaggtaaattggggtgtgtgtgtgtgtgtgtgtgtgtgtgtgtgtgtctggttgtttctcatgaaagtgtacaaaatgaacatttttttaggactggattgttgaaaacctgtttaatgaggttaagactgcacaggcagctgttagatgagatataattttgggaggggaccctcaaactccccctggtgactaatattgtgtaatgaaagtagtgaatagtgagtaatggattgcagttgctgtgggcatttttgtaatattaccagtattcctttttattttgtaggataggatacttatattatttctgtttgatatgtaggtttttctaatagacttctgcaaagtgtcacttatttttcatttgaattccatgtgggtccgttcaatcttttttaaaaatggaattacatttcaattttttttttttttggagacggagtcttgctctgtcaccaggccggagtgcagtggcacgatcttggctcactgcaacctccggctcccaggttcaagagattctcctgcctcagcctcccgagtagctgggactcttatttttaaaattacagaagtaaattgatgctcataaaaagttaatacagtgtatatataataagtgacaacccctttacatccacttctagctcacattcctccccagaggaatctagggagcacagctactcgtatacccttgactgaagggtaacactgttaacaccactgtatgatcttgtagatctttttctgtgcatttgcaaatatgttcttttcagccttgaaaacggaatcatcttgaatgatcatctgctttgccattttgcctccagtatgggctctgttattacctacaggacagggacatgacttggagcctgtcagaaagcttaacatctgatatagaccataggtcatactcatcttttcactagtgaggggccaattgttatggaggcatttgcagagtttgaagggaggtcatactgatgtgagttttatctggtatagatttaattcactgtaaacttcgagcggccgaggtgggagaatggcttgagcccaggatttcaggaccagcctgggcaacatagtgagacctctttgctacaaaatttttttaaaaaaaattagccagatggggtggtgcacaccgtagtttcagctaattgggaggctgaggtggagggatcacttgaacccaggagttcagccttggtgacagagtgacaccctgttttaaacaaaacaaacccaaaaggtgcttggattccatgaattttataggactctttagagtccaagttttagggttttctttggcttttgacttgatcgatagtgtatgggttaaactttgattttttttccttctgtacttgcttgcagactcctacgaaagcctcgtagattacaccagcctcttgagctcctctgaagtgaacctaagcagactgtccttaactaagggacactgatactgacttggataaaatttagcttttgaagggaaaaggagagaagaggctctttggtttggcttttgcttaactgacaacaaacaactaatatgcactaccctctcctccatccatccctctggttctctaatagttccagagggtttgttttaaaccaggttacaaagaattaccaaaccttaattctttttagctgatggagtttgcaaaaagttcagagtattgatcaagactatttactatgggagatacctagaaagatgcagtataattgaccctgccttcagtggttttgaaatctagtatggttaaaacagcatagacattaataataataataataataatattattattattattattattattattattattatttgagacagagtctctctctgtcacccgggctggagtgcagtggcgtgatctcagctcactgcaacctccgcctccttggttcaagcgattctcctgccttagccctccaagagtagctgggattacaggtatctgccaccacacccggctaatttttgtatttttagtagacaacggtgtttctccatgttggccgggctggtctcaaactgctgacctcaggtgatccgcccacctcggcctcccaaagtgctgggattacaggcatgagccaccatgcccaactgaaaagcatagacattataacacaaggtggaaaatgatagattttataagaaaattacatacaacatttgtaaggatgagcctatttctggctgttttttttttttttggtggggggagaggcatgggattttgagggagaatacgtatcttaaccttttaattagttaagaaaggaaacttagatcttagctcttgataacgtaaggagttgttatgttcttttagcaggcatctgtgagactgatagctatttcagtagttttttttaagctttcccgctggaaagaaccatttgatgttttatttgataattataatacagcctctttaatcatttcaggattgctagaaaaattaggaaattaaatcctatcagttaactgttgtctaccatcaaatatgtcagccagtgttaatattaaaagaaaattgtttcctcttatctcaatcttgaagcatatatattatgtcacctcttccacacatttttacttctagtgctgtgtcaaataaagcatttatttactgtgactattttaataaaacaatattgtgggggaaaagtcaaagttctgcactgtagctaaaccttttgatgtttatctgtttccttatagttttttacagatgcataaagtaaaatattttttaagttccttgtaggcattacaccaatggctgttgcattttctccttttctggatcaaaaattctagatggagttgtatgaattatttatagaacactcaagtgtcagagcaatataattgttactaattgactataattacataatggcatttatatttacaggttgctttacaaccatttattaaaagccctattaggtgtaacttctgtgaaacaggtggataccgagattcctgtttttttccatttttttgattatgcaaatgttgaattatttaaacttactcttatagcctcaactctgagttattactttagttggatatttcacagagatgtaattctgttaattttaagtcttagaagtctacagaaatcacttgtgaaaaatgaaattttatgaattactttgtcttttaaagtatgctgtttcggatataatttgcttttcatttttcagaaacattttcattttttacattaataatgacgacgattaagtttctttttcaaagaggtcacattcaggtacttaacatttttaattctcatcccaaatagtggaaaattgaatgtgagggctatctggctgtgacatgttaccccattgatccccagggttgattcagctcatctggctggctcggcaggtgtccccttcctccctctccactccacgtgcgtccctcctgaagctgaagctgcgtgcttggttgaagaggacaaccatcccaaatagaggaggactggtcttgggtcaagggtatacgagcagctgcgctcccctgctagaaccttcgagcaagctctcaaggtccaaatagtggaaaatgaaagtacaggttgattcatgttggcaggttttggtatcaaaaaaaaattaaaaagcacacatgggggatataccaataaaggttagaccatatgcctagctaagaacttatcatttgtattaaaatatggtttaatgtaaagagttgcctttctccattcccccctcccctcccctcccctcctctcccctcctctcttgcccccaattaaaaaatagcacatccctaatgtgggaaacagtaagaaagcatagattacattttaggcagggcacagtggctcacacctgtaatcccagcactttcggaggctgaggtgggtggatcacttgaggtcaggagtttgagaccagcctggccaacatggtgaaaccctgtctctactaaaagtacaaaaattagccgggcatggtggcgggtgcctgtaatcccagctacttgggaggctaaggcaggagaattgcttgaacccaggaggcagaggttgcagtgagcagagatcacgccattgcactccagcctgtgcgacagatcaagactcagtctcaaaaaaaaaaaaaaaaaattaatatcattggagatcataccaccgaaagtgctgttgttaatcttcttgattatctatctgcttcctgcattttgttgagccattacataagtatatgtatacttatatgatgttatgggctcctaatgtagtccactgcagtgcaagctgttcagttaacagtgaatcatcaacatattttcatgtcagtatttttctgctatgtgattatttttagtaggtatgtaacattctcatctctgtgtaataatttacttatcaatcttctgttggacattgaagttgttttcaatttttaggataataatactgtcacttccctatatcatgcattttgatactggcctacctagtatcagtgattttttctatttttgtttctctgaaaatatctcaatttcaccttttttttttttttttttttttttttttgagacaaggtctcactctggcacccaggctggagtgtagtggtgtgaacatggctcactgtagcctcaaccttttgggctcaggcaatccttcacctcagcctcctcagtagctggaaccacaggcacatgccaccatgcccagctaatttttaaattttttgtataggcggggtcttgtcatgttgccccggctgttcttgaactcctgggcttaagagatccccccaccttggcctcccaaagtgctgggtataggtgtgagccaccatgcacggcagtttcaccttttttgaagtggtttttggtgttttttttgttgttgttgttgttgtttttttgagacagtctcgttctgttgcttaggctggagtgcagtggcgtgatctgagctcactgcagcttctgcctcctgggttcaaatgattctcatgccacagcctcctgagtagctgggattacaggcatgtgctaccatacccagctaaattttttgtatttttagtagagataggattttgccatgttggccacgcaggtctccaaactcatggcctcaagtgatctgcccaccttggcctcccaaagtgctaggattacaggcatgagccactgtggctggcctgaagtgtgttttcactggctattaagttctaagttggtagttattttctttcaacacattaagaatgtttggttgctttctgtcttcctttctttttgttgaagtcagctaccagtcttattgaaggcaatgtattagctatattcttgctgaggataatgtgtcttttatttttccttggctaattttaagactctctgtgttacttttaaagcactttgatgtgttcagatgtggttttctttgttgctttatgtttatagagttttttgaatctagctggatgccttttagttttggaaagttctgttaccaccttttcatatattctgccccttttttctttttggatcctaattacacatatattaaacttaattatcatgttccacatgttgaaaaaaatttttttctctgtttggatattttctatcgacctgccttccagtatgccaaaactatcttctctttttgtcaaaataatcttttgtgttcttaattttacattgtggttttgagttctagagtattcctttgatgttgttttatagacttgtaatagactccagttctcttgaacatactaattatagttatttaaatgcttgtcttttccaatatcggcatcatctattggtctgtttatcttgtttgtttttctgttggttattggtcatatggttgtattgttccgtctcttcacatgcctgataagttttcgaaggaacttacccatttcatttaacttgttgcatttattgcaaaaagttgcttataatactctattattgttcttttaatatctgtagaaagtgtaatgagtctaatatctgtataacctgtagagatttagtatcattccgaatactagtaatttgtctctgctccccttttccctgattagtctggctagaagtttattaattttattgaggttcttaaaaagttaacttttagtttaattgactgcctgtggttttcttatttccgccctggtctttatttcctttcctcagcttacttttgggtttaatttgttttctttttctggtttcttaagatagaagctgaggtcattgatttgtgaccttttttcttttctaatgtaagcatgctataaacttccctttaattgtttataatttatttatttgttttttgagacaaggtctcactactgctcaggcagtacagtatcgtgatcatggcccattgcagccttgacctctcaggctcaagtgatcctcccacctcagcctcctgagtagctgggactgcaggcatgtgccaccatgcctggctaattttttatttttatttttatttttttgagactgggtctcactccgttgcctaggctttagtgcagtggcccaatcacggggtcaccacagtgtcgacgtctcaggctcaagagatcctcgcaccagagtctattaagtgctgggattacaggcgcgtgccatcatgcctggctaatttttgtattttttgtagagatagggtttcactatgttgcccaggctggtcgtcaactcctgagctcaggcaatccacttgcctcagcctcccaaagtgctaggattacaggtgtaagccaccacacctggccagagtttattacaattttttctgaagacaaggatgtcactgtgttgcccatgttggtcttgaactcagttcaagcaatcctctttccttggcctcctggagtgctgggatacagatgtgagcctccactcctggccgtttccagtttttgatatgtttccattttcattccattcagagtactttataatttctttcctgatgtcttactgggtctatagtttatttataagtgtgttatatagttttcaaatatttgaggattttccagagatcattgttatttttaatttaattccattgtaatgagataattttaaatttattcggatttattttatggcctagaatatattctatcattgtaagtgttcttcatgtgcagttgaaaagaatgtgtgttttgttgttaggtggagtgttttacaaatgtcagttaggtcaagtctgttgattgttttgtttatgtctcataattttttattgaatgccaggcattgtgtagtaaaaaacttaagtaagcattaccaggtaatggtacattttgccgggttgggagaggggtgggggaaggggaagttcattttctatgcagataggctagggagctgtattagtctgtttgcattactataaaagaatacgtgagactgggtaatttataaagaaaagaagcttaattggcttacggttctccaaagtgtataggaagcatggtgccggcatctgcttatagtgaggcttagtaagtttctagtcatggctgaaagtgaagggagagcaggtgcatgacaaggcaagagtgggagcaagagagcaaggtggggcaggtcccagacttttcaacaaccagatcttgtgtgaactcacttattaccgaggagatggtactaaaccattcatgagggatctgcccccatgatccagttgcctcctactgggcccaacttccaacattgggaattacatttacatttcatcatgagatttggaggggacaagcatccaacccatatcaggagcccatcatcttaaattatgtggaggctgggttgctattttaatagtttgctatccttatttttccttgttttttcagatgttgtcttctaaggcattcatttcaaagcctattggtcttgtccctttagcaatgccaaaggtaggaaatttcactttgcttttcaaagttttttagttgactttgtagccttttaccctgcacggttttaaaattcagcaagtatgctgaggggagataccacctttaagcttgaggtccttgcgtgaaactttttaggagaattagtctcctagtgttgttattccagccctgtgtgaacaccaaaagctgtcctggcttctgtgttcctcagcaacaatattttacacaggtcaggcctcaattttcagcctctaacccaagcaataattaggaaatactcccagggaaaagacagatactggtcatctaaatacctttaaaatattctccccatctctgaggtggaggttgcagtgagccaagattgtgccactgcactccagcctgggtgacagagcaacaagactccatctcaaaaaaaaaaaaaaaaaaagattctcccatcactggaattttagaccttctttcccatgcttccacagctcctcactaactttaaaaatatgatttttataatttatttagctttttaagttgttcttagcaagaatattggcctgcttcaaactagttcattttacctaagtgcagacaatttcctattattattattattgtcatttatttttgcagagataggatgtgactttgttgcccaggcttgtcttgaactcctgggctcaagtgatcctcctgctttgaccttccaaattattaggattacaggcatgagccactctagctggcgcctgtcattttttaaaggtatgcagaatactcaatatttatgagctgttttatgtagtgttctttaggtattttgttgttgggtttcagtttttgatgtatattttttaaaattgatttttattggggtataatgtatatatgttaaaatctgcccaatttaagtatgcagcttgagttttgacaaacctaaacattcttgtaatcaccataatcaagaagcaaaaaaatttttttttatactgataaagaggtctttctgtattgaccaggttggagtgtagtggcaatatagcgaggcctttggctctccaaaaaaatagaaaaaaattagccagacatggtggcatgcacttgtgatcccacctactcaggaggctgagatgggaggattgcttgagcccaggaggttgaggttgcagtgagccattgactgtgctgctggactcagcttggatgacagagcaagactgtctcaaaaaaaaaaaaaaaaaaattctcactttatacagaaaaggctgctgagattttgtttagggttgtatttactctatagattaatttaaagaaaactgatagcaacattgagtcctttgatccttgaacacagtatacctctccattcatttaggcctttcatttttctcagtagtgctttgaagtcttttagtatacctttaatggtggtcttcatcttgttcattcagcaagtatttattgagcattctgttctgtgccagctactattctgtctgctggggaacaaagccctgccttcagggagcttatgttctaactgaggaaaccagatgagaaactagtgagttaaatatatgctagatggatatttgtattgtagagaaaaccaaatcaaggtgtaggggattagagtctattagcatgtgaggatagaatggatatcttagttttggctgctataacaaaaatacccaggagtattagattctgcagtacaacagcacatagactgtgtgctgttgaatttggtttgctagtatttttttaagggtaaaaaaatcagtattcattaggtttattgctgtagctttctttttttgtggtatctttgtctgattttgatatcagggtaatgctggccttttagaatgagtttggaaatgttctctcacatttagttctttggaagagtttgaggaggattggcttggtgatagttgagagtagaataagcactcgtttcaagtttggtattgttgcactgatgctccacttgactcgctgcatattacaactgtaattattaattacttcagtgctgttaatcatagggtagtacaagctagattaaatggcaaacaaatgtacaaaacattttattactattgggttctttatacattaatgttttaagacacaggcaaaaaggaaaacatcgagagtttactgaaaagcaaaagttttgtagtgtgtcttgaatttagtaaacaagtgtccactctcctgcatcttaaacaagcactttgtttttgttttatttttttgagatggagtctcactctgttgcccaggctggagtgtagtggcatgatcttggattactgcaacctctgcctcccaggttcaagctgttctcctgcctcagcctcccgagtagctgggattacaggcgtgtgccaccatgcctggctaatttttgtgctattagtagagatgggatttcaccatgttggccaagctggtctcaaactcttgacctcaggtgatccacctgccttggcctcccaaagtgctgagattacaggcacgagccaccatgcctggccttaagcactttttcacggatttacaaacaatcccaaaaatctttagtcagtgatatggtttgaattactttctaggcagaaaaatattctaatatgtatctaaaatacttaattaaaaagtgttgaaaaaatattcggaaatcaaaacttttaggtcatcataaaataaattagtaatatcatattttggcttcattctttggcatgtggatattcagttttcccaacactgtttgttgtagagactgttttttctccattgggtagtcttggcacccttgtcgcaagtcatttggtggcatgtgcgagcgtttatttctgttctgttccattggtctgtagctctgtatttatgtcagtaccacactgtcttgattactgttgctttgtagtgtgttttgaaataagaaagtatgaggcctccaaatttttggtggtttttcaagactggtttggctacttgggggtcccttgagattctgtatgaattttaggatggttttgtttctatttctgcaaaaaaaatgtcattgagaatttgacagggattacattgaatctatagattgctttaggtagtatggacattttaacagtattaactctttcagtttaaaaacacggaatgtttttccatttatttgtattctctctttgatttcttttagcgatgttttgtagttttcagagtacaagtcttttatctccttggttaagtttattcctagtatttttatccacactacccccccgacccgaccccttttctttgtttaaagagatagggtctctgtcacctaggctggagtgcagtggcacaatcatggctcactgtgaccttgaactcctgggctcaaatgatcctcctacctcagcctcccaagaagctgggactaaaagtatatgcttccacgctcggctaattttttggtatttttatagagagataaggtctcaaattcctggcttcaagcagttctcccaccttggcctcccaaagtgctaggattacaggtttgagccaccatggtttgcctttcctcttttgatactatagtaaattgggatttttttttttaaattttcctttccagttggtcatttttggtgtatagaaatgcaactgatttttgtgtgttgatttcggatcctgaaactttgctgaaatcatgtattagtactaacagtttttttgtggattcttctttagggctttctgcatataaatcatgtcatctgtatacagagataattttctttcttatttgagtgccttctatttattcttcttgcctaattgctctatctaggacttctggtactgtgttgaatagaagtgatgagagtgggcatcctcgacttgctcctaatcctaggagaagtgttcagtcttttaccattgaataggatgttagctgtgggatattcatatatggtgtttattatgtcgaggtagtttccttctattcttcatttattgagtgtttttatcatggaagggtgttgaattttgtcaaatgcatttgttcgtcaattggaatcatgtggtttttgtgcttcattttattaatgtggtatattaccctaattgatttttgtattgtgaaccatccttgaatttctggtataaatcccacttggtcatggtatataatccttttaatgtgctgttgaatttggtttgctggggttttttttgtttttgtttttgttttttttaacatttaaaaaatcactattcattatggttattaccgtggttttcttttcttgtggtatctttgtctggtttttatatcagggtaatggcggctttttagaatgagtttggaaatgttctctcccattttagttctttggaagagtttgaggaggattgggttaattccttttttttttttttttttttttttttttgagacgaagtcttgctctgtcgccaggctggaatacagtggcgtgatctcgactcactacaacctctgcctcctgggttcaagcgattctcctgcctcagcttccagagtagctgggactataggcgcataccaccacgcccagctaattgatgtagttttcgtagagacggggtttcaccatgttggccaggatggtctcgatctcttgaccttgtgatccacccttctcggcctcccaaaatgctgggattacagatatgagccaccacgcctggcctggttaattcttttaaatgattgatagaattctccagtaaagcctcctaggcttttgttgttgttgttgagatctgcttttatttcttgatttactaacttcaaattatatctattgactcactgctaagaaagatgaggatttagctcacttacactttacttaattatagtgctggggctattttttttttctatgggtctaaagtcataatgctagtggaactcaagaaataaaatatttacttatttcttcttgtacttcatcattttttcgaaatcatgccgctagattgctttatattctagatgactttttgttcatcttttcctcccacagtttgtaattgtctttttttctttagagaaatatatacctttatcatattctcagatgtttttcctgcttggatcataatatctattaactgttaggtggaatgccttttcctggagatatcactcttagagccctcctacttcctgcttcagtcttgacaggttggaagctgctgtgtatatgtcattctgagctattccgtgtctgcatttctggttagatttactgtttcttagatgcgacatcttcctcttttatagcattcttccttttttagctggaatgtatttactctttttttttttttttttgcgatggagtcttgctctttttcccaggctggagtgcaggggcacaatctcggctcactgcaacctccacctcctgggttcagctgattcttctgcttcaacctccgcagtagatgggattacaggcgtttgccaccatgccttgctaatttttgtatttttaatagagacagggtttcaccatgttagccaggttggtcttaaacaccttatctcaagtgatccaccctcctcggcctcccaaagtgctgggattatatgcatgagccactgcatcctgctttgaatgtattttaaattaactccagtatacagagtacttacaatgtaaatattgtgaattcttgcatgtttgaaaatagctttggcctgggtcataattgcttgatagtttggctgggtgtagaaatttaaattcaaattaattctctcttacaacttagaggtttttgctcaattctgttgagcatcaagacggtaagatgtctgatgctattctgtcttgttattttctaaatgatcctttccctcgctcacaaagataagctttagtatcttatctttgtccttcgtagttatggaattttataattatgtgtttagatatgaattgtttttgttattctttgctggactcagtaggtcctttcagttgaaatgcaagtgtctcccttcagttatggaaaatgttcttttattatttccttggtaatatttcttagtctatgtttgcccattttgggatacttactagcagaatattggctttcttgattgatcctcatttctttatctcttttctcaagttttctgtcttttttattctgtattttgacagatgttttcaattgtatgtttctgacctgcgaatgtttataaattgttaatgagtagcttttgcttattttctgctggtatcatttcaagagacaacacaggatagtagctaaaagcattgacaatggaaccagacttcctgactgtgtgggtttagatcacagctccacaacttcaaaaccatgacaatgggcaaatgattaatctctttgtcctcagtttctagtctacaaaatgaggataataatacctaccttgtgagtaaaggagttcatatttattaagcatttgtaacagttcttggcatagtggactcttgtattattatttgttaaatatacctatttttgtttaattgaatgcggtatcttcagtagtcctttgagaatactttgttctattttgagatttcttctatgtcctgaataaactatgatttttttgaagtcagtttgatctatttatttgtcttggtctgggtgggacatagtggctcatgcctttaataacagtactttgggaggctaaggtgggaggattgcttgaagctaggagtttgagactagcctaggcaacataatgagaccccatctctacaagaaaattaaaatattagttgagcatggtcatgcatgtctatagtcctagctacttgggaggctgaggcaggaagatcacttgagctcaggagttcgaggctgtagtgagctatgattgtgtcactgcactcctgcctgggcaacaaagtaagactgtctcttttaaaaactaaaaaaatagataatatctttatcttggtctttttctaggtggtgtttcttcttgtatatctggggatccttattgttagttcatggttcttgctaaaggaccatcttgattatattaggtactgctgttggtttcctggattgtagtcatggacttgttttctaattgccatcttggaatgagaagactggcaactctttgtacatagttggagcatctcttgtttgctggcaagttaggtttagggcaaaagatcagggaacctgtttttaggcttcggagctttccaattgccatatagaaatgggctctacagatactgacattgacaccagaagacccagtttctttctgttcagtttgttaactgtctttaggaaaaaaagagtatttcactttttgtacctacaggtgacactggcccttgcttagtcattgaggggagcgtagaatctctgaaagattgacttagacctccactgtagtcctttcatgtgtagattttgggctgtgcttcgcttagttctgtttaaacttaacacacttgggtctgctttctgttctccagaaatctattgtaaacactttctctctgttcttttcattgtcttatagatttattcttttttgtttgtttttatgtgctcatctgcacagactttctgcatggaggggcggcaaacatgagtgtttatcaccatcatcatctcattcactccccaggtttctttaaaataaggcagtgagggggggatgaaggaaatagtcacttcacccttaaatacttcaatatatttaattaattaatttttttttttttgaggtggagttctgctcttgtttcccaggctggagagcaatggcatgatctcggctcactgcaacctctgcctcctgggttcaagtgattctcctgcctcagcctcccaagtagctgggattacaggcatgcaccaccaggcctggctaattttgtatttttagtagagatggagtttcactctattggtcaggctggtcttgaactcctgaccacccacctcagcctcccaaagtgctgggattacaggcgttagccactgcccttggcctcaatatatttattttaaaacataggatttttttttttttttgagagacagggtcttgctgtgttgctcaggctgaagtgcagtagcccaattatagctcactgcagccttgaactcctaggctaaagtggtcttccaaaagtactgagataataggcatgtgccactatgcccagctaattttttaaattttatggtagagatgagatctcgctatgttgccaaggctgttctccatttcctggcctcaactgatcctctcacttaggcctcccaaagtgctgggattacaggtatgagccaccacacccagctgatattttctttcataatctcggtatcattaccacacctaacaaaattaacgatacttccttaatatcataaaacacctagttcatattcagctttttcaaaaatgcctttttgttgctttatttgtatcaggatttgaatcaggtacatacctcccagttatgtttttttagtcttttaaaatttttattttattttctcattttcagtcatgcctatataatgattgaatctttttttaaaaaaggtattatttgggagaggaatgacatcagtttgtagatcacctttgatagaaaatatatgggcaagctatgtgttgtatagttttgttctctctaatatcctaagaaagcaaaatgtgccccaaacatgcttttgtttttacaggatgttttaaacatatacaacagtatatagaatagtaaaatgaactcctatgtacccatcacctacttttagtgatttatttactcaacaactctcgtttcatctatatcttaatctccttaccctcttctaatactattttgaagtatattccacatattatttatctgttaatattttaaagtatatttctaaatatgattaccgcagtaaagtctttttaccctccatgttgaagtaactgggtcaatttttctttataacgtttcacattctgcattttcttattccttttgatgtcattttacttattactttcttgtattcatgtaactggaaattggatgtgaagcagtgtttctaacctttttttttttaattgttgcctcattacggagtttttagagcttttttttttttttttgagacggagtctcactctgtcacccgggctggagtgcagtggtgtgatctcggctcactgcaagctccgcctcccgggttcatgccattctcttgcctcagcctcccgagtagctgggactacaggtgcctgccactttgcccggctaatttttgtatttttagtagagacagggtttcaccgtgttagccaggatggtctggatctcctgacctcgtgaactgaccacctcgacctcccaaagtgctgggattacaggcgtgagccaccgtgcccggcctagagctttttttttccttactgtctacactgcaccttttccccagacctgggggcagacacagtagtatgatttggaggatgagaaactgtcttaatttactgtttaagatttctttgccttcttgaatgtgacattgctactgttgagaatgtatgatctaaaggttcatagattctagtttgactcttaacaagaatattctgtaagtagtactattactacatgttatatcatgatatgtggttgtcccagtgttaaagatgttaagattgatcagtgaattcagttggtgacaatatgatccattgtgaaatttaccattactttttctcctgatggggtttttaggattgatgatttttgcctatttatgtcatttcttttgttcttcttagttgaaatttttctttaaaggagtagctttcagtactttggtccctttgcctaccttgaaatacagtttgacaggccagtcaaggaaaatgctttgtaaatttcctgttacaggttgaatatctcttatctgaaatgcttgggattagaagcgtttcggatttcgtattttttcagattgtggaatatttatagtatacttttcagttgagtatcccgaaaatctgaaatctgaaatgctcctttgagtgtcatgtcattgctcaaaaagtttcatattttggagcatttcagattctggatttttgtattagggatactcaacctatagttaaacattttcgtattaacccttggcataccatcagtacacactggaatttttttttttttttttgagcagttctaactatggaaggactaataatttcttgactcattttttcttaaaggcctttgaaagtagaaaggtaacatatactttaaaaaatttttttatttggccaggtgtggtggctcatgcttgtaattccagcactttgggaggccgaggcgggtggatcactttaggccaagagttcgagaccagcctggccaacatggtgaaaccccgtgtctactaaaaatacaaaaaattagctgggcatggtggtggacacctgtaatcagctactcgagaggcggaggttgcagtgagccaagattgtgccattgcactccagcctgggcaacaagagtgaaactctgtctcaaaaaaaaaatgtttattattcatttattttattttatttttttagagacaaggtcttgctctgttacccaggctggagtgcagtggtgtgatcatagcttatcataattaccaattcctgggctcacgtgatcttcttgcctcagacttctgagtagctagaactgtaggcgtgtgccaccatgtctggctgcttttctttttaaaaattttttctaaagaacagggtatgtggcctaagctggtctcgaactcccaacctcaagtgatcctcccatgttgtcctttcaaagggctgtgattacagacatgaaccactgtgcacagccaaaattttctttttaaaaactgaataaaactcattctatctttcattggttatattcctgtagctttaaggattgtgatttcatcattctaagacttgtttcattactaagatttgtttcatttcattcataacaaattactcatcaattatttctgtccctcctaaaagataatatgaaaatggaaaaatgatggaatcacctaggagagtgatagaatatggaaataaattgtcactattgtatttttttttttaagatttttgcatttcccaaagtattacatcatctttctggaagttataagtctggagatatcatcattgtaggccgctttcagctttcattagaaacagttgagaatttagaaattttcatttctgctcattatggcaaagaggaaaaattacagaaagatgtttcacatctctttgacaaaccagcacataaatgcaaaaagaaaaataaatgcacctcaggctttattcaatagaaatttcatgtgaatcactggaccatcattgtccaatagaaattttatgtgaaccacaaatgtaagtagtaggtataatttaaaataaaaaagtaaaactaggtcaaatgaattaagcaaaatctcaggctgcacttattcatataataggtgaattttctcaaactcagaaatcaatgcatgaagaattatatttctgagtgtaaaaatataaatatagttattcttgtctagtcagtcatttaataggtattaatattttcttttttctttttttttgtttttgtttttgtttttttgagacagagtctcactctgttgcccaggctggagtgcagtggtgtgatctccgctcactgcaatctcagcctcccaggctcaagcaattctgcctcagcctcctgagtagctgggattacaggctggtgccaccatgctcagctaattttttttgtgtgtgtgtgtatttttagtagagacgggttttgctgtgttggccaggctggtcttcaaactcctggcctcaagtgatccgcccgcctcagcctcccaaagtactgggattacaaacatcagctgctatgcccggccgggtatgaatattttctgatgagccttacaccatcctgttttgctaaaatgatgtgttcttacgtcttttatggtgtctgcatgccaaaatttactggataacaatttgtaatgctaaagacatgtaacaaaggtgactggaaggaaatagattatttaaaaagaaaaaagttgttggattgctcattttaattgatgcttaaaaacaagaatgttttacagttttggagcaaaaaaagatggtatccactcttcaataaaattataagccatcaaaggtttcaaaaacttcttcaattttttttatgatgaaattgcaagaagagtagaaatattgataagctgatatgaaattagaggtatgtattagaaatctggagaagtattagaaatatatttgaaatgtatgtggagatgtatctggagaggtattagagatgtatatgaaacctggaagcagtacaggatgattatgttccagattcgtgcatggatgatcagccagttgcattcagaggacattacccatgtcatgtagatacactttcaaagcctcaaaaaatggaataaaaatttggttgtgatatgtttaatttttcagtgtcaattttttttattatccctttattctcgtataaataattcataagatgacttgaaaatataaagggtccattggaccaagaaggtgtaaatagtgatgactgttctgtaccctgagggttgacttgatactctagctactctttggtcacaagtgagagttctacatttgtccgtttgtctggttttgtttgtttgtttgtttttgacagagtctgggtctgtctcccaggctggagtacagtggtgccatctcgctcactgcaagctccgcctcccagattcatgccattctcctgcctcagcctcccaagtagctgggactacaggtgcccaccaccatgcctagctaattttttttttttaatttttagtagagacggggtttcaccgtgttagccaggatggtctcgatctcctgacctcgcgatccgcccgcctccatctcccaaagtgctgggattacaggcatgagccactgcgcccagcctgttcgtttgtcttatgctaaacaatacacattatatgttactgtgcctcacaatttctttttattcaacctggcctgtctctggccagtaggagccccttcagatttgcttctaaatcttttttatatgaccatattaggttttgatagcttccttgctttcaagcttagagttagtcattttatatggttcagaagtaaatgagtgtgtgtatttgtgtgtgtacatgtgcatgtttgtatgttgtatatggagatgcatacatatatatgagagagggaaagtgtgcatttacaaatacatacatatatatggtggaaagagtatagatgtggcaaattgttaacagttgatgaatctaggttaagaatatatggctgttaatcttactgttccttaaggggtaggatacctgtttaagttacctatttttccaactacttattctgttcataaagtttagcatgttttcttatgtttattcgttctttatgcttcttttttttttaaaaaaaaacagtttattactggttggcatcttttgtttatctttttttcttactgatatgtagtatcttgttacgaactttggatactaatcttctgtggtatattttctcagtccgtggtttgtcttttcatttgtttatgggatattttggtaattagaaaaattaaaaatttaaattaaattagacttcagatttgaattagaatgaagccaaatatattattttttttctttaaagtttgtgcttggcttgttttcctttaaggtttatgatagtttaagaaagttattttctcctctatagatatgaaggtattgtgtgttttcttctaaaaattgatatgttttgccttcatatttgggtctgaagcacttggaatttatgtttacgtgtggtaagaaagaaatccggtataactttttgccctatttgggtacctgttgtctctaccattaatggatagtccattctttccctctttgtttataatgctgcctttttaatatacatatgactctatttgtgatctctctatctctgttttgaaagacccatattataaggcttgattatttgtaggactgctctctccattttcttcttcaaattattgtagctattcttagccttttgctcttccacataaatactaagatcagtttgtctagttacatacacactcatatatgcataccatatggacacaaatcaatataagatattagtaaaaattgcatagcatccatagatgtatttagagagaattcagaggtgaggaaactgaaattcaagcaaagtgaataatttgctcaagtatgtctgagtctgaggcccatttctttcctttgcatatttgtgaaggccaataattcatggggtgttaccaccgtggtatggtataaccatagcaagaatcagaattttgagagtagcagcacacatctaaaatctataaggtgagctctataaaacatagtaatttgagccaggtgtgttgacgcacgcctgcagtcccagcactttgggaggccaaggcaggtggatcaccttaggtcaggagttcaagaccggtgtgactaacacggtgaaaccccgtctctgctaaatacaaaaaattagccaggcgtgatggcgcatgcctgtaatcccagctacttgggaggctgaggcaggagaatcgcttgaacccaggaggtgtgggttgcagtgagctgagatcatgccattgcactccagcctggcaacaagagtgaaactccatctcaaaaaaacacaaaaaaaatagaaatttgaatttatgtgacagattaattaagggacacaaattactgtagttccatttaaaattgaatttttttctagtacatttgagaaagaaaccattttaccaacgttaaaattgcacttttgtaagaatatctgtaaaaatattgtagactgaaaaaaccgtgagcatagacttggaggtgtgacaaaatttgatgtatgtagggaatagcaagtaaatggaaaaggttaaatcatgagagacttgaaagagataaggctgaaccttggggactaaatctggagttcacaaaggagttgttatagggagcaatttttatatctcaaggaatttgagtgacatgatcaaatatgaatgttagagtcttctgatataaagcaagggatggattcaagagggctggtgctggaggcaggggatgggaggaggaatttatgaagattaattccagtcacagaattgggaaaattgtgaaggagtaagggagaaagagtatttaaaatacctctaaaatttgtagcttgtatgagtttaacattacctcactttgtttccttagaactgaaccttagtattaaaaagatttgggagggagaaaaaccctgtatgtctactgtggatttatttattttaaatgtatattgtaaaattaatataaatttgaagctgtgggatacctgtgtcaacagtctgttttgcctcaggtgttgttttctaggagtagttcatactacaaaagcagatcctcataatgccatttttggagttgaattttcaccagttcatctgcatattaggggaaactattgctgttagtaaatgaggtgttgatgacccttggatacagttggcattgtaattctaaagctttcatctgtaattaatgggagtgaggctcatagaagtcaaggttttgggagaaaacagatacttcacttgatcggtgtgggggcagtgataattttaaggattgtggtatgaggttgtttttgttggtggccttaaaaaagtggttagatttagcacaactaattgccaatttaaggcatactgtggaacccagagggcttctatgacagttttataggataacagaatcttatcctgttgacttcagggagactatgctaaaatgttggccttgaatcggattattaaggtgatacaactgcagagaagactaaatatgcaacctttgcaggtgttgtgtgtctaagtcagggccctaatagggaaagagtggatccctgtacttcagaatttttaatcctacaattcatgctgaagcttcctggcaaggagaagcatcccatttccctttggcagaggaaagaccccctgccacccctcctgtcatcattgcttgaagactgtgcagtgaccccataaatgttcaatgatgtttatttatttttatttttattttttatttttttgaggcagatttttgctctgttacccaggctgaagtgcagtggccaatctcggctcactgcggtctccgctttccgggttcaattggttctcctgcctcagcttcctgagtagctgggattacagaagtgcaccaccacgcccggctaatttttgtatttttgtattttcaccatgttggtcaggctggtctcgaatgcctcaactcaggtgatctgcccaccttggcctcccaaagtgctgggattacaggcatgagctaccacgcctggtccaatgacatttattcttaagatctgcctctactatgactcattatcctctggttaataactatagtcagggtcttagcacatcccaagaagagaattacaagccctgctctggaaagaactatcctatatacaaaaagaattgcaggactgcaggctcagtggcttgcacctacaatcccagtgctgtgggaagccaaggcaggaggaccacttgaggctaggagtttgagaccagcctgggcaacatagtgagaccttgtctttacaaaaaactttttttaaaaattggctgggtatagtggtttgtgcctgtagttctagctgctccagaggctgaggcgggaggatcacttgagcccaggagtttgaggcggtagtcaattatgattgctccattgcactccagcctgggcaacagagcgaaaccctatcaagtaaaagtaaaataaaataaaattgcaggacttgaataataagcatctggagaaaccaaggaaacaggtatgagaatgttttgaaaggtgttggattgggtggggggcagaatataaggttagcttgaggaaaatgtattgacatgagggtactcattgatgatctgggattcagtgtcatccaggggcattggaactgcctcttatagcttgtcggttgtcttagtccatttggctgctgtaacaaagtatcttagtctgagtaatttataagcaacagaaatttattgttttcagttctagagactgggaagtccaaaatcaaggtgctagtagatgcagtatctggtgaaggcccattctggtgccttgttgctgtgtcctcacatgatggaaagggaggggaacaagctccctcaggccttttataagggcactgatctcattgatgagggtggagccctcatgacctaatcaccatccaaaggccccatgtcttaatactgtcacattggggattaagtttcaacataagaattttggaggggcacaaacatttagaccatagcactgatatagttctttgaagtctgagcacaatgaatgtctacagtcaaccttttaagcaaagatagtgtcatgaggaaaacaataaatatttggcatttttgtttagggattaataccctgtgggaaaatctttgccagatctcttatgtctctttagcactggtcagataaattctccccgtcctctctcctctgcatttaccccaaataggccagttttctcatggctctgcatagcttggtaatgtcatatttcacgtttgctttgtctccttatctgccttatttaactttctcttcatatcctgacattataccctcccttccctaagtgtcagcttataatttttgcctcaggttatccttttaaagctgaaacaatagctcccaaacttctatgaccacaactcatagtaagaaatatattttatgttatgacctagtacactcatacacacatatctgaaacaacagtttcaggaaataccctttaccataactaggtgtcctgcgatccgactccccaccccccaccatgtttcatttttaaaatgctggttataacccctatatttctgtaccaaagggtaaaaacatttgtaattttgttaagggtattgacataatgttctctataaagtttatatcaatttatactcccaccagcaatgtatgagagtaatgaaaaagccaacattctactactactatcccataaccattaagcaaattgattttgtaattctgaaactccccaaaaagatatctctaggcccagttggtttcactgcagagtctaatctacatagtctcttctaaaaaacagaagagaagggaacatttcaagtattatcctgatactgcaaccagacaaaggcagaacagaaacaacaaattaaaaaccaatattctttatagagacacaaaaatccttaacaaaatattagcaaatagaattcagcaaaatataaaaataatcttctgtgttttgagacagagtctggctctgttgcccgggctggagtgcagtggcgtgatctcggctcactgcaacctctgcctcccgggttcaagtgattctcctgcctcagcctcctgagtagctgggactacaggcccgtgccaccacacccggctaattttttgtatttttagtagagacagggtttcactgtattagccaggatggtctcgatctcctgacctcatgatccgcccacctcggcctcccaaagtgctgggattacaggtgtgagccaccgtgcccggccaaaagaatcttacactatagtaatcacatggagtttattctagggatacatggcaggttaaatattcaaaaatcagtgtgatccaccacattaacaggcttaaggaaaaatcattatctttttaactgatggtttgtccaaaataatgttatcaacagtgtattcaattatgtatgcttatatatacacgtatgtatgtatgcgcttatgtaaaagtgaaatgaatgacaggaatgatacaaaggataggagggaggtattaggattattacgtggtacttgtactacccataaagtggtttagtgttatttgaaagtagacttagattagttgtaaatgtgtattgtgaactccagggcaactactaaaaaaagtaaaacaaaaaagcaaaaaagtataccaagaaaggagaggaaaatagaatcatgtaaaactacaacaggcagaaaaagactggaagactaaaataggaataaagaacagaaagcaatcacaaatatggtagctagtaatctaactgtatcaatgatcactttaaatgttagtgatctcagcacaccaattaaaagacagtgccagagtggatgaaaaatcaaggcttaactttatgttgtctaccaaaaaaacccactttaaatatagatacatagattaaaagaaaatggatggagaaaaatacaatatgctaacactaaccgaaagaaagcatgaatagctatattaatttcagacagagcagctctcagagcaaggaagttatccggaataaagaggggcattgcataaataatgataaatgggtcagttctccaagaagatatagtagtcctaaacatctgtgcagctaacagtggagcatgtaagtatgtgaggcaaaaacagaactgcaaggagaaacagattaatctgctcttataatggagactttaataccccattatcagaaatggacagatgtagcgggcagaaaaccagtaaaaacatagatgaattcaacagtgctgtcaaacaacttgatataattgacatctatagactacttcatccaacaacagcacaatacacattcttctcaagcctacatggaacactcaccacaagagacaacattttgggccataaaacaccttaacaaatttaaaagaatagaaatcagacagtatctgttctcagaccacaatataattaaagtagaaatcagtaacagctggaaaatccccaaatacttgaagattaaacaacacatgggtcaaagattctcaagaaatctattaaaaaaatttttattttcatctttttttgccacactacactgatgtatcaagagaaatctaaaaatgttttgaactaaatgaaaatgaaaacaacttaacaaaatatgcgggatgcaacaaatggaatgcctagagggaaatttatagcgtggaatacatagaaaagagtaaagatctaaaaccaaagtttctgccttaggaaactacaaaaagtagagcaaattaaatacaaagtaagcagaagaaaggaaacaataaaaattagagcagaggctgggcgtggtggctcgcgcctgtaatcccagcactttgggaggcagaggtgggtggatcacgaggtcaggagattgagaccatcctggctaacacggtgaaaccccgtctctactaaaaatacaaaaaattcaaaaaattaaccaggcatggtgtcaggcgcctgtagtcccagctaattgggaggctgaggcaggagaatcgcttgaacccgggaggcggaggctgcagtgagccgagattgtgccactgcactccagcctgggtgacagagcaagactccatctcaaaacaaacaaaacagccagtgaaatggaaaataagaaatcatagagaaaatcaacaaaaccaaaagctggttctttgaagagattaataaaattgatgtgcttccagctaggctaactaaggaaaaaggatacgctaatattactaatagaagacatgaaagtagaaatcataacagatttccatttatattaaaaatataaaggaatattatgaacaactctgtgcccacgaatttgataacctagatgaaatggaccaattccttgaaggacgcaatctgccaaaagtcatacaagaagtagacaatctgaataggcctatatctattaaattgagtcaacaattatttataatcttttaagatagaaatcaccaggtccagatgggttcattggtgagttctaattctaccaaacatttaaggaagaaattacaccaatgttaacattctcttttgcaagacagaagcagagggaatactttctaacttattctgtgaggccagtattactctaatcctaaaaccagacaaagatattgcaagaaaagaaaactgtagaccaatatctcttatgaacataaatgcaaaaatccccaacaaaatattagcaaatcaaattcaacatttataaaatgaactatatgctgtgatcaagtgggatttatccaaggcatgtaagaaattaatccattacattaactggctaaagaaaaccaaatcatatgatcatatcaatagatgtttaaaaaacatttgacagaacccaacacccattcatgatttaaaaaaaaactctgtaactgtaaaacttggaatagagagaaacttcttcaacttgagaaagaacatctattaaaaaaatctacagctcagcaaagtgggggggggataaaaatgttctaaaattagattgtagtgatagttgcacaactctgtaaatacactaaaaaatactgaattgtaggttttaaatgggtgagtgttatagtatgtgaattgtgcttcagagtggtaaataataattttttcaaaagaggtaaggggacataacagcctaaatgcagtaaagagcgtcactgaattaggtgttggtattgggatatgaatggaagattaaaagtattttatgaatgtgagaataaaactatagctaacgttttatgtaatggtgagaatctagaacttaagattcccagtaagatcaggaacaggataaggatgtc

SEQ ID NO: 637 - DNA, 32744 bp, Homo sapiens
  source 1..32744: mol_type = other DNA
tgtttatgtggaagcgagatgaccggcaggaacctgccccaatgggctgcagagtggttagtgagtgggtgacagacagacccgtaggccaacgggtggccttaagtgtctttggtctcctccaatggagcagcggcggggcgggaccgcgactcgggtttaatgagactccattgggctgtaatcagtgtcatgtcggattcatgtcaacgacaacaacagggggacacaaaatggcggcggcttagctcctacccctggcggcggcggcagcggtggcggaggcgacggcacctcctccaggcggcagccgcagtttctcaggcagcggcagcgcccccggcaggcgcggtggcggtggcgcgcagccaggtctgtcacccaccccgcgcgttcccagggggaggagactgggcgggaggggggaacagacggggggggattcaggggcttgcgacgcccctcccacaggcctctgcgcgagggtcaccgcggggccgctcggggtcaggctgcccctgagcgtgacggtagggggcgggggaaaggggaggagggacaggccccgcccctcggcagggctctagggcaagggggcggggctcgagggcggaggggggcggggcgggatcgggtgggggcggggttcggggagtcggaaggcgggggctgagagggaatttctgagtgggagtgaactggtaggagcggtggggggccggcgagggtgtgaggaagactagtgagggttgggtgggaggagaagctgaaggtgtagaagcaggtgcagagggagagttagggagggatgcaatttgagagaagtggaaggcggaccgaggggtgtgtgagggcaggtgagatgataccgaaggcgagattgcagttgtctgggcgcagagtaggtgggtttgggtgtggtggatgtggagtagagttgaagcggtgcagagtgttgggtttggggaggcgttgaggggtttggggaggcattgaggcgcatgtgaggagcaggtacgattgcagtgatgggaaagaggtatctgggtggatcgcatgttggaataagaaggaggtttgctagctttggggtatgaagtattttttaaaaacgtggaaggatgggatggttgtgcttgggagagtttctgaaagatgatgctaagacagcagagcaaacttaaatatgaaggaaggggagagaggctgcttagaacttgcaaaatctgtggcagaaaatctcctggggacaagggattggtaggggtgggacaaggcggcaggtgtgaagaaagtgggtggagctgtacagtaattttcggtgaatgtgatttggtggactgtgccaggggtgaggatggggcagagaaaggtgttagtttgggagacaagttgtttgataggctgtatttattattttttataaaaatgagaaaagggtctcactatgttgcccaggctggtctcgaactcctggcctcaagtgatctgcccacctctgcctgactgatgggattacagacgtgagctatggcgacccgtgatacgctggattcattatgttaaacttgatctggagtcttcaagggagtgtccggcagcagggtatcccaggaagagacatgcaccataccttgggataggacattttgcatagctttgaatttgctagtactttgctgtgggcagagtgcagggagtggtaggagatgaccaggcaaaggcagaggaggggttagattacaaatggtgtcctatgccccatgaaggagtttaagccctgtaattggtagaaggtgttgggacgtgttaaagagagtgttagacagaagttgtgaaggggtagtgataaagaattacagatgtgggaaataggaaatgaagaccaacgaaccaagtatgtttggggttggaggtaccaaggaaattcagggtagagcatatgagggcccctcctatatggacagaaggtggaaatagcaaatggaaattagttgtgttcgaacagtcttagttctatggggccccaagaaggttttttgtgtttttttttttttaaagtgcattcttcctgtcttacttgtataccctagattttttggcatagccttgaaataaaacactccatttttttcttactcataagttctttttttttttttttttttttttgagacggagtctcagtctgtcgcccaggctggagtgcagtggcgccatctcggctcactgcaagctccgcctcccgggttcacgccattgtcctgcctcagcctccggagtagctgggactacaggcgcctgccaccacgccccgctaattttttgtatatttagtagagacggggtttcaccgtgttagccaggatggtctcgaactcttgaccttgtgatctgcccgcctcggcctcccaaagtgctgggattacaggcgtgagccaccgcgcccggccattcataagttctttacacatttatcagaatgaatttggacagtattttatgtttttaagaaggaaaggataatgcacatgttttttcttttccgagaacttctactgagagttaaaggttggagtggtgaagtgatggtttaaaaaaaaaaaaaaagaaaagaaaagagagagacagaggaagattttaacattaaaagaggaatttagggaatggctgatggtcatgacacggtcggcagaggaagttttgcttactagccacacttaggcttctgagtagagtggatattatgtcattgctattatagcatgtgtttatttcacacactgcttttgaagattgggtggaaactgtcagatgtgaggcatagcatgaatgaaaggtaaatagcatgagtattagaaagtagatgaggaagtttaataattttaatgtgcttcataagctctcatggactttcacgtatcaattagtaaaagacgtaactaagtgatctggctttcagtctcctagttctctacagtgtaccctcagttttccacgtgcttacacatgcctacatttgtactgagagaaaaggaaatagttttttttttttttttgagacagtcttgctctgttgcccaggctggagtgcagtggcacgatctcggctcactgcaacctccacctcctggattcaggtgattctcctgcctcagcttcccgggtagctaggattacagacatgtgcccagctaatttttgtatttttagtagaggtggggtttcgccatgttggccaggctggtctcaaactcctgacctcaggtgatccactcacctcggcctcccagagtgctgggattaaataaatagttttatgtggctgggtgtggtggctcacgcctgtaatcccagcactttgggaggccgaggtggatggatcacgaggtcaagaaatcaagaccatcctggccaacatggtgaaaccccatctctactaaaaatacaaaaaattagctgggcatggtggcgggcgcctgtagtcccagctgctcaggaggttgaggcaggcgaatcacttgaacctgggaggcggaggttgcagtgagctgagattgcaccactgcactccagcctggcgacagagcgagactctgtctcaaaaaaaaaaaaacaaaaaaaaaagaaaaatattttatgtaagtagggatgtgtaagctgtagtgatcagtctttgttgcagaatggtaaatgatgcgtggatgagagaagtggggtgatgggatatttcttccctttaatgccttaatttgcatttccaaagcacctttaagcatctttttatagaactcccatgatcttctgatacctgtcttctcgcagaccccagaaagagaatacaccaattttcgtatcatctattccattgttgccgaatatttgagttgtttcaagtttggggcaattgtgaacaaagctgctatgagcattcctatacctgtcatctggtgcccatgtgcacaagtttctctaaggtatacacctaggaatgaaattgccggtttatagctagggtgaccatttgtcctggtttttgcttattttcccagcgtaactgtaacacttttagttttcaaaagtatctagggttagatgatgaattgtatggtcacctagtcataaggtatgcttgtcttcatctttactaagtaccaaactcttctaaagtattgtaccaggttacactccctccagcaatatatgaattcccttgcttctcgccctctccaatctcagcctttttagcttttatgattttagccaatatggtaaattttgcgtttacctgattagtaatcagattgcacagctcttcatatatatatatatatatatatatatatatatatatattttttttttttttttttttttttttttttttttttgagacggagttttgcttttgtcacccaggctggagtgcagtggcgtgatcttggctcactgcaacctctgcttcctgggttcaagcgattctcctgcctcagcctcctgagtagctgggattacaggtgcccactaccacaaccagctaattttttgtatttttagtagagatggggttttgccatgttgggcaggcttgtttcaaactcctgatctcagttgacccgcccgtcttggcctcccaaagtgctgggattacaggcgtgagcctctgcacccggccagctcttcatatacttttttagccatttagatagcctcatttataaagttctgttcaagtctttcccaccctgcttttaaaagttgggccttgtatcttttattgctatttagaagttctttatttactgtgaatacaagtcctttgtcatgtgtgtgtgttgcaaatactgtggcttgccttttcactctctttatggtgtcttttaatgaacagaagttcttaattttaatggagtcaaatttattggtctttactttatggttagtgccttttgtgtcttgttttaagacttttcctaccctgaggtcaataagatattctcctatgcagtactatctttttaaagctttgttgaccttaaacaatgtataactatgagtaaaatacactcttcttgaccccagcctcaccattacaatctatttttgctttccttcacttttttctgttctctgtcttgaatttttacttctctgcagctataactaagagccaggtgctgacttctcctgtctcttaggagaaaatggtcatatagacagaagttcagccagattagattttacaggtctccagctgactgtattgccctttttccttttatgagctagcattttattgtgttcctgctatgtgtctgccatcatccttgctgctttcatatttgttatctcagtgattcctcttaacggttctgtaaaacagagaagtattctcatttttacagaagagaaaacagagacttagattgatttagtagcatgtccaatatcccctagcctaggtagctagcagaatggggactggatccctgactctgatacttcccatcacagcacacctacttgttgattaaaatgtcagaaacctgttttttgataacatccaaaaccaaaaagaataactttcttactcttgatgtaacatgccttaagtaaagcacacaaagctaactattgtgaaactggataaaatacctctctgtatatagccagtggaccttaagtggtccatggctggatgacagaaggtctgttaacccttaaaaatgtataccagtgtatatgggtacatgtgcttattttttagagtagagctataatatttatgaaactctcaaaagggaacctgaatttttcagggtatctggatatctggtctgaagacatctgtaatacagttaacaaagaatcctgtaataatctctctttcaaaagaatcataaaaaagttaagatgtcagatttttctcagccaggtgcagtggctcatgcctgtaatcccactactttgggaggctacagtgaaaggatcccttgagccctggagttcaagacatgcctgggcaacatagggagacccccgcctctatttttatttatttatttagattttttggtatcttcattttatcttatttattttgttgagatagagttttgctcttgttgcccaggctggagtgcaatggcgtaatcttggctcactgcaacctccacctcctgggttcaagcaattttcctgcctcagcctcccaaagagctgggattacaggcatgcgccaccacgcctgctaattttttgtatttagtagagatggggtttcaccatgttggccgggctggtctcaaactcctgacctcaggtgatccacctgccttggcctgtcgaagtgctgggattataggcataagccaccaagcctggccttgtatctctattttaaaaagttttttaaaaatcacattttttggccgggcatgatggctcatgcctgtaatcccagcactttgggaggctcaggcagctggatcacaaggtcaggagctcgagaccagcctggccaacatggtaaaaccccgtctctactaaaaataaaaacaacaacaacaaacaaacaatggcatggtggcatgtgcctgtaatcccagctactcagaaggctggggcaggagagtcgtttgaacccgggaggcggaggttgcagtgagccgagatcacgccattgcactccagcctgggcaacagggcaagactctgtctcaaaaaaaaaaaaaaaaaaaaaaaaatcacattttttcccttaatacattattctcggtctttgtcatcaaaaaccaactaaagctaatttgtaattagggagaaatctaggattgaataggaatttttaaatgccaaaaaaagacactctaaatttagttgattatttcttaagtgaaagtgcttagttataatacatcattactaatcagtgtaccctggctccaaagacctgatgacttcaaatgacttttcatcttgtctctaaattcctctgttttacaagggatcaaatttcctgtgaggttcctaacagtgtgattaaattttagagactgaaactattgagcacttaaatgcagggataactatgcaaacctaattcatgggtttcaccaggagatttgggacctgtctctactaatttatgatgatgatgttgaaactaatctttgctagggattatggaaaccataatagtttattgatggttcagttattgtttgttgaagcacatttacacaattatagtttaatgacataacaaggatattgtcaactaggagagcatgacatgaaaaattaaacttgcaattaatataatatgtattagttgaaatgataatttttatggtgatttagcctcttagaaatccttggaaaacattattagcttatgaattgaaaactctctttgttaatgagtagtgggaaagaacttagtgttactctaaaaagatggggaattaaatattcagttcaaccagcgttttattgagtgcctgctctgggcttgctgctgagttaggctcataaatataagttgaacaagattgatgtttgcagagatgaaatactggttgcttttgttttttctttcaatcacccttccctccagagtagatggctactattgccagagtgattcaaacattcaacaggtttgtgtgtgtatgtgcatgcccttccctgtgcattatggtgtcacctgctcctgcagtggcttcctattcatctgtcacgttcacacaccacagcttggcttttttcacagccaactttatttctgttttttttttttttgagatggattctggctctgttgccaggctggagtgcagtggcgcgatctcggctcactgcatccaccacctccggggttcaagcaattcccctgcctcagccttccgagtagctgggaccacaggcatgcaccaccacgcctggctaattttttgtattttagtagagatggagtttcaccatgttggccaggatggtctcaatctcctgacctcgtgatctgcccgccttggcctcccaaagtgctaggattacaggtgtgagccactgtgcctggcctatttctgtttttcatttttaaattatatttgtcttttttagagacagagtcttgctctattgcctaggctggagagcagtggcacaatcatagcccactgtggcctcaacctcctgggcggctcaagagatcctcttgcctcggtctcccgagtagctgggtctacaggtgtacaccaccacagccacctaattttttatttttgtagaggtagggtcttgttgtgttgcctaggcttgtctcgagctcctggcctcaagtaatcctccttccttgacctcccaaagtgctgggattagaggcatgagccattgtgcctggcccaacttaatttctttatcccttttgagcatatacctgttctagtcaggcacatggacttggtgtcccttttgtttgacagctcattcttagcttctgttatttcactttgatttccttcattcattccccgatacatttatttagcaaataggcattgaaaccctcttatgatcaagttgtggtcttgggaaatcttagggtatacaaagatgaatcaagcatgaatcctgtttttaagaattttatagtctagtaggggtgacaaggttaatacacaagtaagcataatactaagtgggaaatgaatgtcaaaacagtaaaaaagctaaaagcttcctgttagacaaagatgtttggggcttttgagaagttgtttgcactgggccatgaaggatttgaatttgggcagagggacggtggggcacttatccaggctcagcattatctttcaaggttcagtttcagtcccatccatccaagagatgttcatccatcctccacgtggtttcagcaaggtagtatagtcacagttgtttccagacttcttccttctgtaatcagaggaacacttcctttaaagcgaatcttatggggaagacaaatatatgtaaaacagttaaagtggagctgcactgttgggttcaaggtgctgcaatggcccaaagtttaacccacaaggggtacctgaaggtaatacccgaagtaactccttgtcacagagatctaaagagcctagtttgaaaacctctggagagacagaaagagtttgggctttggcatctgaattaaaatccttcatgacttaatggctctgagatcttggctaagtcaagcctgttttccttttgtaaaaacaacaatgctaccttacagagttgttttaaagtttactgataatctatgtaaagtacctggaccacagtaggtgtcaggaaatggttggtattattattattattatagtttagtgctttgttatttctttttttttaaacaatttattgaggtgaaactcacataacataaaatgaaaaaaccattaaaaagtgaacaaatcagtggcatttagtacattcagtgttgtgtcaccactgccactatcaagttccaaaacatttttattgatcccaaataaaaccccttacccattaagcagtttctctagatatgtccctgagactccaccaatctgtgttttgtctatggatttatctattctggatgtctcatatgaatgaaattatatgatgtgtggccttttgtgtctggcttctttcacagcataacgtgtttgaggtccatctacattgtagtagcatgtatcgaaacttcattgctttttatagttgtatagtattctagtgtatggatataccacagtttatctgttcatctgttgatggacatttgggctgtttacaccttttggctactgtgaatagttttgttatgaacatgggtgtacgtgtacttatttgagtatctgttctcaattcttttgagtctatacctagaaatggaattacagaaccatatggtaattctgtgtttaactttttgaggaaccgccaaacagtgctttgctatttcttaattgcttcttatatgttctgtctctagctttgctttgtattccccatagtacctaccacagggctgcatgcagggagcatcagctcgctaaatatttgttggtttttctttgattagtatttataacctcacctcccagttcacatgttttgggcctgaagcattgatttcagaggaaatagatgcatccaggatttgaaagataagaaatatcaccatatggatggcgtttcatgttgtcagacaacagatatttgttaaccaaggacactattttgagcaactctgccaataacctgagctgggtgctgatagaagaaaaataagtcaaggtcccttcccctaaacagttctgttctgtttcggaagatactgcttagatttgtggatgctcactcagttacacaatgggctttgaaaaaatccaggttttccaacagtgatccctttggggaaaaaaaagaaagaaaaagccaggacttatgaaagtaaaatagttaaaaataactgttagcaagtaaaactcaggatgacaaaagtgtaaactctattattaatctttgtttttttctaccactgttttttgcctcatccataatctcatgacttgagtgttatgacattgattttgaaacaacacacacagctttagtaaaagcttagaggaggcctcgcataatacttatgatccaggatattttgactcttcttatgctgacatgaatatttctgaatagtgttgatgtttatgtaataccagtgaagctaaaagctcagtgctggactaagcatttctctagatatgtttagaatatttgtaatgaatgatgtaaatagtgttatattataagaccgtatgatacaaccatataatttactgatattttgtagttaaaaataaaatgattcacaaccttagaaaatagaataatttaatttgatgtagcacaaatccccagaattaatttaggatgatttgctacctttttgatagccttttagtccaaccttcaagtttttatagaaaaaaaatgaaaagagaataatgattttagggttttcgcttgtgatagaatgtcctatctacatgtgaagcaaatccccatgctctgaaaaagagaaatagtgtggataattccaaatcaggaaaaaaaaaatcatttctatttggcttttgaatgaattatgcatttttttttcctgtggatttgtctttccagttagatactgcttaggctaaaatgaaattggttttcaatctattctcttgcttatatgaatttacagtggggccagtgggatgttggaaacaaatcagcctaagattaaaaaatttgcggtggataatatacaaagtggataatatacatgtgtttagttgagaattggctacagataagagacttctgattttgttcctctcctagctgtgtattttttttttttttttgaacactgtgattctgcttgtagcaaagagctgctgagttacatctgcttctgcctaattaactctgttggttggtgtcagatgagagctaattttgagattaaatcgaggagtggggtgtgtgtcgtggctgggggaggggagaaggaggatccaaggttgcttgattgttttacgtaagatcaaaatgcagttattcacaattgttcttttaaatttattttttgcttttcaagtaaaaataatcactgctgtcctaaaatgtgacttgtgtcaatacatatttactattatgtaaactggtacgtttttcttgtaggtgagcttattggtcatatctgggtagtccattcagtacctaggtgcctggtggcctttgggacaaacagcgaatgctgcccaggaatgtgaatgctgaccttaaaacaacttttgactgtctttttttctgataaatgttatatctgtttggctatttgagtagtagtgggtttttgtttttgttttgtttttccatgatgagattttttcttaggaatctatcacaaacctgatttttaaaatttgaacaggtctgggcttagggatgaaatttacttctataggcacttggctgggtccttggggcttcattttctgtctcaagtttcatatttataagaatccttcagtggtctaaaagaattattatatcaccaaatgtagtataataactcattggagctgtttgtcttgaatggttgtggagatacacggatggttgctgaatttaaggatgtccttatgtccaaatgaacatttccttttttcttttggcagatttgcctgaagacctggataatctccatttttgtcatggactgttaaaacgtttgaagttccaattctggtactttcccttattttattacatttttaaggtataaaatgacaatcttattgaaatgtgttggtaatggatataaacaattgttttatggatataaatgattgtgggtaaagatttgtgggctgggtgcagtggctcacgcctgtaatcccagcactttgggaggccgaagtgggcggatcacgagatcaggagtttgagtccagcctggccaacatggcaaaaccctgtctctactaaaaattcaaaaattagctgggcgtggtggtgggcacctgtaatcccagctacttgggaggctgaggcaggagaattgcttgaatctgggcggtggagattgcagtgagccgagatcatgccattgcactccagcctgggcgacaagagcaagactctgtgccccccaaaaaaaaaaaaatgattgtggtaaaagcttgtcatgaaggtatattttaggtatctattagttatgaaacacattttttttttttttttgagatggagtttcgctcttgttgccgaggctggagtacaatggcgcaatctcgactcactgcaacctctgcctcctgggttcaagcgattctcctgccttagcctcctgagtagctgggattacaggcgcatgccaccatgcttggctaattttttgtatttttagtagagacggggtttcaccatgttggccaggctggtcttgaactcctgaccttgggtgatccacccgccttggcctcccaaagtgctgggattacgggtgtgagccaccacgcccggctatgcattttgttttaatgtacgttcgtttgcttgtgtaacaaaacacctaaaagcaacttggcaatattgggcacttttcctgtgacctcttctactttctgcagttgtattttgtgcaatcaaattaaattagttgtgattcatcctgaataaatgatgaaagattaaataattacttggatacagtgaaatatcttctaatgaaattttgcccgaaaccattttacttgggaaagatcaatttcctgttctaaactaactgacagagaatgattctgtgttctatcctgaaagtggttgcactgtgaaagccagtgatttcattcctaaacacactgtgttccaagtctaacatttttgtcaagggtttatataatgaaacaaaagtgagtacttattagatttgtagatgacatagatgacagaatcaagattcaaaacaatctttagcaggttggaagataggcttaaatcaacgagatgaaattgaacggtaataaacgttaaattgcagcatttcaatttgcagaaggaaaggggtggaaagactcaacttgacagcactttttgaaaaaagatctgggatttttagttggactgcatgctcaccatgaccacttgtgtggcaggggtattgaggaagttcctgtaatttgggttgcatttataattggataatgcctgaactgtcatattttaagatggccaatagccaaactagtgagcaaccaagagaaagtggtgctttgaaacaatgtgatatgtggaagggttaagaaactgggatatgagtggtctaagttatggctggaggtagcatggggttttgtcgttagtggttttcaaaaggtacttgtttttggacatttgaaggcctctcatactgaagaaatactaagaattgtcttgggatccttccagggaataggactagttaggaataggaatagggtcgaagttatggggtggcagatttttgcttctctgagcaagaaatttagctagagctgtgcaacagtggggtgagctgcctcaaaaagtgacaaattatcaatcactggaagtattttaaaaatgtaaagactcattgcccatctatttgggatattgggcagggatcttttattggataactagaggttggactggatgaccttcagccccaagtttctgaatctgaggggagaatgagtagagtgaatttacagcttactgatcacagggacaatcttgtttaaattgcctcctttaaggtggcattttgggttggcatttaaaactgtactgtttgaacaagtatagttcaatgacccagctgtttttcagcaacattccaggatctctgagagcaaatactatattcttcagtatgtctggctaaagtttttaaggaaagatattattttcttctcttaggtatagtctgtctaaataaataaccagagataactttaattttgtattttgttataaaaatttcaaagtatatagatgttgcatttgatgaaagtgataactatatattgaatattagataatgtgtttatttaatcctctcagtagtcctgtaagggatataccagtattgcctacaagtaaagtgatggaagcttaagttatccagggttcctccactggacattgtggtagggctggggttcagacccaggttggtctctttgcagaggcagaactagctagagcaggcagttgtggctcaggtgagaacagtgatggacttagttggattttagaattggctgggcacagtggcttacacctataatcctagcacttttgagaggccgaggtgggctgaggtcaggagtttgagaccagcctggccaaaatggcaaaactccatctctactaaaaatacaaacattagctgggtgtggtggcacattcctgtaatcccagccacttgggaggctgtgcaggagaatcgcttgaacccagaaggcagagattacagtgagctgagattgcgctattgcactccagcctgggtgacagagcgagactctatctcaaaaaaaaaaaattaataaaaaaaattaatgatgttcgaccctttaatctgttattgactcttcccttgggtgaattccatcttctcccgagcctcagtttacccacaaagttctgcagtttaagtgacaagttatatgtgagcacactctgtacagtttaaactataaaaagaattaagaagtggatgttatcattggacaccaagattagagctcaggtttggcccaattcccaggccaaggctctttctccttgtagcctctttgtagatgtactcaataccagattggagatctagggtggtttttgtatataccaagcatctctcagaacaaatgccactgtccacctggaatcagatttgtatatatcttctttgtactgagctgtttaatgagctaactgggtattaagataactagaatgctctactacttaaaggtgaagggttatgttactgtattattttcagttttccaatttgtgggttagagggtatcatagacctctgttaaagggatggggatgtgattccatagaagtagctagatgggaagtttttttacgtatgagacttgggaaatacaatacctagctgaaagctggattatttactcttttttttaagtttaagattttttgaaataagtttaatgtactttcatcagattttttatatcatagacttattctttgatgtgtattttatgtttatggcagacatatacctcaaaccactttcatataattttgttaatttcaataaatataattaaatgtataatttagatgtgattatgcctcataaatgacttcatatagagaagtgaaacattctaaaaacaatttcttctcagactgtgacccaatttcttgttgaaaaatatagtcactgtggctgtgttatgtaatacctgcctgtcattacttcttgtggtcattctgtgtctgaaaaagtcatgctaaagaatcttttagtttatttgtgtaagcttcattattaagagactttcccctctttttatcctttaaggtcttgatttcccagttaaagatgttcttcacccgaatgcagtctttcctgttggtaaaataagacaaccatcaacattgcctgtttgtctgcttttgaatctcttaaggatggatgtttgtaagatgttgcttaatacagtctggaatactctgtccatttgttgaattgtaaatgactttcaaatgtgcaagttctgttaaatacaaagagaacctctatgggtaacttttgtgttgaagaagtcatttgtcaaccatggtaaaacttgcaaacccactttatacagagtggattcttgaagctatacagaaaataaaaaagcaaaagcaaaggccctctgaagagagaatctgccatgcggtcagtacttcccatgggttggataagaagacagtctctgaacagctggaactcagtgttcaggatggctcagttctcaaagtcaccaacaaaggccttgcctcctataaggacccagacaaccctgggcgcttttcatcagttaaaccaggcacttttcctaagtcagccaaggggtctagaggatcatgtaatgatctccgcaatgtggattggaataaacttttaaggagagcaattgaaggacttgaggagccgaatggctcctccctgaagaacatagagaagtatctcagaagtcaaagtgatctcacaagcaccaccaacaacccagcctttcagcagcggctgcgactgggggccaaacgcgctgtgaataatgggaggttactgaaagacggaccgcagtacagggtcaattatgggagcttagatggcaaaggggcacctcagtatcccagtgcattcccatcctcgctcccacctgtcagccttctaccccatgagaaagaccaggtaagcgaaggagtaatgttcgtgcattctcactactgtccttttgtcttttacggtttcacttaagttttatgtggacaaaagttctgaataaagtttgataaaattgaatgttttgccttagagcaggcttttgtattttaaaatgtatatattgtactgcattgtgtggaggacttcctcactggttggccaagaatttaatggaagagtcatgtggtttgtttttaagctctaattgctaactggttggtgtctgaagggaccaggaaggataatattgatctttcttcatccaggcagggtcatatatatttcagaaatctacgaaaaggccatcgtatatttttctctttattactattttcaaagaagaatctacagacttcttattttactattattatttttttgagacagaatctagctctgtcgcctaggctggagtgcagtggcgcagtcttgactcactgcaacctctgcctcccaggtttaagcgattctcctgcctcagcctcccaagtagctgggattacaggcacctgctaccacacctggctaatttttgtatttttaatagagacaggacttcaccatcttggccaggctggtctcaagctcctgacctcaagtgatgcgcccgcctcggcctcccaaagcgctgggattagaggcgtgagccaccatgcccagctagacttcttattttaatggtgataatctatgcttttttttttgagatggagttttgctcttgttgcccaggctggagtgcagtggcacaatctcggctcactgcaacctctgcctcccgggttcaagtgattcttctgcctcagcctacctagtagctgggattacaggcacatgccaccatgcccagctaatttttgtatttttagtagagaccaggtttcaccatgttggccgggctagtctcgaactcctgacttcaggtgatccacccgctttggtctcccaaagtgttgggattacaggcgtgagacaccatgcctggctgataatctatgcatgtaagaagttattttaatacgtcacctaaatccctcatttcaataaaaagtcattttttattgtccacttctctgtgttgtaggtgaatgtttattttgtctcatacagtatctttttaaaatactctgatttcttgggccttatgttatttctatagtatttataaatatatggcagaattctccttacattactgctaccactttaagtttttggttgagtaagatttgtctttgtttcaaagctacagtatttacttcccaaactaaacacaaagtagagcagcagaaagttatttatagttcatgtctagttttggggtttattctctgtcttttgggtgagcagatatattgatatcagttaattttattaatacatgttataaaacattaatcattgttgatagaaaggtggttttggctgggcagggtggctcctgcctgtagtcccagcaccttgggaggccagggtgggaggatcacttgagcccaggagttcaagactagcctgggcaacatagtaagacccctgtctctacaaaaaaatcaaagaattagccaggcttggtgaagcacatgtgtagtcccagctacttgggaggctgaggtgggaggatcacttgagcatgggaggtagaggctgcagtgagccttgattgtactccagcctgggtgatagagtgagatcctgtcccaaagataaagaaaggaagaaagaaaaggtggttttggccaggcacagtggctcatgcctgtaatcccagcactttgggaggctgaggtgggccaattgcctgagtttgagaccagcctggccaacatggtgaaaccccatctctactaaatatacaaaaaaattaggcaggcgtggtggggggcacctgtagtcccagctatttgggaggctgaggcaggagaatcccttaaacccgggaggcagacgttgcagtgagctgagattgtgccactgcactccagcctgggtgacagagcgagactctgtctcaaaaaaaaaaaaaaaaacaaaaaaaaaaagaaggaaagaaatggtggttttattcatggtttactgcagccttgaccttttgggatcaagtgttcctcccaagtaactgggaatacaggtgtatgccaccatgcccagctaagtttttaaattttttgtagagatggggttttgccatgttgcctgggctaagtacagtttagaaacaattgaaacatgcatgttaggaaaagttatgctcctcttgtttggataccatgaacccttgaaatggaacctgttttcctcaatgctttagatcagatcagcccatggaaaggcaaaccacctggtcctacaaattggataggaccaggtggtttgcctttccatgggctgatctaaaaggctggagtgcagtggtgtcacctcggctcactgcaacctccacctcccgggttcaagtgatgctctcacctcagccacccgagcagctgggactacaggtgcacaccaccacgcccggctaatttttgtactttttgtaaagatgaggtttctcgatgttgcccaggctggtctcgatctcctgggctcaagacatccttccgcctcggcctcccaaggtgctgggattataggcatgagccactgtgcctggccaacatttatttgttaactatatttttattttgttagtcttctgccacatttatttgatccttaggtggttgttgtgtttgtgtaaccaacctctagttctctgtggcagaatgtgggcataaagaaagaagtaaagttatgaaattttcttcttaataacatttgtttaaaagaaaatacaaaaagccacttaaatcctaattcatatgtctgacacagccaaatcagggacctctgtttttaattaaatacatatgtatatatatatttttgttttgtttttttgttttttttgagatggagtcttgctctgtcaccaggctggagtacagtggcatgatcttggctcactgcagcctctgcctcccaggttcaagtgatttccttgccttaacttcccgagtagctgggactacaggagcgtgccaccatgcctggccaattttttgtattttagtagagacggggtttcaccatgttggccaggatggcctcaatctcctgacctcatggtccacctgccttagcctcccaaaatgctgggattacaggcgtgagccactgtgcccagccttaattaaatattttttataaaagcttatactgtgaagaaattccttaagggactatagagccatttcttgatggatttggatatctttgtttttaaaaatatgtacactaccctaaggtatgttaaggttttataatgaacaggtacgtggactaattcaggtagctttaggcaatttaatagtatgtttcaataattttgtgatccaggggatactttttacttgtgatggaagagtcagtacaaattttccacagtatcttctgatccttcgctttaaccttgcccgtcatttcttgccaaccttatcatatttttttcaggcagcatctgtacagaagtatttttagtctaaaggaaaattcatgtctgaaagtgtctaggattgagagcagagtaatttattgcttagcaggcaattgttactgctctttttatgatgctgatctttaaattgtttagttagcatcatgctataatgaggaaagctgagaaatgttttctagaatttttacttgatgaaatttggagactaattctattaagtaatcatttgattcttaaaaaacaaaaataaataaaaatcagtttaaacaaagttggcaacatgtttgtattctttaatgaaatagcatttttttccagctgggtgcagtggctcatgcctgtaatcccagcactttgggaggccgaggtgggtggatcacctgaggtcagcagttcaagaccagcctgaccaacatggagaaacctcgtctctattaaaaaaatacaaaagtagccgggcatggtggtgcatgcctgtaatcccagctgctggggaggctgaggcaggagaattgcttgaacttgggaggcagagattgcagtgagccgagattgcgccattgcattccagcctgggcaacaaaagcgaaactccatctcaaaaaaaaaaataaataaataaaatagcatttttccttaaaaaatgtgagaaaattacaacataatatattaccctttgaaattaaaagtgatttaatagtttaaaaccatgtaaactcgctaagtaaatttaatagaaattcttagcccgggatccacaaatgaacttgggtgggtatcccacaaatcctctgaaatagagtgtgaagtcatgtgtgtgtatccatgtttttctttttttttctttttctttttctttttttttttttttgagacatagtttcactcttgtcacccaggctggagtacaatggcacaatcatggcccactgcaacctctgtctcccaggttcaagtgactcttctgcctcagcctccctagtagctgggattacaggcgtgcgccaccatgcctggctaatttttgcattttcagtagagacggggtttcaccatgttggccaggctggtcttgaactcctgacctcaggtgatccacccacctcagcctcccaaagtgctgggattataggcatgagcctctgtgcctggcctccacatgtttttctatggctagggtctatagcaagcttgtccaacccatggcccatgggctagatgcggccctgaatggctttgaatgcagcccaacacaaattcgtaaactttcttaaaacataaagagatttttggcttgcggcgtggtggcacacgcctataatcccagctactcaggaggctgaggcacaagaattgtttgaacctgggaggcggaggttgcagttagctgagattgaggcactgcactccagcctgggcgacagagcaacacttcgtttcaacaacaacaacaagaacaacaacaacaacaacaacatttttttgtggtttttaatttttttttttttaagctcactagctattgttagtgtattttatatgtggccctagacaattcttcttccagtgtggcccagggaagccaaaagattggacactcctggtctacatcttttgtcaaaggcacccaaaatgcctagtagccattttaaaatagtttgagtttcttatactaaatcatagtatgctaattgtcgacctatgatgattcttcctttggctgctgaacttggattcatatgtagattgattgtactataatttcctatatataagactttttctaatatatttgaaaagattatcattgttcttgatgtgcttgaagtcataggatttgccttgcattgtgggaggaaatttatgatataagtgaaaacagttcagaaatggagtgatctcaattacaatctagtcaactaatgccttttttttgagacagagtgtcactgtgtcacccagtctggagtgcagtggcatgatcttggctccctgcaacctcagcatcccaggttcaaacaattcttgtgcctcagcctcccgagtagctgggattacaggtgtgtgccaccacactgggctaatttttgtattttagtagagatggggtttcattaatgttggccaggctggccttgaactcctggcctcaagtgatccgcctgccttggcctcccaaaatgctgggattatagacgtgagctactatgccccatgcctggcctaactaatgacttttttttttttgagatggaatctcactctgtcatccagactggagtacgctggtgccatctcagctcactgcaacctccgcctcccagttcaagtgattctcctgcatcagcctcccaagtagctgggattacaggcacgcaccaccaagcccggctaattttagtatttttagtagagacagggtttcaccatgttgaccaggctggtctcgaactcgtgatctcaagtgatccgcctgccttggcatctcaaagtgctaggtaggattacaggcttgtgagccaccgtgcctggccatgactttcaagaagctgtttattctggttacttttttgagcagttacattaaatgtaaaacaaaataaaaatagtaagaataataactaacgttttgtaagtgttaaatgctggcactattccaagtgctttacatttattatctccttgacttgtcacaataactgcaagggaggtagattattacccttattttacagatgaaaaaatgaggctgaaagcttaagtgatttgcccaaggtcactgatagagctagtgagtggtgaagccaagattctgacgagacagtctgacctcagagctctttaccactgggcagtacactggtcaacagtggtggctttttttttttttttgagacagagtctcgctctgtcgcccaggctggagtgcagtggcatgatctcgcctcactgcaagctccgccttccgggttcacgccattctcctgcctcagcctcctgagtagctgggactacaggcgcccaccaccacgcccggctaattttttgtatttttagtagagacggggtttcaccgtgttagccaggatggtctcaatctcctgacctcgtgatccacctgcctcggcctgtggtggctttttattaacagtaaaagtatctcttccagttcttcaaatgattagaagcagttttgccccaacaaatagatttccagcattttaaatttggtagatgcaatgagcttattatagtttttaaagtagatactatttataatattagcaatatggaaaggcagtagagaaagtagtaagtctgtgtctaattagattgaacatcatcatcattccgatgcatgactgctaggaggaatacaatgcaagttaaaatagaagggctccttcctttctgaaatgtaattgcacatcttctgatagtctggaattcaaattgggtattaccacactggcttcttagcataaattctttgtatttatttaagaaagctctcttcggtgaggtgatatggaaatgaattaaaccactgaagataaaactttatctttgacttggtgagggaactcctaaaggatagtattaatgtttctcattaaaagtagtaaagctcaattaggtcagattatgaggactttggaaagtcacatattctaagagagacttccattatcactgcgcactttgtagcattaagattccatttgaacatttgagctttagcatttttataaaatcagtttagttccatttaaaataaattccatagtatttcactttagtgagaatgtcttcataaaatttattaagtgtcaagtcttggtctgtttccagtgtagtacataatgtgggaattctcattctaggttggcatcgtaattggaaggtgggacactttcagtatcaagtagggcttctgatgttttttctgttgaagaaatatttgtattagaatcttacaaaaagccttcaaacataaacaaaattacaaaaacagtgatactgtcaataagaaaaaaatcaaaatgatttttttttttttggatacagagtcttgctctgttgcccaggccggagtgcagtggcgcaatctcggctcactgcagctgccgcctctcgggttcaagcgattctcctgcctcagcctcctgagtagttggggattacaggcatgtgccaccatgcccggctaatttttgtatttttagtagagacagggtttcaccatgttggtcaggctgataagaatgattttttttttttttttttggagatggagtcttgctatgttgccaggctggagtgcagtggcgcgatctcggctcactacaacctccgcctccctggttcaagcaattctcctgcctcagcctctggagtagctagactacagacgtgcaccaccacgcccagctaatttttgtatttttagtagaaacggggtttcaccatattggccaggatggtctcaatctcttgacctagtgatccacctgcctcggcctcccaaagtgctgggattacaggcatgagccactgtgtctggccacaaaatgatttttaaaaggagttcagatgatcagaaatggggttgaaagacaaacgtaggacccttgttatgtgtggtcttggcttattcagttgtttattctatttctcctgccccttttagagagatacgttgttagggtttttggcactgttattaatatgaaatatttctacaaatagaagataaatgtacatcctacagcagttgcttgagttgtttacacacatgaattagataagtttatttttagattttcttttcttctgttttctccattctgttttctcctcttcagtccccttaaccctgccctagagcagaccctcctcatctgttctgggacttttccaatagcctgtactttatgaaggactattcattagtccatattgttctttgatgtggcaggcttccagaagtctctcagccctaggggaattgttcatagtctcaggcaactctggatcttttttggcagaaatgtgtatattttttatctgctaattatagagcctgaatgtcctcctctctgttgaccttcttagttttcctttgaattggtatcctttgtgttgcagatgtcatctttcttgaagagtgcttgattatgtgtatttaactgaaaatcgaataaatctctaaatattgtaaaatatgctcttcaaaataacctgcattttggaattggtatggataaagtcagttttagaatcactaaagtcagacagaaacctattgtaatgtgaaagacgaggtggatcaaatacttgctgttccagggtcatggaaggaaaaaaattgcagttcatgttcttcttataattaagcttcagaagttcttcacaatagcagtgtctgaggactgcttttgtgagcaggtagtaccagttgttgagacattgttgagagagcacatgaattgtctcaaactagttagttgggtcaagggaaagataaaatgaagggtgaatgagtctttctattgtactctgaggcatgacagcgtgttccacttttgagcttttatcaagatgggacttgtctagacttctaatgaaatgggcttcaggtaaagtagaaacattatgtcaagaggatttttggttgttcaaatgaatgttaaacattcttttaactctttggatcttagatagatttgatagttgtgatacctttactgtatgtaacacatgatcctgtcctgaatgatcagcagctttcaggagttactcttgtattcccagctacatttgtgatactttcagtgctaagaaaatctatattctgtagctttgaagttatttaacagttaagtactatttgctggtttattctgattttgtcttaaatgacaaatattttattcatcctttctcttcaaacattatttaacaaatgtacgttttaatgtttctcaaaaatgaaggtctatattctttttatatgttttatctttgtatgttatttctttcatctttttttttttttttttttttctgagacagggtctcactctgttacccaggctggagtgcagtggtttgatcatggctcactgcagcctcgacctcccgggctcaagtgatccttgatcctcccacctcagcctcctgagtaactgggactacaggtgtgcaccaccttgtctggctaatttttttttttcttttttttgagacagtcttactctgttgcccaggctggagtgcagccgtgtaatcatggttcactgcagccttgaccttcccaggctcaaatgatccatcctcccacctcagccccccaagtagcttggactacaggcacacaccactacacccagctaatttttgtattttttgtagagatagggtttcgccacgttgcccaggctggtcttgaacgcctgagctcaagcagttcacacacctcggcctcccaaagtactggggttataggcgtgagccaccgtgctcagccttttatttttaatatataagaaatgccttttttttttttttttttttaatttgagatggagtcttgctgtcttgcccaggctggagtgtagtggcatggtctcggctcactgcaacctccgcctcccaggttaaagcaattctcctgtcttggcctcccgagtagctgggattacaggcatgtgccaccactcctggctaatttttttgtatttttagtagagacgggggtttcaccatattggccaggctggtctcgaactcctgaccttgtgatctgcccacctcggcctcccaaagtgctgggattagaggcatgccccaccacgcccagcccattgttttatcatgacagtagcaatgtgttttaattgtaaaattcttgactttttgttttgtttataaacttccttttcttggccctgtgccttaaactacagtagattaggtgaaactgttctctgatcacactagcatttaaaatatgaacctgaatcttctcaggtactttgatctctccaatctattaatgtttctgagtacataaacatcaattagctcaccaaattaaagttagcaaatgcgtcagccatgtaatttgcatgtgacattttgagttagcagggccaagagggaagtatgtttttgtgagtgggtgtgcttatctctctgtcttcaggtggtgatggaaagttgtacatgtaagagaaggagttgtggcagtggatatgtgaaatgctaactgtacatatgcctctgcttggggcagaagcactttaccagagaagtctccaacagttgcaaactacatattctttttccttatataagtgaatcttttaattagtgtaatattatgtagagtgtatgttttttctgtttttttttaatgaaaggtgatattttgataaatctgcaaaatgagcaatatagacaacattttagagtgaatgatactagatttaaactatgaggctggtctctgcaaagatacaaagtaaatactaatcactggtctaagcaaaatccaggaaggatttttgttaatttgacaagtgggtttagaattctttagccactattttttagaaaccagctttgttcatacatcctttctctaatttgcctcacttttgatctgtgataaaccagctgcaatttggtttcattaacaaacttaactggtcaacagatgttttggctctattttgtcctttctattagaaacagcataggcgtacacagaaaccatgctgggccttttcctgtctgtagctcgacaggcgttacagaagagcaacctaactttacttacaagttcaatttttcttcctcagtatttttattataggtatacaaacattgtagttttgtctcccccatcaagtcggtcttttgttgttaatcttccatctgttagtccagtatacacttctcaccctgctttttagcattgcaaaatcttagcatgcagggaaaaaggtactattgcaggagaggtaattgagatatcagcgactcttccacaattcaagggaaggagtggaactagcctggtgaatttagataatttcttccgtcttctttgatgtcagtgagctgccatatggagagcagtgaggcctgcaggaaggaggtgagccttggtctgggctgcctagggtgttcagagtgacatgggctgagagccagaggcagagcttgactgtttctgttagtagtttctgatgtgaccagccctgctttttgtccaaggtttccctgtcatgcttgccaccctatgggtatgatgaagtttaagaaacagatcataaacattatcttgggaaagagaaacataagaacatattaaaatctagtaataaggccattaaaagatgactcccatttgatatttgaccaacttgttttcaaaattagtattgtaaacacttctgtcttataacaaaacccagctttagctgttgagccttgagttgtgagtaaagcagcagaaaacaggatctgctagtggaagagtattggctgtttgaagaacatcagctgttccaggtagactcctggcagtgtgtgagcagacctgggaaaggcaggcatggagggagctaggaaaatacttctctcctaacctttataatttataaaattagagtatttcataaatattaaaagagtagtacagtaaacactctatttctttcacatagattcaccaattttaacattttgccacattctttctcttcctatatgtgtgtatatgtatatgtttttatacatgggtgtgcgtatatatacagcacatttatatattcacaattttgactaaactgttggaaactaaattacaaatattatatttcacccctaaatacttaataatatatcaaaaatgttctcttatatactatactattacgcaaaaaattcggcagtggaatgagtgttaactgacagtccatatttccccaaatggccccaaaatctcatttataacttttgactttttttgagatggagtctcgctctgttgcccaggctggggtgcagtggtatgatcttagctcactgcaacctccacctcccaggttcaagcaattctcttgcctcagcctcccgagcagctgggactacaggtgcgtgccaccatgcccggctaactttttttatttttagtagtgatggggtttcgccaggttggccaggctggtcttgaactcctgacatcaggtgatctacccgcctaggcctcccaaagtgctgggattaaaggtgtgagccactgcgcctggccaacttttgacttttcatccaggatccaaccaaagatcatatattgcatttggctgtcatgtcacctttaatagagaacagttttccctcctttttgcttctgaagacattgacatttttgaagagtctagggtagttgtcttgtaggatgtcccacaattagtatttgtctgactgtatcctcatgattagattcagagtaaacatttttgacaagaatagcgtgtgggggtctgggagtggtggctcacacctataatcccagcactttgggaggctaagatgggtggactgattgagctcagaagtttgagaccagcctgggaaacatggtgaaaccccgtttctacagaaaatacaaaaaaatcagctgggcgtggtggcatgtgcctgtagtcccagctacttgggagactgaggtagaaggattgcttgaatccaggagatggaggttgcagtaagccaaggtcacaccactgcgctccagcctgggtgacagagtgagactctgtctcaaaaagaaaaaagaaaagaaaaaatactgtatgggggatgttgtatatttcttcttgtgagataccaggagataaataatttcagcttgtctcattactggtggtgcttagtttatcagttggttaaggtggcatctgctagatcttcgtttataaaggcgccttttcccttttgtaattaacaagtaatctgtgcaatgatactttgaaagcatgtgagtaacctttcacccagtgtgtattagttttctattgctgctgtaacaaattacagcaacttaatggtttaacacaacacaaatgtattgtcttacagttcggtaggtcagaagtccaacatgggtttcttaggttaaaatgaaggtgagggcaaggtaatgttcttttctggaggctctaggagagaatcttttcccttgcttttttgagcttctagaggctgcgcatattccttgactcatgatcccttcctccatcttcaaagccagcaatgttgcatctctctgactgttctttcacagtcacatctgcctcttaccacagcctggacagtttttcagcttttaaaggatgcatattattagattgagcccatttggataatccagataatgcccttatctcacagtccttaactttatcatatctgcaaggttattttgccaggtaaggttctgggcattaggaagtagacatttttgggggagcccattattttgcctgccacacagggtttagtattgtcacctaaatcaaattttgcattgggggttgcaaatcattgaaggttttgggctatggtgaaccatgatcaagtctgtttagaaaggaaagagggccaggtgcaggtagctcacatctataatcccaatgctttgggaggccaaggcaggtggatcacttgaggccaggagtttgagatcagcctggacaacatagtgagatcccatctctagaaaaaatttttaaaaattatccaagtgtgatggcacagaactgtagtcctaactacttgggaggctgaggtgggaggattgcctgagtccagaagtttgaggctgtaagtgagctatgatcgtgccactgcactctagcctgggcgactgagcaggactctatttcttaattaaaaaaaaaaaggaaaaaataaccagaaaggaattaatcacagtttatgggagtaatgctagctgaaggccgggggtcaagaggcctgagttttgagtctcatggtacatcctgagtcatttccaggagagcaggaacgggggcgtgcactcttgcctccacttcatgtccctttactcactagttgaagaactgaagaatggatttggcactaatagcttcagagtttttaacaatagaagtttggatgggcaatttttttttttttttttttgagacagggtctcactttgttgcccaggctggaatgcagcggtgtgatcatggctcactgcagccttgacctcctaggctcaagcactcctcccacctcagggtcctggaactacaggggcgtgtgccaccatgcccagctaatttttgtatatttgataggcatgggttttgccattttgcccgggctggtctcgaactccttggctcaagcaatctacccaccttggcctcccaaagttctgggattacaagtgagagccgctatgcctggcccaaaatgatttttgagaagtacatttaaagttgtagagaagggtctttcatttaaatgcccacagggtgcatgaaaaatacaaggtgatttatcaagataggctctttggctcatgcctgtaatcccagcattttgggaggccgaggtgcatggatcacttgaggtccagagttcgagaccagcctgggcaacatggcgaaaccccatctctactaaaaatgtaaaaattagctgggcatggtggctcacgcctgtagtcccagctactcaggaggctgaggcaggagaatcgcttgaaccttggaggtggagattgcggtgagccaatattgtgccactatactccagcctgggcaacagagcaagactccatctctggaactcctgatctcaagtgatctacccaccttggcctcccagagtgctgggattataggcataagccagtgtgccctgcctttgatgatatttcaaagactaagtaacatctgaagaattttatgtcttttatttatttatttagacaacgtcttgctctgttgctcaggctggagtgcagtggcacgatcttggctcact

SEQ ID NO: 638 - DNA, 29839 bp, Homo sapiens
  source 1..29839: mol_type = other DNA
agtgcggctgcgcgtgaggcggcggcgcgccggcgcgcgaggggcggggtgaaaggtcacagcgcggcagcgggtctggctggcggcagcggcgggagggagccgagagacccgagtgcacgtgtggagaagcggcggcacaagcgcggcggcgggagacactcccgcccccaccagactcaagccctcactcgactctcgcggccttcgttgctcgcacagctccctgcccaggctaggaggccggcttgcggggttgagtggcccgagctaagggtgcggagacctaagggcggcgactacgacggcgttgatatcggtggtaacgacggcctcagcaggcggggaagatgaaagggtgaggaagggcagccgggcagggcccggccggtggggtagaagggtccgggcccatgtagagggggagagccgcaaaggcgaggagagattcagggcgaagacgggcggagggagatttctctgcttctcagttccctcggctcccggagggggcggaggcgaggctcgggctgttggcgggctgaagggccagcggaggcaagacccggggggcttcagggtttcggttcggagacgagtgtgggttgttgagtggggagaagcgaccgagtggggcaacatggaaaggctattgtgaagcgcccggggcctccttcccgggagcggaccgctgagccacgccggcccgcagctccaggtggagtggtttggttgtcttccacctccagactcaactctggaactgcggtgtttgacacctttcagtttaattcacgcttgggagctgtgcagaaccttctggaggaagaagaaattggaataaagagcacggggatgagtattaagagctagtgactcaactagatttgggttgggtcacagcgagtggaggagggggagagagcgcgatcactgtagacttggggtgccaacatatttaaggaagtatagggtggatcagtaggtggagctgttgcttcagtagttcactattgcccctgagtgctgaggcggtcctgggtagttctaccacgctgctcctttcaggtgattggcaaagttaatgttcggtctttcaccgtttgcctcttacgtaaaattaggaattattttggatcgactggttaagtttttatgaaatgtctccttaccattaagttgtatagttttaatgtattaattacgtaacatttttccgaagcattgtctcaagccgttttggagcttgtctttaccctcaaagagatgaagctcataaacgttaaaaagctctctgcgatgccatagtttgttgttgtaagtcgattaagaagtcgtaactatgttttaagttaacgaagtcattccaactattcaatagcacttttgaggatgaaataaaagtcactttcaacgtaatctcatactgccccaaacaaggacctaaatattacctctgtgtatcggtatttgaggttcctgaagagattccaagaaagtttaatttggtcttaggtctgtaacatgtttccttactttaattttcctttaaatactggatatttattctaatgttgaattgtatgttttgtactaataatctttaaagtttaagaaccatgaactattcacagtacctgcattgtttcacatcaagttgtaaagagttccagttagggaaatataattgacgggtataggaagtatttgctccacttgaatcatgatcttggaagtttggctatttcagatacaatccaacatatttggagaatgttgtttttctgctatactgcactccttttgttttgttcttttcatttttttttttttaatgaggcagggtctggctctgttgcccaggctggagtgcagtggcgctatctcggcccactgcaacctttgcctccccagctcaagcaatcctcccgcctcagccttccgagtcggtgggacctcaggcgcgcaccaccacgccttgctaattttttgtatattttgtagagacgggggtctgactatgttggccaggctggtctcaaactcctgagctcaagcgatccacccacctctgcctcccaaagtgctgggattacaggtgtgagccactgaacgcggcatatactgcacttcttgaacatggttgctgactcttactcatttttgtactcattgtcaggcactcagtacttgtttgtcatgttctgttaagtaagaaaaatgaggctgaagagttcccagtgttgaaattgccatggatttacgaaggggttgccaggaaattattctgtatgtttagatccaaaatcttcaatctagttcagtctccataggctgtgatgttctttctgatacataacttggcgatagaaatgaagctgaacagtcatattattcacaatctaccttgaattaatatattcatggagcaattatctctgtttaaaatgggtatttacatgtaacctgatgaaggcagatccctagaaataactggccgaatttagaggaaacttacaactattgaatctgtacctttatgccagtaactatgccagtgaagttcctattacttcttatgattgggagcttagaattgtgttctttactgtaaacctttaagatgatttcacaggaataatccctttaacttaacaaatgaactaactcccagatgagatgaaactttttaattttttttgcttctaagtctgtatttaagacactcaacaaatgagttgtgtgaatcttacttgtgcttgttcggatactgaacctacaacagtataggtttaaaataagttaagcgccttgagttccaaaacttgtaccacagtgcacagtgtggtcgattttaaagtcctgactcttaatttggaatggcctgtaaaaacgaaacagtggtcctggttatgtggcttttgtatgaaattttatttgctaagtattctattgtatattgaggtaagtaaacagtaaattgaaatatctaaaattggaaactgcggaagtcccaacacgaagccagtcaaatatttaaaattgtacactgttgcctatgttgcctatcatattgaaacttaaaacttagctggtttttcttcatatttttaccatgagtatttttattagtagtagcagtaggactttccattgtattggcatgtctttcctccatagaagataaatttccggttattaactactgaatgtaatttatatgcacatgtagaagtttgagatatactaggaaatgttgcttacttttgaggttggctgtttttatgaaccagggacattgtagtttgaatttgtgggtgatatttttatctgttcttctctagggaaggcgatttcaagcaagaaggtatgccacagataaccatgactgaggtggcaatgtaattaggcagtgtaatggaaagtataataaaaccaaatcatttagccttcaattgtagtaaagaggtgcaaattagttctaataaaaaatgtctttaacaaaatgtgaatacgtgactaagatgggaaagtaggtagcagtaatataaatatggaacaatgttgactactaattggaatagtaaagggagccattttaccaaataaaattaaaatgtaagattctgcagtcagaaacaaaactttaaaaactccgaacagtggttacctctgacagcatatggactgggaaggggcaaaaggaatgctttttgcatctcagcatagtgagaccttgtctctacaaacaataaagcagccaggagaatcacctgaacctggcaggtggaggttgtagtgagctgagatcgtgccactgcattcctgcctgggcgacagagtgagactctgtctcaaaaaaaaaaaaaaaaaagccaggcatgctggtgcaagtctgtagttccagctacttgggaggctgaggcaggaggatcacttgagcccaggagttcaaggctgcagagagccatgatcttgtcactatatttcagcctgggcaacagagcgaaaactggtcttaaaaaacaaaacaaaacaaaactttttttaaaggtttattgctgttttgtttttcagcaaaaccaaaagctagtcaggctgacgtagcatttgacaccttttataaacctacagtttatacttcttccttctgtgaaacaatttgtggtttgttgattgagatagtgaattttaacaaatactttgtaatgtgcccttgctgtgttgagatgaattcatataaaatataaccttacaccataagtttttttaaaaaatcaatgtactgttctctctaatataaaagaaaaataaaagggaagtaatttataataaaatttatttcagtatttaatgatgtggcacaactatgccataaagcataagatcaagtgtttgcatctatctgtaaatagaatcatcgtgtaatttagaaagtatgtctgctgcctatacagttgtgtgcattgttgactcatgttgtgttgccattagtggtgtaatttcttcctgaaattgcagacaactcttaggaaagctctaaacaaagaataatcaatactttctgagttggaaaagattttttaaagtcacttagtagtccaagcactcatcttattgaatcaagatatattccctgtttatcataatttcaaagatccttacttctgttgtgtgaatattattgcacatgtgatcagtagagtgggaagtgttactgggactcctaattttttcttccaggtattgcttatggctttcagctgtgtgatatctgaagcgatactctttctcaattattcaaatgattggccttcatctttttttaaatgcagcctgcagtaaccaatagaataccagtagtaaccagtagacacattcttcccatcgtgaacgtgagagctatatttaagtctattcaatgcctaacttaatggcacaattttattgttctgtctagtacagtcgtgactagctacagttggcgattgagcagttgaaatgtaccttgtggtctgtggcacagttgccatttcccgggtaagatgtctgcagtctgtgtactgaggacctggagcaggaatgctgggcagctgatttgtttcactgttttccaacatgtagtaatgttcatgttttgaagccaaattatgtgtgtttctttgattatccttcattcaagtatagtcatccacataactttctgaaaacaattaatgctgtatgtggacagcttgttcagttcagattctcagacactgaagaagggattagaaaagtaactgttaatgttatgtaaaagaaggagatacagtgtctcagtttgataacatcggtaaagttcaaagtgataaagcttctgttaccatcgctagtccttatgatggagtcattgaaaactctagcatagtctagatgatattgcctatgtggggaagccattagtaaacatagaaacagaagctttaaagggtactgttaatttgttttaccaaattgattattgtccaccttttgtcattgggtctcaattaaaagtgacctttaaaaaaaaaaaaagaaaaaatgtgccttgtatgacagaactaaattttaaattttaaagtgtgaaagctcggattctcagctgggtactgtggctcacactcgtaatcccgacactttgggaagccaaagcaggaggatcacttgagcccaggagttcaagaccagcctgggctataacatagtgagacctcatctctacaaaaaaatagtaatcataattagctggggtatggtggtgtgtgcctgtagtcccagctacttgggaagtcaagttgggaaaatcacttgagcttaggaggttgaagctgcactgcatcgaggcatgataatgtcactgcactctagcctgggtgacagagggagaccctgtctcaaaaagaaaaaactcacagttattggtccgtttttatgtttgaaacaacttagatatgtggatctactgcagattttgtgaaatgtaaatacagatcaaatatttctaaggaaaatgagtagttgaattgggccatgctgtaagtgtagtaaactggattttaaagacttggaataaaaaaaatttttaaggtaaaataagttttattttgactacatgttgaaatgatttcttccccttgtaaatgtggatgctaaacttgaatgaaaaaaaacttctaagggaaaataagttttattttgactacatgtttaaatgatttctccctcttgtaaatgtggatactaaacttgaatgaaaaagtttttaaggtaaaataagttttattttgattacatgttgaaatgatttcttccccttgtaaatgtgaatactaaacttttttttgttatatcaaggaagtcttcccaagatattaaacattttaaaattttgtatgtcacttgtatatctgttggacggtcctgtgctaaacccataaaaaagccaaagttgtataaaacaggatcttttcccttagaatctacttcccatcccagatggtagatatttctaaatgtttcaacttgtgggccaacagaaagtttatggctgtttatacctctgtgttgaaggattttgaggcgaatctggttttttggttaaagtgttgccattcagtcacttggtctgctgtgaaagggtagggaagagataattggaagtattcatctttcttgagctagtgcaagctatattctgcctctgtcagaaacttgttctccaactccagaggcttcttacctcagtcccctatagtgctgtagtgaatgcttgttcataaaactacctgacacacatccttaattacttcttttggataatttcctaagaatgaattttctggatcaaaaggtactgacatttttaaagctctggtgtttcttgccagttgacctccaaaaagatagtagcaatttattctgtcagcaatgtatgagaatgtccttctctttccaagggctaacgaaagggaagggcacgtggaaaaacctcaggaaaacatattgtggctgacatttcagccatgaatggtataaattttctttgcgatgcgttcaatacatttaaatacattaaaatgatagaaataactaatagcttccttacaagttgtctttgagtaaatattcacattttgctttaactctacttttactttgctgattaggtgataaacggcatttccttttttaaagatttgatgattatttagtgaagtttggacatataccatttttactggtcattttgtgacgtaagttgtttataacttacccagttattaattgggatgatgattgccttaacttcaaattgtaaaacaaagatgatattctttagagagtaggggtgagacattagggcccaggtcatttgaaataaaaatttttagaggtgaaacttggtaaacaaggataagcaaggaaaatattttgtacttaggagcacttcaaacacttctttttccagaaaattagggtatatttaaaggtatgtttgggttcccctgcttctagtgtatataatttgttacttattttaaaggaaacttactataatgcaaaaagcattgaactaaaagcaaccaagttttagttttatgtaccacaaatgatagctagcagtagggtcactaataaaggtgtttcaacctctgggccttggttgtcttttaagggaatggcttgaatctgaataggaatggccaaagattctagcttgtgtgccagttctattttgtaggtatctggggaagcagaattaacagagattaaaataggacataaagaatacatagaaaactaaatttctctattggatgaacggtgggctcttcatagattgtagaggtagttctaatttcttatggaaagtgatgctgtctcttttggatgtgttgaatttgagattcttgtagagatcaccagtaaccagtcagaaatattggcttggattcagagatttggaaataaaaacattaacatttagatggcagtgaaagaaaagccataagctggcaaggagctttcttaactgaatatgtggatgacagtggaaacaattttccacagaataatttgattctttttaggttatattcttgagcagattgtgcccatgtgtgtatttagcattagtaaccgaccatataattgctgagatttttatacctctgatacttgcaggcatacagtttggagagctgatccaccccaccttcgcttttttcaaagaaatagagtcagggttttgccatgttgcccaggctggtctcgaactcctggactcaaaggatctgcccactttggcttcccaaaatgctgggattacaggcctgagctaccatgcccagccccttttacttttaaaattactgccaaacctctagatcagtaactgccaactagggcaaccccccaccccctcttcccaattattggtaatgtctgaagacacttttggttgtcctaacaggatgtaggagagttctggcacccagtgggtaaaatctagggatgctgctgagtattctgcagtgtaccagaaaggccctttacaacaaagaataatgtagccccaaatgctaatgttgagattgagaaaccctgctgtaaaatctaggtaagatggaacttactaaaagtaatttagtaattccctgaaataatctgagatcctgccctaagtcttatagttttatagaagaggtaagatacaagaataaatgtttgtagcagggcagaggtgccttgtaaggacagaaacggtaatatagttcatatgaggtagaaatctcagtgggtgacaggttaagacctcatgagcagttagtgttgaaactgtgtgataaattctgaatgggcttactttcaggttgaaggaatttattttccagaggaatcactctttcatgtaatttactacagggtaagagtttagaaacattactgctagcaaagaaaaaattacctcccttctaaccccttgacatttttaaatcaaaggaccatttgatcctaactaaaagatgctttgagttttatgcaaatgcacctttatcagtatacgtcagaaaaatgtttaccaatagatctctctccctttttttaaaaagtgaccttgaggggtaaaggtcattcctttgacagaaattgttgtgactgatcttgtgctacaatggaaattaagagacataggcttgattctggctttatccataactgtctgtataactataggtacatttgtctcttgggggtttagtttcatcatctgtaaaatgaagggggagtagatccagtccagatcaaatactctgcacaacaaatgaacaggcagttaaaattatgtgccaaggtactcttaatactcactaaaagtataaacaggctttaagctttctctatacttcattttcactttttgttatataacttaaaaagtcacactttgagcctggtgtggtgatgtggtgcctgttgtcccaatagctcaggaggctgaggctggaagatcacttaagcccagcagttcaaggcccctgggcaatatagtgaaaccatccttcttaaaaaaaccactttttaccgagacccacttttgtggagtcatatccccatcttgtggcctttcagaatattgctactaaatgtttttacaattatgagcataattggcaatgggttgaatagctaaaaacatttgcgtccataatatctgacatcgctgtgccaaaatttaatgtgcattaactcatcacactgcttgatttataggccaagggtaaagttttcttactagcatagtctaacccagaagttatgtacgtgaaattataatcttgtggcacaaattaatagccgatgggagtctataaagaggcagataagtaactgcatttttcacatttaaggacttaatataaagtatctgtaggcactttggcagtagcggtttcttatttacatcacagtctgtcccacttttccttagtctaaaaattctggtatgaaaatgccttggggtttgattgttatgaatctgaaaaacaagaaaaagcacatcacaccagtttacttgagctgagagagtaatttagtgtatttaataacaactgtcttcaattttctacaggtagggctgtaaactctactgccaacaggaaccacataaagtagatcagtaaagcaagagaagctgcaatttgagactttatgtaaaatcgtttcatttaaatattagcatcgaacttaatgtaaaaaccagaaacaaaaaggaaaaactgtgaatcaggccaggcacggtggcttgcgcctgtaatcccagcactttcgggggccgaggtgagagaccaggaattcgagaccagcagttggagaccagcctggccaacatggcgaaaccctgtctctactaaaaatgcaaaaattagctgggcatggtggcgggcaccgtagtcccagctactcggtaggctgaggcatgagaatcgcttgaacctgggaggcagaggttgcagtaagctgagattgagccactgcactctagcctgagcttctgagggagactgtctcaaaaaccaaacaaacaaaaaacctgtgggtcaaatagttgtgaccacatggctgatttaactcttaggctggcaatttgtgtcttatatacagagtaaaggtcttaaactactgataaattaagatagtctacattgttacatcatattacattcttaacagaagtaagcaaacaattcatgatccgttgtgatcatataggatagtttttccaatgacccgttctctatgcccatccttagcccttgtttccctcagcagatttctcagatttaggaatttacgcacatgccgtgggaaatttaatttagatgggtgttaaatttggatgatgatttacataacaagcttaattacaaaagtaaagctgccaaggtggaatttgagaatctgaatttttaactggcaagatgattctggtatataaccaggtttgggatccattctttgattttgtaacactactcactctccaggttttttcctcccttctcttgaacattgtttcttggacatctttgtaggttcctgttcttttacgtctaaaattcaagtgtttcttacattcttttctttgaccttcttactacagacatccttggtagtctcatatagtcccataatcaaaggttatatgctatgaattagttatgtttcaggaaatagctgtcaaagcaatgtgttataaaagagaattctttcatttaaaaagtccaagtgcatttccctttactacctagtttttatttaacattagcattgcttcagtctcattgggtaacatttagactgcattatataaatcatttttaaaattgcccattcataccttaaaagcgtttgacactagttttgatggaaaaaaaaactatcagaacatgtatttataggtgtttattccaaaagcaaagatgataacagactgtctggacactgctgaaatttggaagagtgatctggtacttaaatggaaggctcactcattcagctctcattcaatttctgttctatataaactgaagccttgtgcagctggggattgagaaatcgtgttttaaatgtttgaaggtcttgcctccttttacttgttcatatagtaagaaataaacgaggaatcatttactttctactttgagttttagtatcaaaaataacatgcctggaaagtactgcagtttgttgtaccttatataatgagtaatgtttgtattttatttaattttttgttagggattctttttcagcttttatcttagatccagggggtacatgtaccggtttgttacgtgggtgtgttgcatgatgctgaggtttagtgtacaattgatcttgtcacctgggtagtgagcatgatacccagcaggtagtttttcacctcttgcccctccctcccttctccctcttctagtagtccccagtatctgttgttcccatctttatgttcatatgtacccagtgttcagctcccacatataagtgagaacatgcagtattgagtgttctgttactttaatttacttaggataatggcctccagctgcatccatattgctgcaaagaatgtgattttgttcttttttatggttatgtagtattccatggtgtatgtgtggaaatctttaaacatttatgaaatgaaacagtagaatgagccccatcaatcaactacagtaagtaggatcgattcccattttatttcatctttgtttgacctatacttttcccttttccttttttgctggggcacttccaaaagaaactctagatgtagtatccttttccaaatctctaaatactttaatatttaatatgaatattttttctgtctttttttttttttttttttttttggagacagagtcttgctctgtcacccaggctggagtgcagcatcgtgatctcagctcactgaaacctccacctcccaggttcaaacgattctcctgcctcagcctcctgagtagctgggattacaggtgtgcgccaccacacctggctaatttttggtacttttagtagagatggggtttcgccatgttggccaggctggtcttaaactccctaactcaggtgattcacctgcctcagccgcccaaagtgctgggattacaggcatgagccaccatgcctggcctttaatatctttaatatgaatctttaacagagaaggattttttaaacaattacaataccttatattatcttatgatctgatatccagtttgtacttattttctgtcttgtaaatgtcttttaaaaatagattttttttcacattagaatccagaaaggttcacaaattgcagttggctgaaatgccttatctcttacgctaatagttcctccactaattaaaaaaaaaaattgagtagttttagatttttagaaaaattgcaaagatgctataaagaattcccagttttctcatattactaacaccttacattagtatgataccgtggtaagaaaatgaaaagacaagctacaattgagattagttgcaaaatcatctgtctgataaaggacttgtatccagaatatataaagaactcttacaactcactaagacaagcaatccaatgtaaaagcaggagtacaaaattagtgtaaaaaattctaggtttattctcagggctaaaccatgggcaagagatttaaagagtgattttacaaaaaaaaaaaaaaatggctaatagccatacaaaaacatactcaacatcattagtcagtagagaaatacgtccaatgagatatcacatcacaccagtagaatggctattaacagaaaggcaataaaaggtatagagaaactggaaccctgatacattactgatggaaatataaacgtcacagccacagtttagaggttaaatgtctgaaatgggtttcactgggctaaaatcaaggtgttggcagacagagtgattttaaatagtgtccttcaaaaattattatctatctggaacctcagcatgtgagctaagttagaaatagggtctttgcagatataattgagttcatatgaattagagcaggtcctgaatgtaatgactagcgtccttataagaagagtaaaggaaacagacacaccacaaagacaatgtgaagatggaggtaggctgccccaagcgtggggccaccgaagctggaaggggcaaggaaagattcctagagttttgagaacatggccctgctgacagcttgattttggacttctagcctcctgtactataagagaataagtttgttgcttcaagccactgagtttgtggtaatttttaaagatagccctaggatactaatacagtaggattgtgtttctcctagaggcccttgagaagaatctttccttggctcttccagcttctataggcaacctgcattccttagctcctggctcttccttcatcttcaaagccagccatagagcatcttaaaatcttttttgtctgaatagtattctgttgtcatatctcctctgtttattaaggacttatgtgattatattaggcccgtctggataatcatggttgatcttcacatctcaagatcttaatcacatctgcaaagtctgttcttccatgtaaagtaagatattcaagattcctgggattatgacatgtacatcctttggttgggggtgaggggcattattgtacctaccacagacagtttttttaaaagctaaaaatatttgtcatacaacctagcaatcccacttccagttatctaccagaaaaaaaactaaggcgtatgtccacacgcagacttttatgcaatattcatagcagcattataatagtcaagatgcacatacagcccaaatatccatcagctggtgaatgaataaacaaaatgtggtataaactataccaaaatagaatactattcagcaataaaaagatcagactgctgacgtgttaaaacagaggtgaacgtcaaaatcatgccacatgaaagaagcctagtgcaaaagatcacttttcttgtgtgcttccatttatattaaatgtctagtaaaggcacatttgtagaaagagaaagtagatttagtggctgtctaggggtaggaaaggggattgattgcggatgcacctaaggaattttgagactgtaatgagaatgttccaaaactgaattgcaatgatagttgcacaactttatagtaaaaaaatcactgaagtgtgcacttaaaacatggcttttatggtatataaattatacctcaagaaggctgcttaaggagaaagaaatgagggggatttaagaaagagggagttcatacacctaaatgtaaaatgtctagagaaaacataaaaatctttgtgatcttgagttaggcatatttcttgaatacaactcagaaataaatccatgaaataaatttgtcaaaatgtaaaactttcccaaaaacaataagaaaatgaaaaaagccatagactggtaaaaattctttgcaacatacataacttacaaatgacaagtatccataatacacccaaaactcaagaaaaaccagtttttaaaaaattgacaagaaatctgaactaattaatttatcaaagatgataacatgaatggcaaagaaatacatgaaaagatgctcacttcatttattatttagggggatgcaaattaaaaaccacaataaattgtcactacatacctgttagcataaattttaaaagttaacaatgccaaatgctgatgaagattcagaacagtagaactcctatacacttaagacctagcattcccactcctaggtatttactaagagaaataagaacttatgttcataccaaaacttatatgtaaatgtttataggaattttacttgcagttacctaaaattgtaaacaactgctcttcaacaagaggataaatttacagtacatccacataatggaataccattcagcattaacaaggaatgagctattgatatgcacaacaccggggtgagtctcagacattatgctaaatgaaagaaaccaaacaagcagctatgtattttgtgattccatttatgtgacattcttgaaaaggcaaaactttggggaacagaaaagagatttgtggctgcttgggagttgaactttaaagggtcatgtgggaggttttgggagtaattaaattgtatattttggtaatggttacatgattatatgtatttgtaaaaactcagaactatacaccaaaaagatgaatttaattttatgtaagctttaaaaagtttttttttttcttttttttttccgaaagccaaggaatcaatcaaaactgatgcccataaaaggcaggaaaatgaagaacagttaatacttggtacaaatagaaaattgcaagctgatggacttgaatcaactaaatcagtaattcaataattacattaaatctttttttgaacagtctcactctgtcactcaggctggagtgcagtggtggcgatctcggctcactgcaacctctgcccttgggttcaagcaattctcctgcctcagcctctcaagtagctgggactaaaggcacgcgccaccacacctggctaattttttgtatttttagtagagacagggtttcaccatgttggccaggccagtgttgaactcctggcttcaagtgatccacccgagtcagccttccaaagtgctgggattgcaggtgtgagccactgtgcctggcccattaaatcttaatggaccagatactccaattgtcagattaaaagaataagatccaactatatgctatttacacacactttaaatataaggacacaaggaaaagtaaaaagaaaaaggtaaaagatagaacatgaaactttgatttgaaggaagctgtaaagccaggcctggtggctcatccctgtaatcccagcactttgggaggctgaggcaggtggattgcttgagttcaggagttcaagaccagcctgagcaacatggtgaaatcctgtctctaccaaaaatacaaaaacaaaacaaaacaaaaatagctgaaagtggtggcatgcatttgaggtctcagctacttggaaggctgaggcaggaggatcccctgagcccgtaggcggagcttgcagcaagccaagactgtgctactgcactctagcctgggcaacagagttgagaccctcatctcaaaaaaaaaaaaagaaagaaagaaaactgcgtattaatgaacaaagtagactttaaaacaaggagtattgccagcaaaaaggatatttcaaaatgataaaagcgtcaaattatcaacagtagtcctaaatatttgtgcactttctaatttgaaaatacctgaagctttcttttattgattgaatgaaacagcagaaaggaagaaacacttccaaactttctttgaggccaagataaccctgataagaaaacatatcaagaatattacaagggctgggtgcagtggctcacgcctataatcccaacactttgggaggccagggtgggcgagcctatcacttgaggccataatttcaagaccagcctggccaacatggtgaaaccccatctctactaaaaatacaaaaattagttaggagtggtggcacatgcttgtaatgacagctgtttaggaggctgaggcaggaggattgcttgaacccaggatgcggaggttgcaataagctgagattgcaccgctacactccagcctgagcaacagagggagactccgtctcaaaaaaaaaaaaaaagaaaaggaaaaaagtgtatcaagagtaagcctttttgagataccatgtgaacaaagacttggagttaacatatactgcagccaaggatggagaggccatcaattgacaggaaaaactgcaagcaaagcagattttggaacaaagatttgaaattgtttgcagtatgttcactttgaagtgtctgctggagattgcttggatctaggaatgtagagttcaggagtgaactataggctagagacagaaatttggaaattggcagcattaaagccacacaactacaagattgaatgagatcaccaagagaataattatagagaagataaccaaatgcgtccatatacgaggccgtcataaaattggttctttttcagcttccgcatttatacacaagcatacttgatgttttagccatatcaaactgactgattttcggactacatcactgctgttttgttcatgttttattagactgcatctcttgcccttccacaggataagctagtcgttcttcaaaatgtttcccattgtcaccttcattctagtattatttttgtactatatgtacatacactgttagtagcacattgtatatacctgtctttcctaccagatgtaaacacctttgcattccagatgcataacacatagatactcaaatatttattgaaatataattgatttatgctttaggcaactctattatgttcataagaactttagaaaaatttagattgacagaattttttaaatctccattaggttagttttttaatagagaatttggacttttaacttaattttttataggttattctaactaaaacctttttggttgtttacattcaagtaatgttattttcttgacatgtctacatatcccttatgcttatgcctttttttttttttaactccgtgttccttgctaacttatatttacaagttgattatagtactttgatatatttagaaaatccatgtcttaaaataatttggagctaagtgatcaggattacagaagtattccatttcagtcagacatatcatgttaatgagagttaaactatatttgaagctcagttttgctgacaaggttacattaagtgaacattttgaaatttttctagcatatttgtttcttgcaaaaatcaaattaatttctcaaaaacagcttaatttttccaacagctaccaaacaatacttaaatctcaaatttgtttaaagcgtgtatatacatatatataacgcgcatagaaaaatattggaagactatcagcaaacttatttctggccatattattgcaggatattttccctttctacgtcatttctatggtgtgctttaaaaaaaaaaaaggcatgtatttttttaattagttaggggaagattaagctgcctatttcctaatggttcaatattgttttctctatttaggctttatctggccaccctaatggaaactttttttagtagttaacttttattagactcattgtagcacagtgcactataaccactttttcttcttgtatgaagtcaagaaatacctggtattattctttgaaaactgtaagtatgcttgaagcctagttactacctacaaatgattcctaaagttttaaaaacctcaagttctttcatttatactttagaagcttgactttgtaggttcttaagttactattattgttgatacttcaacttcataatgtaattttaaatcactttttaaatactaagacttttttttaaatgagatgctctaaattaatacaaactgtatataaaaaaattactacacccaacttgtggcactatggtaagttaaacaggagacagtgtaggtaagatgtgatccctgtcagctactgcatttttaaaggatcctatattttggccaggcacagtggctcacgcctgtaggcccagcactttggtaggccaaggtgggcggatcacttgagctcaggaactgtagaccagcctgggcaacatggtgaaaccctgtctctacaaaaaattcaaaaatcagctgggcgtggtggcatgtgccttcctcagctactcgttaggctgaggtgggaagatcacttgagcctgagaagcggaggctgctgtgacctgtaattatgcctgggcaacagagcaaccctgtctcaaaaaaagaaaaataaaggattctatagtttacaggataacagtatccacagatttttctttctttctttcttttttttttttttgaggcggagtcttgctctctcgcccaggctggagtacagtggtgcgatcttggctcactgcaacctctgcctcctgggttccagtgattcttctgcctcagcctcccgggtagctgtgactacaggcacgtgccaccacaccgggctaatttttgtatttttagtagagacagagtttcaccatattggccaggctggtctcaaactcttgaccttatgatctgcccaccttggcctcccaatttttttttttttttatgtgaatggtagatagtggggaaagtgagcccagtagattttagtcagaaaagtgttatgaagagggggagttctgtgaatgagatgtaatctacttaaagaaaacatgaatttcatacagggaattcattatagttgtcaaatacttgggatgagaaaagactatacttaagtgactagaagttggaagagactataacaagaaaatgtctatttttttatttttacttttttaaacttcctatggtgctgaggggttttttaaatatataaatctcttacccttttactaacatgtttgtttatttaatctgtgtggttgctaagaaactatgttcagattttaggaagacatacaagacatgaaaagatcattggttgcaacaaataatacagattagtggtataaaaaataatcaaggcaggaaggataaagttccaaatgagctaagcctttcaaaactgctaagtatgacagaaacgatgctttatgctgtcttttgtgttcttcatacagactacttaaatagggggtaaaagtctcttgtttttgcctctaactccttaccaagtagaatgttctccaaactgggcattatagagtaatacatcttagagaactttgtactataagataaaatattacatcatattcctctccagataaatcaaatttagaaatttctttttttatctgtaattattgctgttttttgttttgtttttgagacagtctgtcacccaggctggaatgcaatggtacacaatcatagcttactgcagcctcgaccttccaggctcaagcagtcctctcacttcagccttctaagtagctgggaccataggtgcacgccaccacacctggttaagtttttttaaaaaaatttcttacaaagttttgctatatgcccaggttggtcttgaactccagggctcaaaggatcctctcaccccggtctcccaaagtgctgggattacaggccttcatgcccagctgtttttttttgtttctgtttttgtttttttgcattttaatctaaattttaacatttcaaaatacagtttttaaaattacaatttctactacaaattaaaatcctttcaagcatgtttttgtatatgttaacaaaagtccgttgttaaatatagttgaaatgtgctttttctctacaaaacacaatatgctacaacatctttttgggcaaataatacggatggagcaaaaaaattgtagaatgctgtcaggtttgccttatcacatttgatccacctttaacagtattgaagttcacttcagctattaaaaattctttgtttacagctctgcaggcagaatacctttgatactttgttagaaattggaactgaaaatttttcgctttaatcttttccatggacccaattgttttgattacaagtggtttcttaggaatgctccttttattagtcctttctcatgctgctaataaagacatacccgagactgggtaatttataaaggaaagaggtttaattgactcacagttgcgcagggatagggaggtctcaggaaacctataaacatggtggaaggggaagcaaacacatcattcttcacatggtggcaggaaggagaaatgagagcgaagtgaaggaaagcctccttataaaaccatcagatcttgtgagaactcactatcacgagaacagcatgagggcaaccgcccccatgattcgccgggtccctctcacaacatgggaattatgggaactacaagatgaaatttggatggggacacagccaaaccatatcactcctgttgctttcttaatggatagttttcatcctggggtgattttcaagatggtggattcctttgtttcgtttccagcaactctggttctgaaaatggggtatgtgtatccaggaatgtgaattttgcatatcacctctgtgactctgatgtaggtagttcatagaccacggttttcatgaatagaatgtgcatggtattgcatacctccattgttttcttagaataaattactagaagtaataagatacttgggcaaaggaactgtaattttaccagaaataggtgtatctaaatttttctgaactatgaactacaaggaaaattttgacacttgcagaatgttattctggcctttgtagtagtcgttgtgtaccatatttgtccctgaatgtatgtaattatatgaaagctatgagtagaatttgtattgaatgactgtcaaaatttgcttataaatgataatttgcttataaatcaactctgaaagagttggatttatcaatcatgtaaaaaagacttggtacccctttcatatgttcatattaacaaatggggctaattatgttttattgagtacattttgatttgttccagtagccggatcgagctgggagatgtgacaccacacaatattaaacagttgaaaagattgaatcaggtcatctttccagtcagctacaatgacaagttctacaaggatgtgctggaggttggcgagctagcaaaacttggtataatatagttttttttttgtcctcccttcttttctttctttttgttcttgaaccctagttttttatagagcagaagaagttaactaatttagtttgtttattttataagtgaggaaatgggagtggtctaggttgtgagaaaaatctcagagaaatcagttgaataaaacagttgaattttaaaaagaaatgcttagtgttcttagtgtatacctgtgtgttttcactttaagctatactctagaggaggcttaaacttcctaagatggcataagagctttgagatcattgatattcatgaaatagttgatgaaatttaatgttgataggaacagtgtagtcctttaaaagggaaaaagattaaatgtgttattctgtctgttcaacattatatctttatgttttccttggcagcctatttcaatgatattgctgtaggtgcagtatgctgtagggtggatcattcacagaatcagaagagactttacatcatgacactaggatgtctggcaccttaccgaaggctaggaataggtaaaaaattgtggtttttttacttcttcagagaagcataaacatattatttgttaatgtgtctgacctagtaagttaatttgggtctttttaaggaatactgagaaagggttactgaattatgtaaaatatggtgaaaaataactagtgtttattaacataattctattggaagccctacatagatttgctgtttacgtccccttctgctttttctgtttttcttctacccggaagtgcttgtttaaaaaggttagtcttctgctaacagttttaaacatacgtagctattgtagagagagaacacaactttggaaaataaggatatctagtgtatacctcataaattcttttaggactcaataagtagttcagatggcaagtggatagatacataatttaaaggttgatttatgaagtcacgtgtttgttatttattttattaacaggaactaaaatgttaaatcatgtcttaaacatctgtgaaaaagatggtacttttgacaacatttatctgtaagtaaaataatatttaatgttcttatcaaaggggtttaattggcaggagaaatctttactagaaactttaaaatctggtcacttattgtgcctttggaaacactgtggaagtagttgttacaaagtattcgagtagttgttagttttgtttagttttgttttattaataatagtagattaggaacctgagatagaacacattgctttattatattaggatgagagcaccaaagtcacagggatgaaatcaggattaaaactcaggccttcagaattcaagactattaatactacttttctcatgcaaaaccttgtgtgttttgttcaaggctatgttgatagctttgaacattgtagtagatcatttgtagtagagtttaataatcaaaatcagagattacctagctgagattgtacttgaatctcaagaggctgtagataaagagttatgactaagatcacagtcatggatgttcataatttagtttggccatgtgagagattgaattatacagtgttattttgggagtaattgagaaagcttgcgtttttaatttttaaaacataccatgtattttatcaatcagaaggaagatatatcttcaagctttgagaccctagttttttatttttcatcattttttttctgtgtgttaatagggccttttaataatttatcctcttacagtgaaaaaattttgatagctgtggtacttttccctttgttgactacaagaataaacactgagccttctaatctcagccagctgtcttacaaatgtaaaaattagattaaaagtgtaaaattgtcatcaaaaggttttaggtaagcatgcctaacccttgttgattactggtagttgtaaagagaatgtaacagatgtttggagctatctgtggagaatgcttaaaacttgatgaaaccttaattttaattttttttctgatactctcttatatctcaggcatgtccagatcagcaatgagtcggcaattgacttctacaggaagtttggctttgagattattgagacaaagaagaactactataagaggatagagcccgcagatgctcatgtgctgcagaaaaacctcaaagttccttctggtcagaatgcagatgtgcaaaagacagacaactgaacaaattacaaatgaactttcttgcacttgcttgtcgccaaataaaagagaggcccattgattcctcccccaccccaacacttttcttttaaagcttttctccctccttgttcttgtttttctttcttcctttccttttctctgagagttttaatactttcaaggactttaaaaaaataatcatgtttgaattgttttctcttatttttgtgaggtggtttgaaggaaggacaaggtagatctgtttagttttgcagttgaagttagatggtcctaaacatttaattgtcaaataatttcaaatttaatgtcctgctttcacattgaagggcagagcctacaaaacattgtatatttcaaaagacaaaaagaagcagcagcagtatcttgttctctaattcatagacaagttgagtgtgtttgtggtactttgggtttttaaacactttgggatactaatccctagacattgccttcactccacctttagtccttctgagcactctctcgggagttggaacattgttatccttgtaagaaatactaagcttatgttgatttttaagtaattatatcttctcttcttgctggtgggtggggcagtttggtttagtgttatactttggtctaagtatttgagttaaactgcttttttgctaatgagtgggctggttgttagcaggtttgtttttcctgctgttgattgttactagtggcattaacttttagaatttgggctggtgagattaattttttttaatatcccagctagagatatggcctttaactgacctaaagaggtgtgttgtgatttaattttttcccgttcctttttcttcagtaaacccaacaatagtctaaccttaaaaattgagttgatgtccttataggtcactacccctaaataaacctgaagcaggtgttttctcttggacatactaaaaaatacctaaaaggaagcttagatgggctgtgacacaaaaaattcaattactgtcatctaatgccagctgttaaaagtgtggccactgagcatttgattttataggaaaaaatagtatttttgagaataacatagctgtgctattgcacatctgttggaggacatcccagatttgcttatactcagtgcctgtgatattgagtttaaggatttgaggcaggggtaattattaaacatattgcttctattcttggaaaaatagaagtgtaaaatgttaataatacaaatgtcactgtgacctcctccactgagaggactggtttatgccagatcattttccggcacacacggagtggctttgacagattgataactttgtaagatgggagacatctgaaatattcatgttttccttttgtagtcccatctccactatttagaaatgttctcagactttaaaataatgcacagggcttgagctttctgtcatttgactttaaaaggaagtttcattcatatttatcctcttatgtaaaattgcggtataaagtctcatttccaaatatgttaaatgacaaaattattttataaaatgtttatgcacactttataaccttaagtttttatttgagaatgtgaaagtacaaagtgcagtagacttcaacaatcttgagtgccaagaataatacagaaaaagaagacagttgatgaatgagtttatagggttctaatcttaagatggtaaaaatgtagaaagaccttgctggttttttgggggtattcgtttcttaaacaatccaaatctaagcttagaagaaaagtttagcgttaagcacctttatcttcatgaataagcttcagcttgctcttggcaagagaagagtgcttgagttacagaaggcataagtagtttgaagaatgcagcagcctttttgtaaacttcccagatatcaaaatagactttgatatataaatggttttctgagatgacactgcctctatttctataaccatttcacctggactatctaatcagtcctatgaatgtatccctaaatgtggttattgaaaacctaatagctgcctcatgacaagtacatgttatttaaggaggaaaaaatattaaattttgaattgagtgtgtaggctccctatcattatatatagagtttctttttccacggtagtcagtgacttaacctgaattgtaaatgtttgtaaagggttaattgtcctacatcaaacttagttaaataattccatccacttatggaggaggaggagaatgtggaagaggtaaaaagctgggcacaagttcatatgcctatgagtcagtaaagactgaagtaatgtcctatgttgagctggttattttgatatatgataataattatctttgaagtagaacaattctgttaactggaaaatcacaggatatatccatcatatttttcaggacagatagtttttactgtggggcaaataggttaaaattacactatgttagttgcatttaggttttaaagcaaagaatctgtagagaaatctatgcaatatatagtttgtccagattagctttcatttggggaatgaagttctgaaatatctaaagcagtttactcatcaattgaaaagtcctccaaaaagagaactattgggaaaccatggtgtggtggtggaaaagaaaagctccctcagttttttggagggaataacttaaaaaaatacttaaatggctaagtttacttggtgcagttaagaattaaacttgtcaattttaacattgctgttacatctgaaataaacttatgtgatgttctggtagtgatctgtgatatctgtaaatgtcaaaactgtattgttgaattctgcagccagcaaccgtacatactcattgtgtagtgtttcccttactgcttttatttactttcacatttaagatctaattttaaaatcattaaaataggccaagtgtaattaaggcatcctaattcagatcttctgtgacttgctaggtacagtgcccaatatctacaattcagttccaatgagagggaaaaagtaagatccaaggaactgtcttgctgctgtatttttaatgtaattattagaaatacttgacactttaggctgcaatctagttagtaatgtttattggctacagacaacatattcaggtgttttgtttttcttccttgtaaggaaggagtacggtagttcaatgagttgggaattggcttttaagctttttatcaaacatgaatttaagattttttctttaacagaattcagtatttaatatttctagtcaaaattgttataattagatttttgcttttttcatttaagaagcaatgagtgatccttgtctagtgtgtctcagttattactgtagtttaaaacaacaaacaagtattaccttccacagttctggatcaggaatctaggagctgcttaactgggtggttctgtcttgagatctcagaaggttgcagtcaagctgttagccaggactgtaccatcttgaagcttgacaaggctagaggagccatttccaagatgtcttgcttacgtggctcttgggcttctgttcctcactgtgtgggtatcacacacagtgcctgatgctcacgtggctcttgggcttcagttccttgggcaccagttgcctggtggacaactggtatgtggcttcccctagagcaggtgatataagaaagtgagcagaaaccatacttttttatgacgtagcctcaggtgacattatttctgccatattccatgagtcacacagaccaaccattgaatcagcttggtatagtgtgggaggggactgcacaaggatgtgaatactgggaggtggatatcattgggccctctaggagactggctatcactgctcagagaagatgctgggcttcgttgactcccaaggtcagggtagttttggttaggttgtgttttattagtctctaaaaggagtagttttctaaatgagggttataaagcactgcactttacagttattcgggatataaaagaaatagtgggtctaaaggctgtgctcttgtggttgggttttcagtggggaggggagactagtctgtctcagactgatgctgttctcactgatttgaatatttctgggaaattggatactacagtcacaaataggaacagtaagcctatagaagtttttcagggagtaaatattttctatggcagtgtcctgaattggttctcccttgcaagactgaactgtaggaacttagtcctagtttatgatacagccaagtaacatagtcacatgggaaaaagagcttgagtcagatttcttaatgtgtgttgttaacttggtagaacattgagaattatttaagtcagagaacgatctgttactggggcagaaattctcaaccttttcagttctccaaaatttaagatacttgatttcttaggtaaaatgtttttgtttttgttttggagacagagtctcgctctgtcgcccaggctggagtgcagtggcgcgatcttggctcactgcaaactccgcctcccagattcaagcaattctgcctgagcctcccaagtagctgcgactagaaagcgcatgccaccacgcctggctaattttttgtattttagtagagatgggggtttcaccgtgttgcccaggctggtctcaaactcctgagcttaggcaatcctcctggggcagcctcccaaagtgctaggattacaggcgagccatggcgcctggccagtaaaatgttttctatctagaatgaatcaaggtattttccttgctcagtagcttctagaataagaaaaaaatagcagcaagatctgattcagaaatagttgggagcagaaagttaatatgaaggagttgctacttgttaacagcctagagttgagatctagaagaattattacctttttaaatttgtgatgaaagcttaaatccagcatttgggaagttactctattggctgaactattttggagtttgtaagctttgtattagatattcctgatttaactgaaactaatttgccacatagctttaatttcatcccagttttacttgttttactgtcctcaaaaactcaagacatctgaactcaaaggatctaagcagtataaattaaagcacatgttgaatcactgtagctttcgtaggacatctgattataatgcttttctttgtttctttgtccatactgaacttgtctagtttatctttgagaaacatttgctagtatcaaaaatcttctgtaaagatttgaacaatcttgaattctccttgtcactagccatctcttcccctaaagtataataaaactgtcaggtact

SEQ ID NO: 639 - DNA, 32744 bp, Homo sapiens
  source 1..32744: mol_type = other DNA
ttgctttgaaagaagtttctgcctttaataatgtgtccagaattttaacttattaactagaacatacactaaagtaacctaaatctgcacattccacacattagaacctggatatttccaccaaaatcattccataattcactaatgtggtgtaacaagttttactttagagcgataaagttttcttttgttaactgggtaagaactagacatttataaaggaaaagaaaatcaagcgatatctcaccaccaattctagtcatgtgttcagtttaggagaatgatcgtcagtggattttgagccataagtatttatgctaaaagataagtctcttataattgtgtgtctctgaagcgtttgtgccactataaagtcaagggcaccatctctgatcattctgtgtctttctgggagggaaggctgctttatatcccaacagaggtattctaggatataaaaataagaaaaaatcaacattattacaggattctctgtcacaaacatctaataaaacacaactctggtcttatatatagtagtagccatagatacatattagagcttgcaagaagagtctgtttttatatttgggcttaggtgtgcataaaataatcacatttgggcaaagaggctgttttgttactccttgtaaagctacagtgcttaaaaatgatgtgataatttaaatacatagcttggacatttccagttctgtttccaagccttagctatgggtgaaattgttttgggctatgaagatggattagggcatcttgcaactcatgatgcatttgttgccccttagttcttgtgtcctgagcagacagactgacaattaaaactcatcaattttattttcaacatactttaacatggattctatcccttgggctgagctccagatcttcctcagcacctcacactctctctcattggcctgttccaactccaacttaatattacagcgaacgagggccttacattcttccagtacaattggattgtatgaggcaagctccttaatttgaatcataacctcttgggtgaaagttccagtcaaaaatacctgagagaccaggcctttggcgcatgcctcccttgctgtcagctttcgcccagcaattaacatttcattggcagatgctttacccatcattttggggaatgtaatagaagaacagccatctggactctgtccaaaggtcgtataaggggtttggaaccaagccttttcattagcccacacgagatcacaaagaggcaggatggatgcacctagtccaatcgcagggccattgactgatacaacaataggctttttaaattgaataaaagtattcacaaagttcttgatggtgtccaccatttcaaggcttgctgtgtttctgttattccttaagtgcttcacaaagtacccaaaatcaagaccgcagcaaaagacacttccagctgcactgaacagcacgagcttgctgtcatctgcagcagcgctattcagagcattaactatttctttaattacttctgtattcagtgcatttttttctgtcgatctagttgatagcactatctgggtgaatccatcctctttcttcactacaatgtctctgtatgtgctggcactttctgttagccttatggtgaagtgcatcttcttgataaaaggctggtctctgctgtcatcagtaatatttctttgcccacctttcactcttggaactgaggtatgcatgtctgttgtcccattggctgctaatgggtctattaataccactataccctttcgggtagctgaacctgtggccatagaagcagtaactgagccagacatctgcgacattagtgggtgtatctgagtcttgttctgtattccagtctgttctgcaccaggacgtgacaaagggtcccggaggagtttcccttctgtcaccttgaagaccaccgtgtcctgctgatctgctgcaatagggtccagtttctcaagtttctgaaagccactcacagttttgtggtcaaaggggctgtcaggtgcaagggtctcaatagttgaatttattatctccatattctttgtgtcggagagaattgaagctgcctttctcctaacgttcttgctggcagcaaataacttgcggtttttggacctgtggtgtttatcagtcactggcgttttaggagagttcttagaatagtttgcttttgtagatctggaagttcttcttctggcattgtttgaaaaaattctactggttgtagtccatgtcagttttttctgtttttcagtctgtcgtctattaaaatcatgtacacatttttcacagttcatgaggtgctgctctggttcccaagtgtcatcctgtttgtcataacctttccaccgaaccaaatactgtgtattcccatttttatcctgtcttttgtcaacaatagcttcaacctcaaactcctgggaagccatgaggaaagacacgggattggaacagttgctgtgccacctttgtttcagttgcgtctccacatagacacttctttctgcctccagctcttcaccaggttctgtgtatggatgaacctcttctattttgtcaccactggtgtagtgaaaattgtgcgaaatagcagctatgccatgtgcctgaacctctccatacttactgcctggtgggacagcttgggctttgtctcatggtgcatgacaacttgctcagtagcctcaggtgagagtagctaaatccacagccccaaccctctggtgtagtacagaaagctttcttcctgcctgttactcttttgtgtttctttgtttaattgtggttgctatgacgattatatggaacattctaatgttataacatttttaaagttacactagcttaccttcagtaacatacaaagcctttactcctgtataatgtacctccattatttcacttactgagttctcaaaattatacctttattgattttatgtcaaaaacacaaattagtggtagtttttttattaaatatatttgtgttttaagttatgtggagaacaaattgtggaggtgcacattgttaattgttcgttttgttttgttttgttttgttttgttttgagatggagtctcgccctgtcaatgaggctggagtgcagtagtgagatcttggctcactacaagctccacctcccggattcatgccattctcctgtctcagcctcccgagtagctgagactacaggcacctgccacctggccctacgaatttgttgtatttttagtagagacggggtttcaccatgttagccaggattgtctcgatctcctgacctcgtgatccaagcacctcagcctcccaaaatgctgggattacaggtgtgagccactgagcccagccaaattttttatcttacatatttgttcatgtatttatctttaccttaatctttgtttgttcatactgcttttgagtatctgtccattctaccctgaagtactccataagacatttcttaaagggtagtctacttgtaaaaggtgccagtttttatatgggaatgtcataatttgtccctcacctttgatggacagtttggtggatcataatgtttaggcttgacagttttttctgacatcacttggaatatatgaggctactgctttctatctcagttttcagataagaaatctactgcttttcggtggttattcagataagtgatccactggttatttttagggtcccttttacatgactagctacttcccctgcttcccttgaaaatcctcaaggttctctttgtatttattttagacagtttaattatcaggtaagtttgagtttgtttctttgagtttttgttacttggagtctgttgagctccttgggtgcttacttattgtcttaaattgttgcattctttatgactatgttgttaaatagtatccatgagtttttgtctcttccttggaacttccaaaatgcatatgtatggctgcttgatggtgtccctcaggtttctaggctgtataaatctgccttgccccttttcagactccattggtgaccactatatggttgactgacccgaagggtgtgtatcacagtgtggggacagtgtgtcagttggtctcgcaaggctgatgcatcccagagctcaattcccagacttcaatcattgcagtctcattagtgcactacgacctagaaaactctaattgtgagatatcacacagagttctttgtctcatggccaagaaaattaaggaggatggatgcaaaaaggttgaatcaaaacttttataagtgaaagtaaaaaactcttcacagtgggggtggaatgtgagtggtttacctactatgaggctgtgctttacagtttctaaggacagagaagtaaagaaatgtggttagtgttcttggagtaggtgtcatttggcttggccctgaaacttggccttggattcatctggagctgaagtgatgatttgtagaagctacaaggctcagccttggaacttggccctggaccaagaaggagctgaagtgacagcttggcctgagaccttggcctgggatcaatcaagggatgaagtaatgtctcatggccacaataattaaggaggctggatgatgcaaagttcaagtaggaactaaagtaacacaacagccatctggactctgtccagatgtcatataaggggtttgaaaccaaggcttttcattagctcagaagaaatcacaaagaggcagtgtggatgcacctattccgaaggatgggccactgactgatacaaaaacaggcttttaaaattgattgaaagtattcacaaagttcttgatggtgttcaccatctcaaggcttgttctgtttctgtccttccttaaatacttcagaaagtaccccaaatcgagaccacagcaaaagacacttccagctgcactgaacagcacaagcttgctgccacccacagcagccctattcagagcattaaccattgctttaattacttctatattcagtacattttttatgttgatctagtttataggcacatctgggtgaatctgtcctctttcttcactgcaatatctctgtatgtgctggcactttctgctaggcctatgatgaggtacatcttctggataaaaagctggtctctgccaccgtcagtaacatttctttgcccaactttcactcttgcaactaatgtatgcacatctgtttttccattggctgccgattggcccattaataccactataccttttttggtagctgagtctgcagccatggaagccgtaactgagccagacctctgagaaaatagtgggtgaatctgggtcttgctctctattccacaatgtcctgccctgggatctgataaagccctgatgatcttcccttcctcctccttgaagaccactgtatcctgctgatctgctgcaatagggtccagattctagagttcctgaatgccactcactgtgttcttgttgttaaaagggttgtaaggggcaagtgtctttcttgatagttgaacacagtagctccatattctttgggtcggacagaggtgaccctggattactgctaacattctggctggcagaacataactggctgcttttgaatttgtggtgttggccagacactagcgttttaggagtattcttagaaaagttgggcttggtagatgtagaagttcatcttctggtattgtttgaaaaagttctagttgttctggtccatgccacttttttactttttctgtttttcagtctgtcatctgttaaagtaatatatatatttttgaccggtgctgctctggttcccaagtgtcataccgtttcttcttaacctttgcaacaccaaaaatttttgttgttgttgttgttgttttgttttgtttttttttttagacaaagtcttgagctatcacccaggcaggagtacagtggcacaattgcacaatctcggctcactgcaacctccacctcctgggttcatgcgattctcctgcctcagcctcccgggtagctgagattagaggggcctgccaccacgcctggctaactttatgatttttagtagaaagaggttttcactgtattagccagaatggtctccatctcctgaactcgtaatctgcccgcctcagccttgcaaagtgctgggattacaggcatgagccactgtgcctggcctctgtctttccatttttgtctcgtcttttgtcaacaatagtttcaacctcaaactcctggaaagccaggaagaaagacacaggattgaagtagttgctgtgccaaatttgtttcatttgcatctccacatagccacttctttctgcctccagttctttaccaggttctgcgtatggatgagcctattctatttcatcaccactgacgtagtgaaaattgtttgaaatagcagctatgctatgggctttaggctctccacaattatgccctggtgggacagcttgggctttgtctcatggtgcatgatagctggcttagtagcctcaagtgagagtagctaaatccacatctcttactctctggtgtagtacagaaagctttctacctgtctgttactctttttcttttttaattgtcattgatactgtgattacattgaatattctaaaggtattccacttttaaagttatactagctgactttcaataacacacaaatcccttaaccctgtataactgcacccccatgatttccttattgagttctcaaaatcatacctttatgcactgtatgtcaaaaacgcaacttagtgatagtatttttattaaatatatttgtgttttaaattgcatgggaaacacattgtggaggtgtacactgttattctttatgttttataatagcttatatatttatctttaccttaatatatatccattcatactgctccttattatctgttcattttaccatgaagtatcccataaggcattttttaaaaagatagtctactggtaaaatgtcccagcttttatctggaaatgtcataatttctccctcacttataagggacaatgttttgaacataagatttctgttcaaaagttttttctcacatcatttggaatatgttaatctattgctttctgtcctctgagttttcagataaggtatctgctgattatttttgagggttactagccagtaacataactagccacttcttttgttgctttcaggattttctctgtctttcttttgatgagtttaattatcatataatttaagtttgtttatttgagtttctcttacttggagtttgttgcctttgacattctttaacattattgtttctaaatagtcttcctgattctttttctcatcctttgaacttccagtatgcgtaatatgtctgcttgatagtgttccacgacattttaggctttattcccattgctttatactttttctttcatttcctaacttaattatgtcaacaccctttctttggtttgctgatagtttgttcttcccccagctcaagtctgcttttaaatatctgtagtgaatatttttttctttttatccctagacttttttaggtttcaaaatagttttacttttttattaatttttgttcataattttttgtggttcttttttttcttctattagcttactctgaaacttaattttaaatattatgtttctgtaagaccaccatttgggctgtctaaaaaaagtttcagaccataatttttttttacgtcttaaaatgagccatacttctctgtttcactgtgtggtttatctctagacttttttaggttttaaaataattttactcttttgattaataatttttgtctgtaattgtttgtgcttcttttgttcattctattagcttattatgtagcttaattgtaaatattatattttagtaaggctgccatttgggctgtcaaaaaaaagcttattttttcgtaattattttgtagttgttattaaaatgagccatacttctctatttcactctgtagtttgtgattttgctggtgctgaaaaagagcatttaaattttaaagtgctgtaactttgaacataagattttctacttctatggtttggtagagttttgtttactcattatataggctcttactctcctgtaaatcagctgtattgagctttgtcttgggtctcttttgaggcccattgttttggggcacatatcgttaaaaccacaattcattatatatatatatgtgtgtgtgtgtgtgtgtgtgtgtgtgtgtgtgtatatgattaattttgaatgttttagtctacaaacatcttaagagaaaaagaagaacaatcaagaaaaaatattttcgctttttaaatctactgaaagttggttgcacagagggacaaagagcctgcataatatttggggaatataacaatgacgattcacctctgtcgggacctccataagcagaagcagcaatcggcaaatgagtccccctgagatttggaggacagggtcctttttgtttgccatggctcttgtaagctgctccagaaatatttgcaaagcagcatcccacattggtggttattaaggaataagtagctgctgttgatctgtgctacaaaattgataaaatctttttttggaagctgtaaaccttcaggtagactcggaattctatagtaattgcatcatactaatcctgccactgcacccattgtatagttgaagggacggatatacagtgatcccttgtacattgcagaactttcccagaatctagtattattttacttcgacctatttgtctttgcacctaaagtatgccttgcatagaagtcacaaaagtgactccttcgtttaagggtacacttgcaacaatgtgtgcctttttaagcaagagctcacatttacagttcttacaagtaaaatattacatactctgacatggacttacatgttttccatatgctctttctcttgcttgatcctcaatttcttttttgctcatttaaaaaatctggataatttttaaaaactgctgttgtatttttcatattacaattaggtgtacttgggatttcaactattattgaaaacttaaaatatcctactatgaagaatactaacttgtatgaataatttaatgtttaaggtcagcagtataaaaatatgctgctcttgtagttttccatccttctcaatttatattactttctctgattttatctgtgcacacagattgttcattagcagttaagtttgccagggttgaaagagcaatagcattttgttatagagaagtttaagtcacaatttcctttagcttttccttatctatatatgttttcttagtttcattttaccagttatatatttcaggtttgatagcatttttcttaaaacttggatatcccaccaccttctgactccatggattcagctgaacaatcatgtgttaattttaatcgagaccttcttgtacatagaaagttgctattccctttctgcttttacaattttctttgtattggctcttgattgcctgtaatgttttctgatgtggctatcattgactatattgtggttgaagatttttgtcctctttcatctttcagattgtgatttttaagttcaggaaatgtttagtcatttttgccttaaaaatttttggcctctgtttttcttcatttataagatgctcataatgcatgtaccagtataacgcatggtgttctatttactcttcagtttttttttttttttcactttctttaaattgtacttctcagactgggttatttcagtttttattccttcagactgactgaatatttacttgcttaaatctactgttaaatccctttaatatcttcagtagttttcccatttttatgggttcttttataatttgtctcactgacgctctcaggttattctttcatcatttgtccgtcatttctctttagccctacttaaaactgttgttttaagttctttgtctataaaatttgggacacatttaattcctgcatttagtttacattgttcaaaactttctgtttgtttttgtgtttttggttttcagaaaactatatttgaaatgccataatgtgctaacactgaatgttacctctgtatttgaaatgtcataacgtgctaactctgaatgctttttggtatttctgaaatgcaacgtgttagttattaaaagctcagctgacattccattagcactttgaataagagcaatatgaaaactatcacctttaaatacagggtatgtattaacactctcctttaactctcaggggggttgtttctaattctttcctaacattcactttcttctgactctgaagctatagataaacttgagggttaaagtatattgttttacatgttttttagaatgttcctgtcataagcatatgcatgattttctaagtgcttcaatgtattaaactgcttttgaatattcagatttttgcaaatacaaatctctccaacttttgctcctgtttatcctttgcctagtgtaaaagataactgtattttttgtattcagcaacttaaatgtttgtgaccaattcctggcatttccaaccaagagtgacttctgagttaggcaaaggagaaataaatgtttattttatcaaattttcatatgtcctctggaaagactggaaaaaaaaacacagtaatttagcacataagggtttctttccttttttgagaagcaggaatcaggtcctcattttgacaatgtggatttcaattctgaaggcttcatatgtgcctaggaggtgatatgacaatccttaaagaaaaaaaaaaaaaactttaccattttgtaattgtctttctggattaaatgtttacttggtttatataaactattgattttcagggtccagactgtttttgatggtttgaaacttttttttttttttttggaatggtttgaaactgccatccctgccgttttacttttatttttatctatgaagcactgagtgttttctaatttcagagtttattgttatttatgaggtttatgttttgtctcttgtttaaaatacttaaagtgaatgttacatttccaatttgcaatcccaggtgttaggtttttgttttagtggtcatgttataaagtttttgtttttttattaagtgaaattatcaattttgtataaaatgcatgaggtaagattctctgttataaagtacattttggtttttgtaaaacaaacatacaataagtggcttacaaagtgactttcaaataattatctaaagaaaataataagaaaataatgtaagcatgcagcaagttcaataagtacaatgattcctggtggaaggctgtataaattgtttttaaaaagccagctacctgtggctgcagcaggctgtagaagggggaaaattatagaggatgagctcatagaggtaacagacagtccatgtgattttctagggtttttataggtcttcagattttactttagacttcaccctaaccctggtttgtgactcaaagtagaattggtaaggttgttactagcatctattgctgagaggttagaaatgctgctaaatgtcctaaaatattgagtctcaggcaccttcgagaagttaacagtgttgaaacatctctcgagaaaattatttttaaaagctcacatttagaactctttgatgttatattttgaagatttcttaactccaagtttggtttccgtatagcagaaggatttgaaaaagtgtacataagttccattgattcaacttagggtaaacattagtaaagtaaggtcagttcagttaatcaatgattagaaactaaatgatatattttctatttctctgcttttccttccaattactttttgaatatttttgtaaaacatgaatgtgaaaaaataaaaccctagtcagcctctgttttggaggtaccaagggagaaatctcaatgaatggtatttgggatggagctaatctttaatacagttgaaaggcataaataatacacatgcatacaggtgcattgtcacactatattatggatacacattgtgcattcagaaagcacaatgtgtatccataatacagtcatgaatgatcctagtcataatatagtcatgaatgatcctgggttattacaataagtgaatcaaatgaaaacaaagtttgtcaggattatagctggggttataggattttcaattttgctaaagttgtttagtagaaccaatattcaagtatctcctactttttaaaaagttatttgatagaagtttgcatagtggacagctttgatcagaattatttgttctctgccttgttccaacataataaaagtatgcattcacaaaaaatgcatattagacaataagagaaaataaaaatcagtgaatgaggaaactgatgtaataggaacaatttctgaaaaggttaagataaatccaaaaggaggtgaatttctacagtggaaaatctttttcatttcaatcaaaaatttgtttcagaatgttagcaagtagcagcaacatggtaattatccaaatttacaccgtttccttagttccaacttagcgcctgagatgtaggctctgttgctgatgctagggccttctccatgaggcagaactcctacccatatagggcttgctttttctccaaggttaataaaatgccatcgaacacctaaaaggaaacggcaagtttattttttttttgcttaatatactaagggagagctctgctgtttagacacattcttggaacaatgcagagtgtgaaactgaggaattgacagacattaagttgtgtacagaagctggcattatttgtagaaacaaacttgttgaggtaaaatttgtagtgaaagaggaatatttattgaagtctgtgactgacctgatttttcaaagtgctggcactgttttattattattactgttactatcactattattacctgtaacagctttttcactgagggagttaggctttatagattagttaaatttaaacctgattttgatgggtgcattttacaatgattgcagaacaactatttactaaatatttctgaaagtctaaattgtcattttctaagaagacataatacacctttgtttttaaagaaatgaagagtatttactaattagtaacagtttgttaaataattcctctgatatatgttctagagccttggaagtaagtaaataggaaaataggtactttaaaggttttttttttttttttttttttttacatagatgcatatggaccactgaagcacatacacacatgtgtattgtgtatatatgtcaggaattttttttatggaattagattatgacatcaccatcaaacaagctgacttattaaaagaaggcttatagttttaatatttattcaaagaatgttttttgattgtgtcctagggatagtgatcagctcaaaacctgaaggaagaagatgggtgacttctccatttccaactgaggtaccaggttcatctcacttgggagtgttgggaagtggggcaggacagtgggtgcagtgcatcaattgtgacctgaagcaaggtgaggtatcacctcacccgggaagcaaaaggggtcagggaattccttttcctagtcaaagaaagtggcatctggaaaatcaggtcactctcaccctagtactgtggttttccaacggtcttagcaaacggcacaccagaagatgatatcccgtgcctgcatcagagcgtcctacactgatggagcctcactcattgctagcacagtaatctgagatcaaactgcaaggtggcagcatggctgggggaagggcgtccaccattgccaaggcttgagtaggtaaatgaagcagcttggaagttcgaactcagtggagcccaccccagctcaaggaggcctgccagcttctgtagactctgcctgtgggggcagggcatagccaaacaaaaggcagcagaaacctctgcagacttaaatgtccctgtctgacagctttgaagacagtagtggttctcccagcacgcagatggatatctgagaacagacagactgcctcctcaagtgggtccctggcccccaggtagcctaactgggaggtacccatcagtaggggcagactgacaactcacatgaccaggtactcccctgagacaaaaattcccgaggaatgatcaggcagcaccagttgctgttcaccaatatccgctgttctgcagcctccgctgctgacacccatgaaaacagggtctgcagtggacctcagcaaactcaacagacctgcagctgagggtcttgactgttagaaggaaaactaaaaaacagaaaggacatcaacaccaaaaccccatctgtacgtcaccatcatcaaagaccaaagatagataaaaccagaaagatggggaaataatagaacagaaaaactggatgctctaaaaatcagagcacctctccccctccaaaggaacacagctcctcaccagcaatggaacaaagctggacagagaatttgactatttgagagaaaaaggcttcagatgatcaaactactctgagctaaaggaggaagattgaacccatggcaaagttgaaaaccttgaaaaaaaaatagatgaatggctaactagaataacaatgcagagaagtccttaaaggatgtgatggagctgaaaaccaaggcacaagaaaaacgtgatgaatgcacaagcctcagtagctgatttgatcaactggaagaaagggtatcagtgatggaagatcgaatgaatgaaatgaagtgagaagagaagttcacagaaaaaagaataaaaagaaatgaataaaggttccaagaaatatgggactatgtgaaaagaccaaatctacgtctgattggtgtacctgaaagtgatggggagaatggaaccaagttggaaaacactgtaggatattatccatgagaagttccccaatctagcaaggcaggccaaaattcagattcaggaaatgcagagaacaccacaaagacactcgtcaagaagagcagctccaagacacataattgtcagattcaccaaagttgaaatgaaggaaaaaatgttaagggcagccagagaaaaatgtcagcttatccacaaagggaagcccatcagactaacagctgatctcttggcagaaagtctacaagccagaagagagtgggggccaatattcaacattcttatagaaaagaatttttacccagaatttcatatccagccaaactaagcttcataagtgaaggagaaataaaatcctttacagaaaagcaaatgctgggagattttgtcatcaccaggcctgccctacaagagctcctgaaggaagcactaaacatggaaaggaacaaccagtagcaaccactgcaataacatgccaaattgtgaagaccattgaggctaggaagaaactgcatcaactagtgagtaaaataaccagctaacatcttaatgacaagaccaaattcacacataacaatattagccttaaatgtaaatgggctaaatgctccaatgaaaagacaaagactggcaaattggataaagagtaaagacccatcagtgtgctctattcaggaaacccatctcacgtacggagacacacataggctcaaaataaagggatggaggaagatctaccaagcaaatggaaaacaaaaataggcacgggttgcaagccaagactctggtaaaacagacttttaaccaacaaagatcaaaagagacaaagaaggccattacataatggtaaagtgatcaattcaacaagaagagctaactatcctaaatatatatgcacccagtaaacgagcacccagatttataaagcaagtccttagagacatacaaagagacttagactcccacacaataataatgggataatttaacaccccaccgtcaaaattagacagatcaatgagacagaaagttaacaaggatatccaagattgaactcagctctgcaccaagccgacataatagacatatacagaactctccaccccacatcaacagaatatgcattctttacagcaccacaccacacctattccaaaattgaccacatagttggaagtaaaggactcctcagcaaatgtaaaggaacagaaattataaaaaaactctctctcagaccacagtccaatcgaactaaaactcaggattagaaaattcactcaaaactgctcaattacatggaaactgaaccgtctgttcctgaatgactactgtgtacataacgaagtgaagccagaaataaagatgttctttgaaaccaacaaacagcatctcaaggatgtgtctttgagaacaaagacacaacataccagaatctctgggatgcattcaaagccgtgtttagagggaaatttatagcactaaatgcccatgatagaaagcaggaaagatataaaattgacaccctaacatcacaattaaaagaactagagaagcaagagcaaacacattcaaaagctagcagaaggcaagaaataactaagatcagagcagaactgaaggcgatagagacacaaaaaacccatctgaaaatcaatgaatccaggagctggttttttgaaaacatcaccaaaattcatagaccattagcaagacaaatacagaagaaaagagagcagaatcaaatagacacaataaaaaatgataaaggggatatcaccacagatcccacagaaatacagactaccatcagtgaataccataaccacctctacacaaataaacttgaaaatctagaagaaatggataaattcctcaacacatacaacctcccaagtctaaaccaggaaaaacttgaatctcttaatagaccaataacaggctctgagattgaggaaataattaatagctttccaaccaaacaaagtccaggaccagaaggattcacagccgaattctaccagacctacaaggaggagctggtaccattccttctgaaacttttccaatcaagagaaaaagaaggaatcctccctaactcactttatgaggccagcatcatcctgatactgaaaactggtagagacacaacaacaaaaaaagataattttagaccaatatctctgatgaagattgatgaaaaaatcctcactaaaatactgggaaactgaatccagcagcacatcgaaaagcttatccaccatgatcaagtgggctttaaccctgggatgcaaggctggttcaacatatgcaaattgataaatgtaatccagcatataaacagaagcaatgacaaaaaccacatgattatctcaacaggtgaagaaaagtcctttgacaaaattcaacattctttcatgctaaatagtctcagtaaattaggtcttgatgggacgtatctcaaaataataagagctatctatgataaacccacagccactgttatactgaatgagcagaaactggaagcattccctttgaaaactggcacaagacagggatgccctctctcaccattcctattcaacatagtgttggaagttctgaccagggcaatcaagcaggagaagtaaacaaagtgtattcaattagaaaaagaggaagtccaattgtccctgtttgcagatggtaggattgtatatctagaaaaccccatcatctcagcctaaaatctctttaagctgataggcaacttcagcaaagtctcaggatacaaaatcaatgtgcaaaaatcacaagcattcttaaacaccaccaacagacaaacagagagcaaaatcatgagtgaactcccattcacaattgcttcaaagagaataaaatacctaggaatccaacttacaagggacgtgaaagacatcttctaggagaactgcaaaccacttctcaatgaattaaaagaggatagaagcaaatggaagaacattccatgcccatgggtaggaaaaatcaatatcgtgaaaatggccacactgcctaaggtaatttgtagattcaaggccatccccatcaagctaccaatgactttcttcacagaattcggaaaatctactttgaagttcatatggaagcaaaaggagcccacgttgccaagacaatcctaagtcaaaagaacaaaactgtaggcattacgctaccagacttcaaattatactacaaggctacagtaagcaaaacagcatggaattggtaccaaaacagagatatagaccaatggaacagaacagagccctcagaaataatgccgcatatctacaaccatctgatctttgataaacctgacaaaaacaagaaatggggaaatgattccttatttaataaatggtgctgggaaaactggctagctgtatgtagaaagctgaaactggatcccttccttacaccttatacaaaaattaattcaagatggattaaagggtagagccaagacggccaaataggaagagctccggcctacagctccccgtgtgagtgacgcagaagacgggtgattcctgcatttccatctgaggtactgggttcatctcactggggagtgccaggcagtgggtgtaggacagtgggtgccatgcaccaggtgtgagctgaagcagggcgaggcattgcctcactcaggaagtgaaagtgatccgggagtttcctttcctagtcaaagaaaggggtgacagatagcacctggaaaatcctgtcactcccaccctaatactgcacttttccaatgggcttaaaaaacggcacaccaggagattatatcccgcacatggctcagagggtcctacgtccatggagtctcactgattgctagcacagcagtctgagatcaaactgcaaggcagcagtgaggctgggggaggggtgcctgccattgcccaggcttgattaagtgaacaaagcagccgggatgctcgaactgggcagagcccagcgtagctcaaggaggcctgcctgcctctgtaggctccacctccaggggcagggcacagacaaacaaaaagacagcagtaacctctgcagacttaaatgtcccagtctgacagctttgaggagagtagtggttctcacagcacacagctggagatctgagaatgggcagactgcctcctcaagtaggtccctgacccctgagcagcctaagtggaaggcatcccccagtaggggcagaccaacacgtcacaaggccaggtactcctctgagacaaaacttccagaggaacgaccaggcagcagcatttgtggatcaccaatatctgctgttctacagacaccaatatctgttgttctatagccaccactgttctgcagccaccactgctgatacccaggaaaacagcgtctggagtgggcctctagcaaattccaacagagcagcagctgcgggtcctgtctgttagaaggaaaactaacaaacagaaaggacatccacaccaaaaccccttctgtacgtcaccattatcaaagaccaaaggtagacaaaaccacaaagatgggaaaaaaacagagcagaaaaactggaaactctaaaaagcagagtgcctctcctcctccaagggaacacagcttctcaccagcaatgcaacaaagctggatggagaatgactttgaccagttgagagaagaaggcttcagatgatcaaactactctgagctacaggaggaaattcaaaccaatggcaaagaagttaaaaactttgaaaaaaatttagaagaatggatatctagaataaccaatgcagagaagtccttaaaggagctgatggagctgaaagccaaggcacaaggactacgtgatgaatgcacaagcctcaggagccaatgcaatcaactggaagaaagagtatcagtgatggaagatgaaatgaatgaaatgaagaaagaagggaagtttagagaaaaaagaataacaagaaatgaagaaaacctccaagaaatatgggagtatgtgaaaagaccaaatctacttctgattggtgtacctgaaagtgacggggagaatggaaccaagttggaaacttggtttccaaccaagtgttggaatactctgcaggatatcatccaggagaacttccccaatctagcaaggcaggccaacattcagattcaggaaatacacagaatgccacaaagatagccctcgtgaagagcaactccaagacacataattgtcagattcaccaaagttgaaatgaaggaaaaaatgttaagagcagccagagagaaaggtcgggttacccacaaagggaagcccatcagactaagagctgatcagttggcagaaagcctacaagccagaagaaagtgggggccagtattcaacatccttaaaaaaaggaattttctacccagaatttcatatccagccaaattaagcttcataagtgaaggagaaataaaatcctttacagaaaagcaaatgctaggagattttgtcaccacagggcctgccctacaagagctcctgaaggaagcattaaacatggaaaggaacaaccggtaccaggctctgcaaaaacgtgccaaaatgtaaagaccttcaaggctaggaagaaactgcatcgactaatgagcaaaataaccagctaacatcataatgacaggaccgaattcacacataacagtattaattttaaatgtaaattggctaaatgctccaattaaaagatacagactggcaaattggaaaaagagtcaagacccatcagtgcactgtattctggaaacccgtctcacatacagagacacacataggctcaaaataaaggaatggaggaagatctaccaagcacatggaaaacaaaaaaaggcaggggttgcaatcctagtctctgctaaaacagactttcaaccaacaaagatcaaaagagacaaagaaggccatcacataacggtaaagggatcaattcaaaaagatgagctaactatcctaaatatatatgcacccaatacaggagcaagccagattcataaagcaagtccttagtgacctacaaagagacatagactcccacacaatgataatgggagattttaacaccccactgtcaacattagacagatcaatgagacagaaatttaacaaggatacgcaggaattgcactcagctctgcaccaagcggacctagtagacatctacaaaactctccaccccaaatcaacagaatatacattttttttcaacaccacagcacacctattccaaaactgaccacatagttggaagtaaagcactcctcagcaaatgtaaaagaacagaaatcacaacaaactgtctctcagaccacagtgcagtcaaactagaactaaggattagaaaattcacccaaaaccgctcgactacatggaaactgaacaacctgctcctgaatgactactgtgtacataacgaaatgaaggcagaaataaagatgttctttgaaaccaatgagaacaaagacacaacataccagaatctcagggacacattcaaagcagtgggtacagggaaacttatagcactaaatgcccacaagagaaagaaggaaagatccaaaattgacaccctaacatcacaattaaaagaactagagaagcaagagcaaacacactcagaagctagcagaaggcaagaaataactaagatcagagcagaactgaaggaaatagagacagaaaaacgcttcaaaaaattaacgaatccaggagctggttttttgaaaagatcaccaaaattggtagactgctaggaagattaataaagaagaaaggagagaagaacaaaacagatgcaataaaaaatgataaaggggatatcaccactgatcccacagaaatacaaactcccatcagagagtactacaaacacctctatgcaaatgaactagaaaatctagaagaaatagataaattcctcaacacatacatcttcccaagactaaacaaggaagaagttgaatctctgaatagaccaataacaggctctgatattgtggcaataatcaagagcttaccaaccaaaaaaagtccaggaccatatggattcacagccgaattctaccagacctacaaggaggagctggtaccattccttctgaaaccattccaatcaatagaaaaagagggaatcctccctaactcattttatgaggccagcatcatcctgataccaaagcctggaagagacacaaccaaaaaagagaagtttagaccaatatccttgatgaacattgttgcaaaaatcctcaataaaatactgcaaagcgaatctagcagcacatcaaaaagcatacctgccatcatcaagtgggcttcatccctgggatgcaaggctggtttaatatacgcaaattgataaatgtaatccagcatataaacagaaccaaagacaaaaaccacatgattatctcaatagatgcagaaaaggcctttgacaaaattcaacaatccttcatacaaaaaactctcaataaattaggtattgatgagacgtatctcaaattaataagagatatctatgacaaacccacagccaatatcatactgaatggacaaaaactggaaacattccctttgaaaagtggcacaagacagggatgccctctctcaccactcctattcaacatagtattggaagttctggccagggcaattaggcaggagaaggaaataaagggtattcaattaggaaaagaggaagtcatattgtccctgtttgtagatgacatgattgtatatctagaacaccccattgtctcagcccaaagcctccttaagctgataagcaacatcagcaaagtctcaggatacaaaatcaatgcacaaaaatcactagcattcttatacatcaataacagacaaacacagagccaaatcatgagtgaactcccatttacaattgcttcaaagagaataaaatacctaggaatctgacttacaagggatgtgaaggaccttttcaaggagaactgcaaaccactgctcaatgaaataaaagaggatacaaagaaatggaagaacattccatgctcatgggtaggaagaatcaatatcatgaaaaaggccataatgcctgaggtaatttatagattcaatgtcatccccatcaagctaccaatgactttcttcacagaactggaaaaaactttaaagttcatatggaaccaaaaaggagcctgcatcgccaagtcaatcctaagccaaaagaacaaagccagaggcatcacgctacctgacttcaaactctattacagggctacagcaaccaaaacagcatgttactggtatcaaaacagagatatagatcaatggaacagaaccaagccctcagaaataatcttacatatctacaactatctgacaaacctgagaaaaacaagcaatggggaaaggattccctatttaataaatggtgctgggaaaacaggctagccatatgtagaaagctgaaactggatcccttccttacaccttatacaaaaattaattcaagatggattaaaaacttaaatgttagacttaaaaccataaaaaccctagaagaaaacctaggcaataccattcaggacataggcatgggcaaggacttcatgtctaaaacaccaaaagcatgccaacaaaagccaaaattgacaaatgggatctgtttaaactaaagagcttctgcacagcaaaagaaactactatcagagtgaagaggcaacctacagaatgggagaacattttcacaacctactcatctgacaaagggctaatatccagaatctacaatgaacaccaacaaatttacaagaaaaaaaaaataaacaaccccatcaaaaagtgggcgaaggacatgaacagacacttctcaaaagaagacatttatgcagtcaaaaaacacatgaaaaaatgctcatcatcactggccatcagacaaatgcaaatcaaaaccacaatgagataccatctcacaccatttagaatggcgatcatgaaaaagtcaggaaacagcaggtgctggagaggatgtggagaaataggaacaattttacactgttggtgggactgtaaactagttcagccattgtggaagtcagtgtggtgattcctccaggatctagaactagaaataccatttgacccagccatcccattgctgggcatattcccaaaggattataaatcatgctgctatgaagacacatgcacacgtatgtttattgtggcactattcacaataacaaagacttggaaccaagccaaatgcccaacaatgatagacttgattaagaaaatgtggcacatatgtgccatggaatactatggagctataaaaaattatgagttcatatcctttgtagggacatggatgaagctgtaaaccatcattctcagcaaactatctcaaggacaaaaaaccaaacaccgcatgttctcactcatagctgggagttgaacaatgagaacacatggacacaggatggggaacatcgcacaccagagcctgttttggggtggggggcgtggggagggatagcatttggagatatacctaatgttaaatgatgagttaatgggtgcaacacaccaacatggcccatgtatacatatataactagcctgcacgttgtgcacatgtaccctaaaactgaaagtataataaaaaaagaatactttttgaaaatacttacagactgtttagttttccatccctttatatatttttatatatgcatgtatatgtgtgagtgtgtgtgtgtgcctgtgtatatgtatatataaatatttatgggaggttataagtacttacgtacatgatcacaataggctgcctgcaagctgaggaacaaggagagcaagtctgagtcccaaacctagaagaacttggagcccactgtctgagagaaaaagtatccagtatagaagaaagatgtatgctttcgaagctagtcccatctcgctttttgacatgtttctgtctgcttgatattcgctagaagctcatgagattgtgcccatcagattaatgtagatcttcccattgactcaaatgttaatttttgggggtgaaccacccaagaaactcatccacgattaatactctctatccttcgatccaatgaatgagacactcagtattaagcatcacaagtccaccccttgttaactcgaatcaaatcacatctcctgctataatacataatcttcaaatgcagacagaaatgaggtaataattacacctaacataatacaattatcctcttacaaccaggaatgcagcaatctccaatccaaacactatttcataaagtttacaatacacaaatgttgataagaactcaataaatcttatgtagcatgataaaggaaaataaaaaaaattttcttagtacatgtgtatacatgcacaaacttttttttttttaacaaaagaaggacgaaatacttaaaacaattaacgtcctcatttctgcagctggtcacttgtttatagcggatatggatgactaacttcttctaacacccattctgccttccttttatcttcctcaagcacctcagcaggttgcggtttttattgttttgttgttgttgttccttttgttgttgttaccctggtgagtgacccaaaccttaatacctgaagggtctgatccaactgtagccctgtcagaattgggctgttgtagttttccactgaccttggttgcacgtcatggtaattctggaacacatcttaatgcatcttctgtattttatgccacactctttcttccctccattgtggaggagtaggctgatttcatcttgatagttcaggtcaatcacctcagtcaacactgtaactgcctttttacaatgctgacgtaaaggtaggaggaggcccaagtgtccaggtggcaatcttgacttccagtttaatggaatcagttttgtttcatctggtggcagcgcttttccttggggagctaagacctctaggccagcagaacataatatcataagaaacaggaaacaaaaatgttgctagtgaagcacaggagtgatagtgagtggtgaaatttctacttccatcgcttgattcctggaccagcgaattttggctacagaagtaacaataccatatattggatgctgattcagagaacatatggtcttctggagaactttgccacagccctacaaagtattgtcacatagttggcattgcaattgtaacttcaaaaggccacttcacaatcctattaatttagttgcttcaagataatgagaaacatggtaagaccagcgttttaatgagcaggagcccactgccacatttctttagctgtaaagttagtgcactggtcagaggaaatgttgtgtggaacaccataatggtgaatatggcattttgtgagttcatgaatggtagtcttatcagaagcattgcatgaagaatggggaaacccatatccacagtaagtggctattccagtgaggacaaacctctgccatttccttgatgaaagagttccagtataattaatctgtcaccaggtagctggctgatcaccccaagaaactgggccatactgagggctcagttttggcctctggtactggcaaattgggcactcagcagtggccatagccaggtcaggctttgtgagtggaagtccatgttgctgagcacatgtgtaacctcaatttctgccaccatggccgctttgttcatggactcatcgggcaatgacaggggtggctggggaaagaggcagagtggtgtccctggaaccagtgtttttatccacttgattattaaactctttatctactaaggctgctcgttggttagaactcacatggaatacaaatattttgacagcttttgaccactcacaaaggtccgtccacatacgtcttcctcaaatatctttctcaccaatattctaatcatgcatctaccaagtgcctgacacccagacaaaccattagctatggaccatgaatcagtatatagtcagaaatctggccatttgggtatcgacataggctgaaggagtgaagatggggtggctgcagtggagatcgtgagcatttgaaccactttctcaggtaacttagttgtgccttaggacctgcttaagcctggccacatgtataccacatccatttcatgatgaaatcctgctgtgcacaacccactttaagactcgatgggtcagaaagcaccaagttcatgataggcagtgtagttcacatggtgacttgatgaccaacattgaaatgtttcaccaaagcccagcaatgggccaagagctgtctctccaaagaatactagttatctgcagaaaatggcagggccttgcttcaaaatcctagagatgtatggtctgattcacctgtgggagcactgcaaagtattgtcacatcgttggcattgtaattgtaacttcaaaaagccacttaaccattctatttatccagctccttcaggataatgggaaacatggtaagacaagtagatttaatgagcaggacactgctgccacagttatttagctccaaacaacattcctatctgccactgaaacttcaagcatcattgaatctcctggttcatatggcccaaagagtagaggggtttgcaacacagcctgaagtagttgcagagtcttttcctgttttggatgcccctgaaagctggcagccctttgggtcactaataagtgggccagtgggacatattcaaataaaaaaggtactgcttcaaaaatccaactaggcctagtaagtattgtgcctctttcttggttataagaggggcctcacacaacaacttgttcttctccctggaaaggatattttgacaggcttcccaagactggacctctaggaacattacggaggtagaaggtctctgaattttagtcacatttatttcacatcttctggtacataaatgtctcaccaataattcaaatgtgcttgctacttcttgctcactcatcaaatcagcctaatttcatcaatgagatggatgaaatcattgtgatactttacagaagtgaagagcaatcaaggtctctctgagtaagattatgacaggaagccagaaagttaatatacacctgaacaaggttaataaatgtgtattgctggccttgccagctgagggcaaattgcctctggtggtccttatggaaaggaataaagaaaagggcactggccaagtgaatggctgtataccatgtgacaggagatgtattaatttgctcaaaaaataaaccatatctagaatatcagctgcatgttgattcacaactgtattaagttgcaatactccaatgtgattatccaaggtccacctgtcttttgcacaggccaaatgggagagttgaattagaatgtgctggtaattaccaatccagcatctttgaaatttttgatggtggcacccatcttcacaatcttctcagggttttgatatcatttcttatttactatttttctaggtaggggcagctcttgtggcttccatttaaccttttctattgttgtagccctcaccttggaggtcatggaaatgtgggattctgccagctgctaagtatatctatgccagttatgcaatttagcactgggaaaatgaccacaggatgactccagggactcactgggcactctgtaaatctgacctaataagctaaagcactattaattacctgacctccctgagctcctactttaactgcaggaccacagtaacattttgggtcccctggaacccacatcagcacagagctagtggccagtagtttctccaaagtctgactatttccctttccctagtacacaattactttggtaaagcctggaggtcttcttggggaaagattgtgtaaagattcactgcataaatagtcagttgtgttgtgggtttcttggtcaagggaacccagcctcctcttcattcgatggattctcggtctttaaactgtctctagcctggtaattgatggaggggccgtacttctctgttttcatcattccgaatagtgatttgtccttttgacgcaacgatttctgtatgtataacataagtatgaatgcagtaagctttccatcaatttcacttgcacgaacaccgtgactaattaaccaatggcaaggctctacaggagtcataatatttgactgccactatcccttcgctgtacccacacctttgatgtttgagtggtgccacttgacccctgtcacatcgggatccaactattctcaacatatttaaattttgtcgttgcatgactgtggtttccagagaagagcaattacagggcaattgtgcccaccagattaagggtggaactaccttctccagcccactgcccctagtgttaatctcttttaggcaacacttacacagacacatgccaaactaatactctgtatctctcaatccagttaaattgatactcagtgttagccatcacaggctcttggcgataaatttgctggtccccactgaggctccaccttcaagccagttacagcctgaagtctaggttctaggctgatggacaagaatgggaaccacttttgcttttttctaaaacgcacgcatggttgccaaataatccaatcagcaagcactttctttcctttgaagcaaataatattcctggactcagccacatttgaggactattcaaactaccagctgtggagaggagctacctacccaagggccatctctctcctgcaagcttaggagatgtcaggactatcagcagtgggctggagctacccaccacagtatctgctgaaagctggggagataatgggatgaccagctagagtgaggagctacccagtcgagggtcttctttttgctgaaggcttagccaatcttggaaccaccaggtgtgaagtagacctacccactccagggtcttcactctgtggagagcttaacatctcacaatatgaccagctggatggagaagctaccaagtccagggtttctttcctgctgagagctggacactaagccttgacaacttgcctgtaaagataagctgcccactctaaagccgtctctccactgagagctggacactcatcagaacatccagcctgtggagaagacctacccaatcaggatctcttttgagttctgtccctcagtaaatcttgtctataaatgtctcactctccacgtgtccatctacctcattcttcctggataaagaactattatttgagaatcactgaatggtggtgctgaaagaactgtaacacaaacagggaaaaaaatgtctcttgctcatcacgttgtgaaagacaaaagtaagaggacagctaggctatctcaaaaccagggctgtgacaccctctttagggctttgctgtttctggcatcctgaaacttctgggcaccactacattccccagtatcagctgtggaagctgcttgcagtatgcctggtccagctgctgcatctcagtgagatggtacttctgttggtacctaaaatttcttgctttgcaacagctggtaggcctggctgtctatagcggctggaccccacacttgctcaaacaccattgccactctacctcacgtttgcccttggcaggtgttaaatcctggcccataatgcaagctgagtgcagcctgtcaggcagagtgggtaaagctagcttagcaggcctgagaaaacgcaggcaaaggcaccactggccgcagaggttttcaactggcaaggtgactctcccaaaatctcatgacaaaaggagcatagctagttgcgtttaaatgcctttcttctgttggatcttgaactacttaaaattcagtctcctacaatttggaatgtttaaaccttatttgaaaatcattatatttcaaaatcttttggaaattaaagttgaaagactggtatttccactgaaacatcctatccctcttacttgcacagacatctagtctctgagaatatacttctgtaacccatggcattgggcttcaggttagcactcttccactgtgttataaagctttctgatgaaacagaatttctgattttgacattttgtactcataaaatttctttatgtgaggagcttttgctgtgcattgcaggatgatgagcagcattttgggcctcttccattaagtgcaattgtaaatgccttttttttttccccatggaagaaatgcccaaatatgtttgtgtcttgtggaaacaaaattgatggctatctttatcgtataagttaatacccatgaaaaaactgatggtagtgagctagtgcagtcataggaatgtttttacattgttctttggaatgtaaatcagtacagacaatgtggaaaagtgtgtggtgattcacacttttagtctttcagaatcccaatcccactggattcagcaatttcattactgggtgtatagcacctgcaaaattagtcattctattacaaggacgcatgcctgtgtatgtgtattacagcactattcacaaattcaaagtcatggaattaacccaaatgcctatgagtgacagactggataaagaaagtgggaaaacaacaccttcaggacaaatagctaatttatgcagagataaatacctaggtgatggggtaatgggttcagtgaacaaccatggcacacgtttacctgtgaaataaatctgcatgtcctgcatacatatcatgaaacttaatataaatttaaattaaattaaattaaaattaaaaggctttcatttttgtagcagttatagtaactttggaatatgtgccacatcttatttaagagattttataaaataactataaatcagagttttgacaaactgcaccaaaaagtaaataagtagtatatttcaattctcagttgattgaatttcttttctttcattttgaggatagaatcttacacagtgtcttcagctggagtgcagtggtgcaatcttgacatgctgcaacccctgcttccgagcttcaagggattaatctgcctcagccatttgattagctgagattacacgtgtgcaccaacacaggtgatggggtttaaccatgttggccaggctagtcccaaactcctgatgtcaagtaatctgcctgcctcatcatctgaaagtcctgggattataggtgtgagtcaggatgtctggcagttgaatgaatttctaattgagaaacttatccatgttgcaaaactttattttctatatcatacgtttatgagtttcttcatatgtctcataagtcaagaaaaataatataattttaatgcattctcttttcattggaaatgaatgtgtatccatttatatgtaattaaaagagaaagtttatttagaatatcatttttcttttgtgtaaaactctggggttttagaaatttctttaaaaatattactttggaaactacatttcttgacataaatgtttgttttttaaggatcttttttggtaagaaaattcaaaattgtttgaagatacaatgagatgtttaattatatcaaataaacttaaaggtattttctttgagaaaacaggtttttcttaatttaggttttctacaaataatattatgattactttctcttcctaaaattaatttatgttttcctcttccctgcatcaatagttcacctgcaatgtataagaagtaagaactgccagcagaacaggcatttccaagaggtaggtcacccactaccatgaatcctagtttgagctacttgttgcgccagctattgactgcgtaaaaaaatctaaaaatgagagta

SEQ ID NO: 640 - DNA, 16038 bp, Homo sapiens
  source 1..16038: mol_type = other DNA
atcaagagccaggaagcctcctggagggccggaaactttccaaggcgcccgccgactggctgtattggggagggcggggccggggccccgggagagggaatgagtgtgagctcgtgagtgggcgccgccgccaccgcccccgccgccgtcgtctcggtagcagccttcgccacgccggggtcttcaggtgagcaggccttgctctggtccaaggactccccattcccgacgccgactgcttactcaccagtcttggagcccgcaccgcgagggcccgcccccttggctgaccacgtgacccaagttcagtgacccctgacctcctccccccgcgcaccccctccccgatctgggctgggctaggccgggtgggaggatgcgcgttgccgaggcccggcccgcggaggtcagttcccacgcctcctctccagcgtgactagtggctgaggatgcggaggagaggaggctgaggagcgggagactttggtcacagtctagatttcgtgtacggtcatataatagggaaactccctccgtgcctttcgcgctggtggactaaatgctcccattttacagatagggaaactgcagcttcacaacgatctattggcgggtctagggtcaccaaggggtgggtctccaatccatgtctttggggtgggatccaggccttgttccccatacagctggcggctcctgaatgcggtatagagtaaagattaggagcaaggggttgagtccttgctccccctccctacttactcagtgcttacttcatgatcttggagaagtcatggaacatttagcctctgaggtttgatttccttgcctgtgaaatagacgaaatacataataatatcttattattgagaatatagtgaagtaatccatataaagcacttagctgtgtctcaggcatagtacagtgctattcgtggccgggcgcggtggctcacgcctgtaatcctagcactttgggaggccgaggcacctggattgcctgagctcaggagttcgaggccagcctgggcaacacggtgaaacctcgtctctactaaaaatacaaaaaattagctgggcatggcggcgtatgcctgtagtcctagctactcgggaggctgaggcaggagaattgcttgaaccagggaggcagaggttgtagtgagccgagatcacgccactgtactccagcctgggtgacagagcgagactgtgtctccaaaaaaaaaaaaaaagctcgtcgggccaggtgcggtggctctcacgcctgtaatttcagcactttggaggccgaggtgggcggatcacctgaggtcaggagttccagaccagcttggctaccatggcgaaactccatccctactaaaaatacaaaaattagccaggtgtggcggcacaggcctgtaatcccagctactcgggaagcggaggttttagtgagccgagatcaagccactgcactccagcctgggtgacagagtgagacatcagacatcatctccaaaaaaaaaaaaaaagaatagttcttctttctttcttttagaagatcttttttttttgtttgtttttgttttttgttttgtgttttttttgagactgagtttagctctgtcatccaggctggagtgcagtggtgcaatctcggctcactgcagcctctgcctcctgggttcaagtgattctcctgcctcagcctcctgggtaattttttgtatttttagtagagacagggtttcaccgtgttagccaggatggtcttcatctcctgacctcgtgatccaccagcttcggcctcccaaagtgctgggattacaggcgtgagccaccatgcctggcctataattacaaatttttttttttttgagatggagtcttgctctgtcgcccaggctggagtgcagtggtgcgatcttggctcactacaacctccacctcccgggttcaagcaattctcctgcctcagcctccggagtagctgggactacaggcgcggaccaccatgcctagctaatttttgtatttttagtagagacgaggtttcaccatattgtccaggctggtctagaactcctgaccttgtgatccacccgccttggcttcccaaagtgctgggattacagatgagccactgcgcccggcctacaattttttttttttttttgagacggagttttccccttgttacccagaatggagtgcactggtgcgatcttgactcactgcaacctctgtctcacgggttcaagcgattctcctgcctcagccttgcgagtagctgggattacaggcatgtgccaccacacctggctaattttgtatttgtagtagagatgggggtttttctatgttggtcaggctggtcttgaactcctgacctcaggtgattcgcccgccttggcctccgaaagtgctgggattagaggcgtgagccactgggtccagctacaaattcttacgactggtttggaggcagaatgcaaggacattggaggatctaggaagacatccctgagcaagtgacatttgaactgaaatctgaaggagtgagtagcagttcactagacaaagggattgggggtggaggacagggaggagagagttccaagtggaggaagcagtgttcaaaggtcctaaaataggtgtatttgaggaactgaaaggaggacacaggtgggaatacagaacacaagaaagtaggagataagaggtaagaggtattgcagaagtaggcagtacatgcagagcctccagagccattgttcagatttgttctttatttctttttttttttgagacggagtcttgctctgttgcccaggctggagtgcagtggcgtgatctcggctcactgcaatctccgcctcctgggttcacgccattctcctgcctcagcctcccgagtagctgggactacaggcgcccgccaccaagcccagctaattttttgtatttttagtagagatggggtttcaccgtgttaaccaggatggtctggatctcctgaccttgtgatccgcctgcctcggcctcccaaagtgctgggattacaggcgtgagccaccgcgcccggcccaaatttgttctttatttcaaagacaatggggagccattgggaggagtgctgcacagaagccacatagctgtccattggatgtagggacctggacgtcactggtgacccattgatcccctgccagaggagtagtgggggcaatgcctgggtgggtcatcctggatctgggccttcctgtctgaggtgtggatgcatcactttggcgcacgggagcctaccttctggtgctgtgcgttgttggagtgagtcatcagctgctgtttttgtcggtttcttattgtgctataccctgtgaacaaaacaggttccagcatttaggcactgcagccaaactggggaagaccaaacacataggcagaaagcccagctactatccagcctggccaacatggcgaaatcttgtttctactaaaaatacaaaaattagctgggcgtggtggcacgtgcctgtaatcccagctacttgggaggctgaggcaggagagttgggggcaacaagaacaaaactccgtctcaaaaaaaaaaaaaaaaaaatttagccatccgggcgtggtggcaggtacctgtaatcccagctactcaggaggctgaggcagataattacttgaacccgggaggcggaggttgcagtgagctgagatcgcgctgctacactccagcctggcgccagagcgagactctgtctcaaaaaaaaaaaaaaaaaagaaaagactgggtaatgtataaaggaaagaggtttaactgactcaatgctggggaggcctcaggaaacttacagtcatggtggaagaggaagcaaacatgtctttcttcatgtggctgcagctaggagaagtgccgagcaaaagggggaaaagctctttataaaaccattagatcttttgagaactcactatcaggagaacagcatgggggaaaatgtccccttgattcagttatctccacctggtcccgctcttgacacgtggggattattaaaattcaaggtgagatttgtgcggggacacagccaaatcatatcagtcatctcattttcacagcaaccctgtgagctagagagggcaggaattattgtgcctgttttacagtttaggacacaagggctcagactgatgaaggccttggccaaattcacatagaaggtgacagggcaggaatgggacctagttctgtgaaccccaacactttggactttgtctagcttcaccgttcttgacccactggccagtctgtttccttctctgagcctcactttcctcatctgggtactcagagctccttgtttagaaactccagagcacgagcagcaaggctggtgtggagggtgttggatcacactcctgggctctccgggaggctgggcagcttttccagtcttcattctccactcccagctccactggggccatgtcagagcgagaagagcggcggtttgtggagatccctcgggagtctgtccggctcatggcggagagcacgggcctggagctgagcgatgaggtggcggcgctgctcgcagaggacgtgtgctatcgtctgagagaggccacgcaggtacactcccctcaccccctgatacctccaactttccttgtttctgcctttttactaacctccaccctcgctgatttattcaagtgtacactgggtgcctgctccatacaacagagacagtccatgcctttacagaactctacttgtagctgtctgggcttccagcagacaaagcgcttgccaggcatcttcccatgtgctcctcacaacagccctgttgggcaggcagagcgggtagatactcacattctgcatgtgagaaactgaggtgttgacagaagatgtgacacccggggggtgtttttgtacaggagcagagacggaatctaggcttctgatccctaagcgtggtctcctgtttgccttctctccagtctggcccacttcatttggggtttcccatgccccctgcttcacatcctttgactctggcttttgttccctccctcccagaatagctctcagttcatgaagcacaccaaacgccggaagctgacggttgaggacttcaacagggccctcagatggagcagcgtggaggtgagtggggtgcaggctacagagggctcaggtggcatgaggccacttccatgtccagttcagggctggcgatgtggtgagacattaagaccaaacgctgccgggcatggtggctcatgcctgtaatcccagcactttgggaggccgaggtgggcggatcacttgaggccaggacttcaagaccagcctggccaacatggcgaaaccccttctttactaaaaatacagaaattagctgggcctggtggtacatgtctgtaatcccatctagtcaggaaactgaggcatgagaatcgcttgaacctagcaggcagaggttgtggtgagctgagattgcactccagcctgggcaacagagcaagaccctgtctcaaaaaaagaaaaaaaaaaaaaaaaggccgggcacaggagcttacacctaaaatcccagcactttgggaggtggaggccggcggatcacgaagtcaggagtttgagaccaacctgcccaacatggtgaaacctcgtttctactaaaaatacaaaaattagctggccgtggcggtgggcgcctgtaaccccagttactcaggatgctgaggcaggagaatcgcgtgaacctgggaggcagaggttgcagtgagctgagattgtgccactgtactccagcctgggtgacagagcaggactccatgtcaaaaaaaaaaacaaccaaaaaaacacaaaaattagctgggtgtggtggtgggcacctgtaatcccaactacctgggaggctgaggcaggagaatcgcttgaaactggaaggcgtaggttgcagtgagccgagatcacgccactgcattccagcctgggcgaaagagcaaaactctgtctcaaaacaaaaaaaagaaaaaaagactaaacgcacacataagggaagcaagaccctgatagcaacagcagaccaggtgctaggcccagcccacctgggctatgtgttcagaaaagagggagaggaggccactggaggcccagaggttagagaaagctttttggaggaggtgggactggagctggcccttaaagggtggtgaagaacttgagcttggcttaaactaggccaagaggaaaagaaggcattcaggctaagggaggagcctgagcaacagtgtgggtgttagggcctcatggtgtggtttttctggagcggtgagttgagagaggaaggctatgtttagaagacattagtgagttttcaaagttgagtgagtgtgaataaggaggaccagtgcttggtgtggggctcaggacccttccagttatgggaggagcgaccatgttctttcccttgacccagggagccccggatgctccaggcaagtccccagtggtggctctgagtcccaggcttccaccacttttcttgggacttctggacttccttcaaacgtgggctctctgctctggtcagtggagcctcatcctggatcctgacgcctgctccctccctggattcaggctgctctccaattccctttttcctcaggctgtgtgtggttacggatcacaggaggcactgcccatgcgccccgccagggagggtgaactctactttcctgaggatcgagaggtgaacctggtggagctggccctggctaccaacatccccaaaggctgtgctgagacagctgtcagaggtggctgccggggtcctgcatgggttggggatgggagttgggccgtgaagagaagtggtgatgggctggctggtggaagaggcagaacttggaggggtaggcggtactctaaggggcaaaacgccaggctgacacatctctctgcactgcttctagttcatgtctcctacctggatggcaaagggaacctggcacctcaaggatcgggtaaggggtgatgtaggaaacaggctctttggatgaattttctcccttaggttctgagggtggtgcctatgtgcccccgagtctgcgtctaacatgtgtttacccatgcctgccttgtgccatggtctgagtgggcgctgggctctgcatggagggctcagagttggagatgggggcccagacctgtaactagtcataatgcagcatgttggatgctaagacagaagtctgggcagcatgctggggcggtgtttcacccccagggtatgctgagcagagcttcacagagcctgaagctctcaggagtccgtctggcagagggtgggtggaagacaggacagagcacagaggtgtgcagagcctagatggtcagggctgagcaggctctaagagcagtctcttgccctggttgtcctgtcagaaaggcttcttgtggatgtgtgtggggatggtggttgagggggaggaggctggagaggccaggagagggccagctctccacctgtccctgcttcctgcctgtcctctggcagtgcccagtgctgtgtcttcactgacagatgaccttctcaagtactatcaccaggtgactcgtgctgtgctaggggatgatccgcaactgatgaaggtgagcgagtgggcccaagttggggcacaaagttgaaattgtaaattctagacctgttttttttttttttttttgagacagagtttcgctcttgttgcccaggctggagtgcaatggcatgatctcagctcaccgcaccctctgcctcccaggttcaagtgattctcctgcctcagcctcctgaatagctgggattacaggcgtgtgccagcatgcccggctaattttgttttgttttgttttgtttttgaaacggagtcttgcattgtcacccaggctggagtgcagtggcgcgatctcggctcactgcaagctccgtctcctgggttcatgccattctcctgccttagcctcccgagtagctgggactacaggtgcccgccaacatacccggctaattttttgtattttttagtagagacggggtttcaccgtgttagccaggatggtcttgatctcctgaccttgtgatccacctgcctcagcctcctaaagtgctgggattacaagtgtgagccaccgtgcccagccttatatttttaatagagacgggggtttcagcatgttggtcagactggtctcgaactcccgacctcaggtgatccacccgccttggcctcccaaagtgttgggatgacaggtgtgagccactgtgcccggcctaattctatgaacatttaaatttttatttattattttaattaaaaaaacattttttttaagatggggtcttgctctgtcacctaggccggagtgcagtggtgtgatgttggctcactgcagcctctacctcttgggttcaagcaattctcccacctcagcttcccaagtagctgggattacaggggcataccaccatgcctggctaatttttgcatttttagtagagatgaggtttcaccgtgttggccaggctggtctcaaactcctgacctcaggtgatccacccgcctctgcctcccaaagtggtgggattacaggcgtgagcctatatatatatatatatatatatattttttttttttttttttttagagacagggtctcactgtattgcccaggctggtgaaactcctgccctcaagcaatccttccttggcctcccagcactttgggaggcagaggtgggcggatcacttgaagtcaggagttcgagaccagactgtccaacatggtgaaaccccatcttcactaaaaatacaaaattaactggctgttgtggtgggtgcctgtaatcccagctactcgggaggctgaggcaggagaattgcttgaacccaggaggcagaggttgctgtgagtcaagatcacaccactcaggtggatcacctgaggtcaggagttcaagaccagcctggctaacatggtgaaaccccgtctctactaaaaatacaaaaattagtcacgtgtggtggtggacgcctgtaatcccagctactcaggaggctgacgcaggagaatcgcttgaacctgggaggcagaggttgctgtgagctgagattgtgccattgcactccagcctgggcaacaagaacaaaacttcatctcaaaaaaaaagatcacgctgctgcactccagcctggctgatagaacgaaactccgtctcaaagaaaaacgaaaaagtaatactagtacatgtttactgtagaagtacatataatataaaaacatagaaaaagaaagtggctgggtgcggtggttcacgcctgtaatcccagcagtttgggaggccgaggtgggtggatcatgtgaggccgggagttcgagaccagcctggccaacatggtgatttcccgttggatatctactaaaaataccagaaaattagccgggcttggtggcatgcgtctgtaatcctagctacttgcgaggctgatgcaggagaatcgcttgaacccaagaggcagaggttgcaatgagccgagatcgcgccaccgcactccagcctgggcaatagagtgagactccatctcaaaaaaaaaaaaaaaagggccgggcacggtggctaacgcctgtaatctcagcactttgggaggccgaggcgggtggattgcttgaggccgggagttcgagactagcctggtcaacatggcaaaaccctgtctctactaaaaatacaaaaattagctgggcgtggtggtgggcgcctgtaatcccagctacttgggaggctgaggcagaagaattgcttgaacccaggaggcagaggttgcagtgagctgagattgagccactgcactccagcctgggcgacagggcgagactccatctcaaagaaaaaaaaaaaagaaaaagaaactgaaaagtctattcctccacctacttttttttctctgtatcaactatgattactctcataaaaacctaagtggtattatattaagcatctggttttatagattgcctttctcagttaaaaatgttggatggccgggcgcggtggctcacgcctgtaatcccagcactttgggaggctgaggtgggcagatcacgaggtcaggagatcgcgaccatcctggctaacacggtgaaaccccgtctctactaaaaaatagaaaaaattagccgggtgtggtggcaggcgcctgtagtcccagctactcgggaggctgaggcaggagaatggtgtaaaacctgggaggtggagcttgcagtgagccaagatcgtgccactgggcgacagagcgagactcggtctcaaaaaaaaaaaaaaaagttggacattcaggttgtattcagggccatatgcaggtatatgtgaatgagtttctgtaggttacatttatagaaatagaattgctagatcaaagaatatgaacattaaaattgtaaaacatgaataaggtgatacactgtcttccagaagaataccgcattcatgttttacaattttctggtggatccaatgcagtctgggcccttccttttaggttgcactccaggacttgcagacgaactccaagattggggcactcctgccttactttgtttatgtggtcagtggggtaagtgaccaggctgggacagggagaatgttttataaggaagagatgacccagcaggtgtagggctcatggcaagtgctgtcagaatggtgggctcctgcctgtcccctcatgtccctgtaagctaccctcttctcccaacaggtgaaatctgtaagccatgacctggagcaactgcaccggctgctgcaggtggcacggagcctatttcgtaatccgcacctgtgcttggggccctatgtccgctgtctggtgggcagtgtcctctactgtgtcctggagccactggctgcctccatcaaccccctgaatgaccactggactctgcgggatggggctgccctcctgctcagccacatcttctggtagccactgggcctaaacctgcgggtgggattgctgcagagccaagtgggttggggtaaggaaatggggcgaagcctctggctttgagagtctatgagaagatggggaaccttttccctaggagcgtcctagctggtgtgctgtgacacactgggattctgaaaatggattacaaatacgccaaggtattggttcttcagccctcaggtcctaggccagtcacccctggcagccttcttcacttaaccccagcactcccgagtgtgctgtacagatgctattctctttgtgttgtcttgtgccctgttgggtggcaccatgcctcattcccctccctaactgaatggtgctcccacaggactcatggggaccttgtaagtggcctctatcagcatatcctgctatccctgcagaagatcctggcagatcctgtgcggccgctctgctgccactatggagccgtggtggggctgcatgctcttggctggaaggtgagcaccctggcctttctcacacagccgtaagaactcccatttgtgttagaaaaatagtacttgtgcatcgttatctccaaaatagtgtgtgcctgccactgccatgtattgagttctggccttaggccaggctcagtgatacttgactttctgaatgtaaatgtcttatcctttcgaaagtcctatatggcagatactgatgtccccacattttataaattcctgcccgttctatattatcacattaagaaataccttcaattcctgttgtattgagcattttacacatgaatagatactgaattttgtcatacctttttagcatctgtagaaattatcaaatgattatacgctttaaaaattaggtgttggcgccgggcgcagtggctcacgcctgtaatcccagcactttgggaggctgaggtgggcggatcacaaggtcaggagatcgaaaccatcctggctaacacggtgaaaccccatctctactaaaaatacaaacaattagcctggtgtggtggcgggcgcctgtagtcccagctactcgggaggctgaggcaggagaatggcgtgaacccgggaggcggagcttgcagtgagccgagattgcgccactacactgcagcctgggcgacagagcgagactctgtctcaaaaaaaaaaaaaagttaggtgttgccactgtgataatattaagagggaggatcttttttttttttttttgagacggagttttgctcttgtcgcccaggctagagtacagtggcatgatctcagctcactgcaacctctccctcttggatttaagcaattcttccacctcaccctcccgagtagctgggattacaggcacgtgccaccatgcccacctaacttgtatttttagtagagaggcagtttcatcatgttagccaggctggtctcaaactcctagcctcaagtggtctgcctgcctcggcttcccatagtgctgggattataggcatgagccaccacgcccagccgattatgtggtttaatatgacaagttctattctgttgatatgctaggtgtattaatggattcttcttctgaaccacttttgtatacctggaataagttctatttgttgcttttgagatttttgtttttttgagatggaatcttgccaagatggcgccactacactccagcccgggcgacagagtctcacactgtcgcccgggctggagtgcagtggcgtgatctcggctcactgcaacctccacctcccgggttcaagtgattctcctgcctcagcctcctgagtagctgggacttacaggcacgcaccaccagggccagttaatttttgtatttttagtagagacggggtttcacaatgttggccaggatggtctcaatctctggacctcgtgttccgcccgcctcggcttcccaaagtgctgggattacaggcgtgagccaccggtgcctggccatatatatatattcttaattttttttttttttttgagacggagtctcgctctgacacccaggctggagtccagtggcgccatcttggctaactgcaacctccgcctcccgggttcacgccattctcctgcctcagcctcccgagagtagctgggactacaggcgcccgccaccatgcccggctaattttttgtatttttagtagagacagcgtttcaccgtgttagccaggatggtctcgatctcctggcctcatgatccgcccgccttggcctcccaaagtgttgggattacaggtgtgagccaccgtgcctggcctatattcttaattttatcatcaatttatattggatttttatcagatggtttttctgcatcttttgaaatgatccgaaggcttttcagcttttgttttccaatgttattacagatttcctgatagtaaacaatctttatagttccatgatacactaaactatgtcatgggatagtcgtaaagaaaaaacccaaagcttttattggactgtaatgcattttaatttacttgtgggtctgctaaattttaaaagggtttatattcaggagtgaaattaaacatgtttcctctcatgtactgtccttgtctggttttagaatcagggttatactggccttacagaatgatgtggggagtatttcttttttatatttactttaataagatttagatcatctttttcttttctttttttatttaatagagatgaggtcttcctacattgcccaggctggtctcaaactccttggtttaagtgatcctttggccttcccaaagtgctgggattacaagcgtgaggcactgcacctcgcctatctttttcttgagtgtctgtagacttttgtaaattctggcatggtattttctttcctttttttttttttcgagacagagtctcacactgtcacccaggctggagtgcaatggcgcgacctcggctcactgcaacctctgcctcctgggttcaagcgattctcctgcttcagcctcccgagtagctgggattacaggcgctcaccaccatacctggctaattttttgtatttttagtagagacggggtttcactgtgctggccagggctcgtctcgaactcctgacctcctgatccgcctgccttggcctcccaaagtgctgggattacaggcgtgagccacagcgcccggctggtattttccttataggcccagctggtattttccttatagttaattcttttttttttttttgagacggagtctcactttgcttcccagggtggagtgcggtggtgtgatctcggctcactgcaacctctgccccccgagttcaagtgattctcctgcctcagcctcccaagtagttgagattacaggcaactgctactgcgcccagctaatttttgtatttttagtagagatggggtttcaccatcttggccaagctggtcttgaactcctgacctcaggtgatccactggcctcggcctcccaaagtgctgggattacaggcgtgagccacagcgcctgtccaatcacaggattttaaattgtataatcagagtccaagtctctggttggttgtttttatgcagattgtttgaactgagtctcagtttacatctaagtgaagccagtacttgcctgattgtatagggtagcagtatgcaaactaaattttggagttgtcagtaatgagcattatttagcacacagggcagtgatattgggtatattttttattgtctccctttgtaccttatctttattcccaatgcctagcttaggtatacagtaggttccaaataaatatatggttgaatatgccaatcagggaatttaggaggattgagccctgtctaggatcagagataaaggtaggtctttcatgggaaagggtccttgagagggaataagtatcaaagacatgctaactgtattccttctcttccttccaggcagtagaacgagtcctgtacccacacctgtccacctactggacaaacttgcaggctgtgctggatgattattcagtatctaatgcccaggtcaaagcagatggacacaaagtctatggagccattctggtgagtaccgtccccttccagcctcccttccctgcatgagcttagcagccaagcaggcttactttggaatatttgatgggcccaggttcctcgaattttttgcctatcttagtccttggctcttacaggtggcggtagagcgactgctgaagatgaaggcccaggcagcagagcccaacaggggtggcccaggtggcagggggtgccggcgcctggacgacctgccatgggacagccttctctttcaagagtcgtcctccgggggcggtgcagaacccagctttgggtccggcctcccgctgccgccagggggcgcggggccggaggacccttctctttcggtgaccctggccgacatctaccgggagctctacgccttcttcggtgacagcttggccacacgctttggcaccggccagcctgcacccacggctccgcggccgcccggggacaagaaggagccggcggcagccccggactcggtgcggaagatgccgcagctgacggcaagcgccatagtcagcccgcacggcgacgagagcccccggggcagcggcggaggcggccccgcgtcggcctctgggcccgccgcctctgagagcaggcccttgccgcgcgtgcatcgggcgcgcggggcaccccggcagcagggccccgggaccggcacccgcgacgttttccagaagagccgtttcgccccgcgcggcgccccgcactttcgtttcatcatagccgggcggcaggctgggaggcgctgccgcgggcgccttttccagactgccttccccgcgccgtacgggcctagcccggcctcgcgctacgtgcagaaactgcccatgatcggccgtaccagccgccccgcccgccggtgggcgctctcggactactcgctgtacttgccgctctgagtcagtggccccttcgttccttgtaaataaatcccgcccccggaa

SEQ ID NO: 641 - DNA, 32744 bp, Homo sapiens
  source 1..32744: mol_type = other DNA
cggaaaagaggccgtggggggcctcccagcgctggcagacaccgtgaggctggcagccgccggcacgcacacctagtccgcagtcccgaggaacatgtccgcagccagggcgcggagcagagtcccgggcaggagaaccaagggagggcgtgtgctgtggcggcggcggcagcggcagcggagccgctagtcccctccctcctgggggagcagctgccgccgctgccgccgccgccaccaccatcagcgcgcggggcccggccagagcgagccgggcgagcggcgcgctagggggagggcgggggcggggaggggggtgggcgaagggggcgggagggcgtggggggagggtctcgctctcccgactaccagagcccgagagggagaccctggcggcggcggcggcgcctgacactcggcgcctcctgccgtgctccggggcggcatgtccgaggctggcggggccgggccgggcggctgcggggcaggagccggggcaggggccgggcccggggcgctgcccccgcagcctgcggcgcttccgcccgcgcccccgcagggctccccctgcgccgctgccgccgggggctcgggcgcctgcggtccggcgacggcagtggctgcagcgggcacggccgaaggaccgggaggcggtggctcggcccgaatcgccgtgaagaaagcgcaactacgctccgctccgcgggccaagaaactggagaaactcggagtgtactccgcctgcaaggtacgcgctcgccgctctcggaccgcggatgggtgctaggggcccagcccgcgggacccccctccccctcccgcttccacctccgcctcccgcctcctgcctctcgcctcccgcctggggccgctgcaccgcggaagtgctcttgtcgcccgcgcccaattagcttcttcttggataagagtcctgctgggtttgaagaagggggatcactaagacggagagcccttcattccttccgcttgaaaggagtagcttcggcatccgagctcccgggctaccttggggttttgttgctctgtaggagctcgctggagtcactttcccgggagtggagcggtgctctccatgtggcgggtgacccaggggcaaggaaaaatcttttgggggactgagtggtcccttctgcaatcgatcccttcctgtgtcccactgggaggaactgggtgcaaggagtgggggtggagaagactcccggactcctggcgctttgggaaagcgaaggggaggaaagcgcggggtgggaaggtgggcagagtccgaggcgagggtcttgtggtgcctggcgccctcggctgggggcggaggcactgccgcgcgcggtgacagccctgtcattattgtattattacttgtttagttaaaacgctgtcccagctgctcgaggtgtaaacaggatttggcaaagtgacagcccagcgcggcgggcgctactgctcagtttgaggacacccatttcttgctacccactctccatgccagtttaggcaccctgtcacctccagctgcagatccagatgtggaggctgtgttcccgaggtgggaggattgcccgaggccgcggggcaggctggccctgcgctgtcagcagcggctttgttttgacagggtgacagctgaggggggcggggacttggccttgtcagctcctgcggcctgtggctgaggcagggaagagacacactcacacacactcacacctccctgtattcttcctgcctgctgtaaagagggtcaagttcccagattccagattcccgattgtcacaaccaagctgcagtgaccacttctgaattttgacataactataatttattctactagaacatctaggttatactcttcttggtacttgcaggagcttctcagtcacaatggaatgtctatgcttgctctttttccacaccatatgctcaggtttatgttaagcacctctgtatcctacactggttcaataaatatttgttgagtgaatgtaggatctagcccagtgctcctcaaactttaatgtgcatgggaatctcctggggaagctggttaaaatgctgattatgaatcaggtggtctgaggtggaagctgagagtttgcatttctgacaaactcccaagtgatgctatgctagtccacagaccacattccaattcagacctggacaatatattatttgtcccctttgattttagcagaaaagacagaaacaaataataatgctatgtggttatttctgaagaaggaatgcaaaaaagatgaagtggggagtgtgcttctaagaaaggtgcaagcccaggagttgatcatgaagggcattagacgaatgagaacaggacaccgactgtagtaggcagaagggcgagctatgtacagaattaagaacaaggtcatgggtacagggcatactgcttgggtgatgactacaccaaaatctcacaaatcaccattaaagaacttatgtaatcaaacaccacctgttccacaaaaacctatgaaaaaaaagagcaaggtcaattacttggtggccttggcgtttcgcagccaaagtgggctcatgcaggaactgtctcaactcagtgtttctgttctggctttattttaaaatttatttattgggttctcatcaccagcacctcttaaagacttcctgctgcctgctgtagctttaatatctgaaaactttcctgaagttttggttttgtctaaaaccatgagcatatgtggcctgcattgatatttttgatcttttcaaatttccatgggtgagatgtagcaccacttccaagtgggatttgagtgtttcctggtcactttcatgacccaacaagagaaagagaaaatttattttaacgtctttttttttttttgagacagggtctcactctgccacgtaggctggagtgcagtggcatgatcgtagctcactgcagactcaacctccctgggctcaggtgatcctcctacatcagcctcttgagtagctgggactacaggcatgcgccagtacactattattattattatttgtattctttgtagagatagggtttcaccttgttgcccaggctgttctcaaactcctgagcccaagcaatttgcccgccttgcttcccaaagtgctgagattataggcatgggccaccatgcctggctgaaagtgttcatttttatgtatccattcattcagtaaatatttagagggttaccaactgggtgtcaggcattgggctaggtgctgggcctatgacacacagaatttgtccttcaggagttacttattgtgtgtgtgcacaagtgcatgtgtgtgtatgcatgtgttgggggcctagggatgagggcagtgaaccaaaattacagagaagttcagaaaaactactttcttggagtagttgcggacccagagcaggacagttcatagactggggcactggtagggtgggattggcttcctggaggaagtgtcagtggctgctaagaactcttggcagggcagagtggggtggggtgaagcttcttgtagtggagaaactgaaagcagttgtggaagcttggaggtgggccaactgagccagacctttgttgcctagggccaccggctggggtgcgtggccaagagggcactgaggagtgcaggaatcttaacctggagagtgacattatctcagatttgctttttttaaaaaaaaaaaaaatttaactggacttgattgggtacgagggagtgtaagagagcaaaatctgtggttctctctcagcttgtttctgcacttaatatgagcaagcccaaaaggacagattgctctacctttgccacaggccccttggcaagttagattagagagattagagaatgaggagggatctagaaagagataaggtagttcactggggggcttttgaaagaaaaacaggtcccaggcctgatataaatctggcctttaaacttcacaaacgaaaccaaaaaagaagggagctaagtcagccagggtgacgtgccacaccccagagaatagaaaaagaaaaaaaaaaaagaaaaaagaaaagaaacaaacaaacttgtttcgcaggatccagatctttgaactgtgtcctggtaaaggttgcttcagagtcattttggttctgtgttcattaaaaatgtagatctaggccaggcgcagtggctcagacctgtaatcccagcactttgggaggccgaggcgggaggatcacttgagtccaggaatttgaggccatcctgggcaatatagtgagacttcgtctctacaaaaaataaaaaattaaccaggcgtggtggcagaggttgcagtgagctgtgattgcaccgctgtactccagcctgggtgacagagcaagattctccctaaaaaaaaaaataaataaataaataaaataaagtagatctgaccatgttatacccacacttcaggccctttaatttctctttattgtggtccacaaggccctgcatggcctggctactgctatctgtggctccttatcgagggttcaggcacatggtttcctttcacctagtcgggggtgaggtggggtgaggggctttgcacatgctgttcactgggactggaagctcttctttccacattttaaaattaactcccaacccttcctatagaactcagattccttgcctttcctttacccccctgagcagccttcccattagaaattatccaaattcatctgtactcttcctggtgcttatattatgatttttatgatttgtatgattatttgatgtgcatttagaatctttgaatagattcttagccatgcggttattgactaagcgaatgaaccagagaagagaaaatggaagaaatgattagctgtgatgttagcagttgtggaattttaacttaatcacttcttgacaactaagtagagatttgtcatataggacagttctaggtgtcccacagatattgataggattgggttatttatttatttatttttttgagacagggtctcgctctgtcaccctggcaggagtacagtggcgtgatcttggctcactgcaacctgtacctcccaggctcaagtgatccttccaccttagcctcctgagtagctgagaccacaggcatgcaccaccatacttggctaatttttgtattttttttggtagagatggggtttcgccatgtttgccaggctggtttccaactcctgggctcaagcaatctgcctgcctccacctcccaaagcgctgggattacaggtgtgagccactgcacctggcctatttatttatttatttatttatttatttatttatttatttatttattttagagacagggtcttgctctgttgcccaggatggggtacactggcacgatcatagctcactgcagccttgaactccttgactcaggtgatcctcccacctcagcctcttgggtagctgggactataggcctgcaccaccatgcctgcttgggattgggtttttaatgttataaaagaaaccccaagtgaatgtatgagtaggccaaatccaaatcttcttgaattaaagtatatcatctactaacttcaaaagagaaacaaaacccattgactaacccttcctaaaggagcaggccatttatattaatacgtaagaggaggcaatagggtatagtggctaagaacatgggcttcagagttcaggctaatctgaattcaaattttgggatatccagctctgcaaccttggataaggatttcatttaagcctttatttccctgtctgtaaaggaatgatgttacccgcctcatggcataacagtgaggatttaaaatgggctgtattagacatccagcatggtgtcttgcccatggcaagccctcagaaggtaggggagacgctgttaacttgaaagtcaagtaagagcaacagactcagtcctgaatccaccccagctctgccacttgtgtgatcttaggcacaggtcacttagtttttctctgagcctcaatgactgcatgtataaagtggtgatcatgacttcaaccttaaagttaaaagaaaaaagtgtccccagaattcctagaacataaagatgctaggttaatgctggctaaataaacggaattgcctggtgctttactcgtatatcagagtcagtggccacaaagcatttatggagaacccagttgcttgggttctcggcaaggtgccacatttaaggagtttcatgggtacaggactataaaattagtcttaattgaaaaaataggcccagggcatggtggcttgtgcctgtaatcccagcagtttgggtggccaaggcagacggatcacttgagctcacgagttcgagaccagcctgggcaacatggtgaaaccctgtctctacaaaaattacgaaaattagccgggcatgatggtgcgtgcctgtagtccctagctactcaggaggttgaggtgggaggatggcttgagcctgggaggcagaagttacagtgagctgagatcatgccactgcactagaccttgtctcaaaataataataataatgatttataatctagaagtagcactggttgtagaatatacagagagcagaggtagatgtgccaccacaaaacaaaaagcatcctctgttggctaagggctggtgggtggggcactagaacaagccttatagttggagagcgcccccaacacctttgtatttgtcagtcactcccccagagagcaaattgtctttttcatttgtcagcatttagagcagtggctctcacccaggagctatttaacctcccaagggacatttgacaatgtctggagacattttcaatctttgcagttgggaggagggaatgcaactggcaactagtgagtggaggccagtaatgttgctatacatcccacaatgcacaggacaactccccccaacgaatgattatctggtccaaaatattaatagaattaacagaagttgagaaagcctgttttagacaaatacctttgcagcacagaaagaaaaaacatcaatggtttttgttttgccccccccttttttttttctgaggcttttttgaggcagggtcttactctgcttcccaggctggagtgcagtgggctcaggtggtcctcccaccctagtctcccaagtagctgggaggctacttggccaggcgcacgtcaccatggccggctaatttttgtattttttatagagatgtttcgccaacctgggtttcgccatgtttaacaggctggtcttgaactcctgggctcaagcaattggcctgccttggccttccaaagtgctgggattacaggcatgaaccaccacgcctagcctaaaccaatgcttttaatatgaatatgactaacacttaaaatctgaaaaatctcacttcgtgaatcatgggcatatattttaaacagctttattgcggtataatttatagatcataaaacttgcccactgtaactatgctgcttttgagttaatgtatgcagttgtgcatccatcaccacaacccagtgttatgacttcttccatccccgaaagtttcctcttgccgtgagtacctttttttttttttttttttgagacggagcctcactctgtcacccaggctggagtggagtgcagtggtgtgatctcagtttactgcagcctccacctcccgggttcaagcaatttgcctgcctcagcctcctgagtagctgggattacaggcaagtgccaccatgccctgttaaatttttttgtatttttagtagagacggggtttcaccatgttggccaggctggtctcaaactcctgacctcaagtgatctgtctgcctgcgcctcctgaagtgctgggattacaggcatgagccaccacacaaggcccatgaatacctttttaaagtgatattttgtatcaaattggttgttggtttgcaaacagaaactaaattagaaatatctttttggcaaggcttcagataggcaatattgtcacagcaaagtacaaagcatggagggaggtggataagatgttgttttaaaagatcagtctttagccacataagtttattgcatacaattgtatcctgtggtgacttctctaaaatgcggtaagtgtcataaagccaagcatacaaaggaaaaaatgtttcatttggcaggcacaatacaaaaagcctgagagaaagatgtccaaatttaattctgtatcctcagaaattttcagggaagatggaaattcaagcctgcaaagccttcagattgcaatttgtagttttatataactgagaaagtgttttacagggcaaaacagcaaaatctgctgaggactgttttgttttaggaagtgtgtgcttggaaatagcgatttgtgatatagcgctgtttaaggtttttgttttgttttgtttttaaaaatcatctggcagatttaaacccagttgcctcggtgttagccagatttaattctgcggttgttaagtaaatccatagggtctgatccatcatggtgactatggagggtgaaatataaactttcctgtaagatgcctgggagcagtcagcacatctgcttctcagatgaatactccgtgtagtgccaataaaattaggattttcaaggctcagtggcttctgatttagttagtctgtcgttaagagaaaagtggctatttaggaaaaattgtcaacagtttcctactcttgcatgctgcttttctgctgtggtcatctgattcaaacggggaattagaacaggcacattggctactcacacatggggagagaaggaggggaatccttgcttctttccctctatgctgggtgcctttgggcagcgccccccttttcttttttttgagacggagtcttgctctgtcgccaggctggagtgcagtggcgtgcactgcaacctccacctcccaggttgaagtgattctcctgcctcagccttccgagtagttgagactacaggcccccgccaccacgcccggctaatttttgtatttttagtagagacggggtttcaccatgttgcccaagatggtctcgatttcttgacctcgtgatccgcccaccttggcctctcaaagtgccgggattacaggtgtgagccaccgcgcctggccgggcatcgccttaactgcctagtttcagtttcctccttggtgaagtaggagtccaggtgccacctcattgacttattgtgaagattaaatacttcaggatatatgaaagttcttggaacctaggcattccacaaatgtctatttaattttatttgtaaaaaacgttccattggtattagcagtttgtgtgtttgccaaagtgttatgtctcacgacatttgattcttctacccggggaaagtggaaggtaagggagttcattttactagcagggaactgagactcaaagaggttaagtgacttcttcaagctacagtggttactcatgaaagcgtctgcccaagtagatcctctttcctatgcaccattttgcctcctcttccaaaactttcgcatggggtagagggggtcgcttttcttccaaatggtttcttgagaggattacatttgttttaggcattctgctgtcgtttgaaatttattgtactccaattgagaggtatgttcaaaggattttctagtccattgaacctgtgcaggccataaagtaaacaaaataagcattctttattactggcccaggacagacatatacatgctcttgattgttttaaagttgacaatcaagactggtcactgtgctggcccaatagaattctctgttgaagaaagatgaaagagacacctactcaggctatagaaggtgccaaatgtgtcagaaagttaagaaattgactgtcttgaaagtttagaagtccagctgggcaccgtggctcccccttgtaatcccagcattttgggaggctgaggcaggcggatcgcttgagctcaggagttcgagaccagcctgggcaacacggtgagacccggtctctactaaaaatacaaatattagcagggcgtggtggcttgcacctatagtcccagctactcagaaggctgaggtgggacgactgcttgagcccaggaggcagagattgcagtgagctgagatcataccactgcactctagcctgggcaatggagtgagaccctgtctcaaaaaaaaaaaaaaaagatttagaagtcccccaaccagtttatataagacggttcacacaacagtatctcaacatgataaaaaggagtcattaaaaaaaacttttagttgcattacacataaagggctcaaatcatgtttatagcgcaattaatttttacatgtgtatacatctatgcaactgccacctagataaagctgtaggacattttcagcatctcagagggttctcttgtgcctcctccccactcctggtaatccttattctgacttctattaccagagattagttttgtctgttcttaaactttacataaattgagtcatatggtatgaattatttgtgtctgggttctttcactcaacattatgtctgtcagatgcatctatattattgcatatagcagtagtttgtaaagacacatgtttttaaattaaaaaattaaaacattgccagcaattttcaggaggaagtcattggatgtggacaacctcatgggatgaatcttttttttttttttttgagacggagtctcgctctgtcacccagactggagtgcagtggcatgatctcggctcactgcaggatctgcctcctggggtcatgccattctatgggatgaatctttaactaagcttttgaaagaaaggatgggaatttgatagtcatatttggaagaacccaggagggcaggaatgtggataagaaatcaaggaggtggccgggtatggtggctcatgcctataatcccagcactttgagaggccgaggtgggcagatcgcttgaggccaagaaatcaagaccagcctggccaacatgacaaaaccttgtttctactaaaatacaaaaattagctgggcatggtggcacacacctgtagtcccagcttcttgggaggctgaggcatgaggatggcttgaacccaggaggcagaggttgcagtgagccaagatcacaccactgtactgtagcctgggtgacagagcaatactctgtctcaaaaaaaaaaaaaaacccaaacaaaaaaaacaaatcaaggaggggtacttggccaagtagatgtagataaggaatatgaaaggaagagaggtagaatgataaggaggtgggtgcatgtgggctgatgatgtcactgctggtagtatgtctagcctgcatagctccttctcccctggagtccgtattggtgagtccttactggtaaatattcatgtgaaatcctgttgccacttgtccctggttctggaagatgactagagttgctatacgttgtagtcggtgagccatgcagaaccatacatgttgagagtgatggcagctttcctaaaaggctggcagagcccagtacataaagctccagtgggcaatgccacctttcttatgtgggcctagttgatagagatgttggaaagagaacattcagtcctgtgttctctagaactacttgctgaggccattaaatgccaccctctccccaggaatgacagtgagaagcaaagattactctacagctccacaaagatttttcataacaactgtccctgaaaagtagtattgaatatatgatgagctcgttatttaatggctgattcatttgaaccatccacttataaattagtcttttccgtaattggtatatttaacaaaatgggaatttacttaaagattgtgtgtttgcacacatggggtgttatatctattgccatttatttattcatttaacattaaattccatgggctgctttggaagatttctgctcaggtacctcctgttcaaacttcttaagataatttatcacctagttataattgaaatggaatcaagtcttttataattttgaatcacattcatctctagcatctaattgtgcatgtggttacctgctgctttgcacacttttctctgccatgtatctctgtatcttgttctcaaagcctcattccagtctgttcttaaatgccagcttctcagagaagccttcctgactctccggtctaaagtagcagcaccccatctatcactctataatcttatcttgttttgttttcctttactgcacttcttaatatttggaaattatgttttaaaaaatgatttcctatctgttttccttatgacaatagaagctccatgaagcggagatttgggttcatggagcccataaggcctcagcccataggagaaacagacaagttgtactggggattaaattccattaaattttccattaaattcatatctcgggtggatcataccttgcacatagtaggcacttgataaatatttgttgaataaattggtaatttgatattcacaggctttgtgagattggtggaaaggaaactgtattgtaaagatggccaggcatggtggctcatgcctgtaatcccagcactttaggaggctgagttggtgatccagcctaggctacggagagagaccccatctcttaaaaaaaagaaaaaaaaaaaagagagaaaaagaggccgggcacggtggctcatgcctgtaatcccagcactttaggaggctgaggtggtcacatcacctgaggtcgggagtttgagaccaggctggccaacatggtgaaaccccatgtctactaaaaaaacaaaaagacgaaaattagccaggtgtggtggcaggtgcctgtaatcccagctattcgggaggctgaggcaggagaatcacttgaacccaggaggcggaggttgcggtgagctgagattgcgccactgcactccagcctgggcgacaagagctagactccgtcttcaaaaaagaaagatgaggaaactaaggtgcagggaggtttagtagctagctttgtggtctgcagcagggcagcctccagctggagctggaacaacacttactcatagttaagtgtgtttccccttggttcatggcagacttgatgacaagcaacagttatcttatggcctgaacgtctcctacaaatcaagcaaagaggaatcacctatattttaatcctctccaaccactgtttcctcttctgcaagttacaattaaattcttaaggccaggaatgtggctcacgcctgtaatcccaggtgtgggatcctacttttgggtggccaaggtgggcagattgcttgagctcaagggtttgagaccagcctgggcaacataatgagaccccatctctataaaaatacaaaaattagctgggcatggtggcacatgtctgtagtcctagctactcaggaggctgaagcaggaggatcacttgagtccaggaggtcgaggctgtggtgagccgtgagtgtgctgctgcactgtagtttgggtgacagagtgagaccctgtctcaaaaaacaagacaaaacaaaaaaactcaggaaggtatatgagtgttatgagatcagtgagttaaaagctacaaagtgagacaaagttttagcatatattctagaagtctgtattatattagtaaacttaaaaatcaattgtatatgaaggcattctttaaactactatttatattttttgttactttgtggcccactttaaagtctacaatagactttctttaattgttcctttaccatttaggcttattttttatttatttttattttattttatttttttgagatggagtctcactctgtagcccaggctggagtgcagtggcatgatctcagctcaccgcgacttccatctccaggttcaagtgattctcctgcctcagtctcccaagtagctgagattacaggcatgtaccaccacaccgagctaatttttgtatttttagtagagatggggtctcgccatgttggcaaggctggtctcaaactcctgacctcaagtgatccatcctcctcggcctcccaaagtgctgggattacaggcatgagccattgtgtccggctttagacttatttttttttgtttttgttttttgtttttttgttttttttttgagacggtgtctcgctctgtcacctaggctgcagtgcagtggcgcgatcttggctcactgcaatctccgcctcctgggttcaagcaattctctgcctcagcctcctgagtagctgggattacaggggtctgccaccatacgcagctaatttttgtatctttagtagagacggggttttaccatcttggccaggctggtcttgaattcctgacctcgtgatccaccctcatcggccttccaaagtgctgggattgattacagatgtgaaggagatggatgcatttattttggaaaaaagtgtgaataatgtctctaatggtccacttggaacaatacatcacctaatatcaggaggaggtttagggtaatcttgtcagtaacctcagggcaagttgtatggggttgcttccattaaattccatgccatcctaatcagtccccatgcgttgtgtactcttggcttgtgcagctttttgcgaggtttgtgtggtatgcaggaggttccagaagtacaaggatgagacctgagtaatatcatagtgattgatggtggcagtgccaatttgcatcagctctgacaagctggtgttgaaactagatggcagaatgccaaagatgccaaggtcagcatactttgaaataatgaagtgagtcatgtaacccaggattggcacatactcacaggactacctgactcatcccacctcgaaaggaacacatctgtgagcaccggttaggggcctgtggccacttctctgctacatgtgcaaaaggaagcaaaagccacaaggagcccttttcttgttgaggagacagatattaagtgaaagaaaaattaaaatgaataatcaagcatgaagtcaatgcagagagaaaccattgtgagccagggggaggtgaaagggtgggagagagacccagcccagatagagggaacagagtaaaaccaagcagagaagcaaaactgttgtgagccagacgtgagagtagtttagaacatggacctgggcaccagactgcctgggtttgaaccctgatgtgtgactatggggaggttacttatgctttacaagcctcagatttcgcagctgtaatgtggagacagtgatatatgtcaactttttccgtttactcaacaaattgttatttaatgtgccaggtgttgatttagatgctggtgatacagtgacagatgggtccttattcttgcagagcttgctttctggtagcagaagcagacaataagccagaaaataacagaaagtggtaagtgcctcgcagagaatgaaaacagagaattaaatgagaatgcctggggaattcctctagatacatgcccaggaaatccttctgcagaagggacacggaccgaggcctgcatgataagaagtgaggaagagggtgccgtgcaaagactctggggccagaagtggcttgtcgtgtgtgaggcctgtcaggagacctgtgtggctagatggaggtgggtggggtggggggtatgagtgtaggagattaggtggaagggataaatgggggccagattgccaacatataatttttacacagtgatgtcaagatctttagttctgatacgtttcaacaaatacgtatcaagacagaacttttccatccccctagaaaatttctgcctgctccttgccattcaagtctctctcccttggaagcaagcactgatctgatttgtgtcactttaagttaatttagctatttttcatataaatgttaccacatagtacatactgttctttcactcagtatatttttgagattaatccgtggtgttggatgcattggtagttaatttctatttattgctgaggagtattctgctgtatggacgtactagtttgtttatctgttgacttgttatggacatctgggctgtttccagtgaattcaaattagatttccggtttgaagtgacccctctggctgctctgagaagaataaagtatatgagagaaacagtagataaagagggccagttggaagttattatagtctaggtatgagtagatggtgtcttgggctagggtagcaggaatggaggggtgagaattagtttgggctatattgtaagggtagaggcaacaggacttaatttgttacaagggaggtggtgatgaaaagacagaaatgaaggataatgtccaggtttttggcctgagcaactgaatggatggtagttccatttaccaagatagagaataccataggagaagcaggtttgggtaagaataaagagttctttgttggaggtgatacattagatatgtctgttaatagacaaatgctattttgaggataaaatgaaataatgtatttagtaacttggtatagaatctgggacattctgaatgcctcatagatgtcagttactgttacaattaaaacaatgctaaataataattattgtttttaataaagaggctaaccaacttggaggaaaagagaaatatggtcaaagagaaactgggacatagggtctgctaggttaggaagaaatgagttgatagaaggtcttgaatttcaggtagaaaattttggactgaatccatttgataatagtgtccttgccttttaagaaggaggaggcacaaggtattttagaatgccacagaggagttctaggttttgatgttggcttcttgttctttgccagctgagtgaactcaggcaagccacaccccttctctaagcattgaattacttgtcctacagggttgttgggaggggaacataacatgatttggactgcaattgccttggaaagtagtaaacacaaatgcttgacgttcttaagtggcattttagagtacagtgatgtgagctggtattaggaggaaggttgggagtgggaatgtattggaagaggggaggaagtatttcttctagttggctgataagggcctgaactggggccctggcaatgagaatggagaaggtatagatctgacagagtttgaaagaagaatcaggtggcctggatgagggcattgagtgcagattaaccttaggagctgggagaaggacagtgccaacaaagggaatagggtagttgaaaagggagtattgggatggagggcaagcctttttgtaaaactgactgggcagaaatgctggatgtaagcagttagaaatgagggctggaagttctgctttacaggttgggctggttatgtggatgtgagagtcatcatctcagataatgactgataccatgagaacgtgagctgtccaaggaaacaacgtataaggcactacttattttgctcatcctggttgatttggtgccaaaacaacaggcggaagggtgaaaaattctattagtcagctggttgtctgaactgctcaatgttagccaagcagtttgacagatctttccactgtgtcgaagtctgagctgactgctctggcattttgacagataatttctgataaattctgtgtgtgtgtattaaatggaaagaaattgtcttggatttagcattccagggtactagtttctaggccccagtgtcacccaggacctcctgaggccttttcaggggtaatgcatgcttaggtttgctcctggagaggtcactcggatgtaatgaagggtctggccaacccctaggctatttggtaacaactggagccattccagcatcttcagagagcctgccaagggggttccagacctttcagtcagcgggacctaattataatatttagcaaagggagggcagtttcttattcaactccagcataaacacaaggatttcttccagacagggatgtcatgaagattttctgttgatttgattttggagtaaccatggagagcatagatgagaagaatttgaatgaggtgtttatttatacctgggttgttttgtcttgggtcatttcctcatgatatgctttccactctctttctgtagccttgaccactctttaatatttgtttttttgattccttgtggcttcacagaccaaaatggcactcataaattaaggtattcagccaggtgcggtggctcacgcctgtaatctcagcactttgggaggccacggcaggcagatcacctgaggtcaggagttcaagaccagcctggccaacatggtgaaaccccgtctctattaaaaatacaaaaattagctgggtgtgttggtgggcaataatctcagctactcgggaggctgaggcaggagaattgcttgaacctgggaggcggacattgcagtgagccgagattgcgccactgcaccgtagcctgggcaacgagcgagactctgtctcaaaaaaaaaaaaaaaaaaaaaaggttttcagagatgcttctgatagtgaattacctcactagttatcttttctctcttacaattctatttctatctcaatcccaggcagttttgttctcctgagggaaccctgatccccaccctgtatactttcctcttttcacttgtgtcagatttttaaagttcccatagtttaaaaatcccagcttgaagtcatagcattatggtatcttctgctggccttccatgtacaactgtgtgaactggaaggattgtcacacagtggaggaagaaaaagggcttgtgtcccagggaaggattactgaaccatttaatctgtatatgaaaagctaaagttaattcagggagaagagaaaggtgttgctgaagtcaaaccatctttatctcttcaaatcttggctactcaaagagtggtcttcacccaggaacttttagaaatgtagaatctcaggttccacccgacacccactgaatcttaatcttcattttgatgagatctccaggtgattcctgagtagattggagtttgagaagcactactcctaattacatcagcataattcaaactgctcatttccaaagagaaaacttctggcaatcccagctgcttacagtggactccaggtgttgttttttaaaaatattattaaaatatcttgctgggcatgtggctcacacctgtaatcccagcactttgggaggctgaggtgggcagatcacttgaggtcgggagttcgagaccagcctggccaacatggtgaaaccccgtctctactaaaaatacaaaaattagccaggcgtggtggcatgcgtctagtagtcccagctactcgggaggctgaggcaggagaatcgcttgaacctgggaggcggaggttgcagtgagctgagatcatcatgccactgtactccagcctgggcgacagagactctgtctcaaaaaaaaaaaaaaaaaaaaaaaggccaggcgtggtgcctcacgcttgtaatcccagcactttgggaggccgaggcaggtggatcacgaggtcaggagatcgagaccacggtgaaaccccacctctactacaaatacaaaaaattagccaggtgtggtggcgggcgcctgtagtcccagctacttgggaggctgaggcaggagaatggcgtgaacctgggaggtggagcttgcggtgagccgagatcgtaccactgcattccagcctgggcgactgagcgagactccatctcaaaacaaaaacaaaaacaaaaaaaactttactgagttatgatttaggtaccataatattctctagttttaagtgtacaattcaatgatttttaagaaattgacaagttgtacaatcatcaccacaatctaccttttagaagatttccatcacctccaaaggatccttgggtccatttacagttaaccctgttcctaccccccaccccagatgaccactaatctttctgtctctataaatttgccttttctggatggtcatgtaaatggaagtatacagtatgtggccttttatgatgggcttcttatgccgagtgtaatgtgtttgagatacatccatgttgtagcatatgtcagcacttctttatctttcattgcaagtaataatccgttatatgactagaacacattttgcttatgcgttaactagttgatgggcatttagattatttctgccttttggctatcatgaataatgttgctgaggcatctgcatgcaagtcttagtatggatatatttctgtttctcttgggtagatacttagtggatttgctgggtcatgtggtaaatttatgtttaactttttgaaaaaattgttgtttcttaaaaaactgtgggctgggcatggtggctcacgcctgtagtcccagtactttgggaggccaaggcgggcggatcacctgaggtcgggagtctgagaccaacctgaccaacagggagaaaccctgtctctactaaaaatacaaaattagctgggcatggtggtgcatgcctgtaatcccagctactggggaggctgaggcaggagaatctcttaaacccaggaggcggaggttgcagtgagctgagatcacgccattgcactccagcctgggcaacaagagagaaactctgtctaaaaacaaacaaacaaacacacaaacaacaaactgtggtaatgctgggcatggtagctcatggcctgtaatcttagtactttgggaggctgaggtgggaagatcccttgagtccaggagtttgagaccagcgtgagtaacatagtaagaccctgtctctaccaaaaaataaaaataaaaaataaaataaaataaattatccaggtgtagaggtacatgcctgtggtcctgtctactcaggaggctgaagttggaggattgcttgaacccaggaggttgaggttgtaataaaccatgatcatgccactgcactcctgggcaacagagtgagaccctgtctcaaaacaacaacaacaacaacaacaacaaaactgtggtaaaatatagatgatctaaagtttaccatctgaactatttttaagtgtctagttcattggtattaagaaattcacattattgtgcaatcatcaccaccattcatccacagaacacttttcagcttgcaaaactgaaactctgtgttcattaaacagtaactccctcttccttcctccaacccctcggcaaccaccattcctatctctatgaatttggctaccatagacaccttatctaagtggaatcatacagtatttgtcattttgtgactattttacttagcataacattctcaagtttcattcaggttgtggcatgtgtcagagttgcctttctttttaaggttatataatagccctttgaatgtatatactacgttttacttatttattcatctcttaagggatgctggggttgcttggaccttcttgctgttgtgcttaataatgatactaggacatgggtgtccaaatatttctttgacttcctactttcaattcttttgggtatatacccagaagtggaattgctgcgtcatatagtaattccatttctaatattttgaggaactgtcatactgttttccatagcagccataccattttacgtcttcagcaggaatattcaaggtttccagtttctctacatcctctccaacactgttttctgtttcttttgtagtagccatgctaatgggagtgaggtggtatttcattgtagttttaatttgtattttcatacgtatatatgaaaaaataatatatatgaaaaaatatattatacataaaaatatataatttataatacataaaatatattatatattatatattatacataaagtatataatatataatatacataaaatatatataatatacataaaatatataatatatttgtataaaatatgtattatatattatatataaaatatgtattatatatcatatataaaacataatatatattatatataaaacataatatatattatatataaaacatataatatataaaacatataatatatattatatataaaacataatatatattatatataaaacatataatatatattatatataaaacatataatatatattatatataaaacatataatatatattatataaaacatatatatataaaatatataatatataaaaatatataatatataatatatataatatataatatataaaatatatatattttatataaaatatattatatataaaaatatatataaaatatataatatataaaatatgatatataatatataatatataaaatataatatataatatataaaatataatatatataaaatatttattatgtataaaatataatatataatatattttatatataatttataatatattatatataacataataaattatatattatatattatatattattatatataatatataatatatagaaattatatatattttattttatatatatatatattagaggtagttttgctctgtcacccaggctggagtgcagtggcatgatctcggctcattgtaacgtctgcctcctgggttcaagcgattctcttgcctcagcttcccgagtagctgggattacaggcatgcgccgccacgcccagccaatttttgtgtttttagtagagacggggtttcgccttgtttgccagactggtcttgcattcctgagctcaggtgatccacctgcctcagcctctcaaagtattgggattacaggcgtgagtcaccgtgcctggcccattttcataattattaatgatgttgagcatcttttcatgtgtttattgaccatttgtatattttctttggagaagtgtctgctcaagtcctttgcccattgtaaaatttcgttgttgttgttgttgttgagttgtaggcattctttatatattttggatattaacctgttatcaaatatatggtttgcaaatattttctcccattctctgggttgccttttcactctgttgtgtatgtcttttggtgcacagaaatttaaagtttttcctaattccagtttatctgtttttcttttgttgcctgtgtttttgttatttatttttagacagtatcttgctctgtttcccaggctggagtacagtggcacagtcatggcccattgctgcctcgaattcctaggctcaagggatctgcctgcctcagccttctgagtggctgtgactgcaggcgtgcaccactatgtccagctaatttttaaaatttttgtagagatggagtcttgtttgttgctcaggctggtcttgaactcctgaccttcccagcgtgctgggattatacacctgagccaccacacctggccgcctgtgcttttggtattatatccaagacaccattgcctgatctagtatcatgaagattttttctgtattttcttttaagagattctttctttctttctttttttttcttttgagatggggtctcgccctgttgctcaggctggagtgcagtggtgcgatctcacctcacagcaacttctgagtaggcctcttttttttttttttttttttttttttttttgagatggttgctctgttgcccaggctggaatgtagtggcacaatctcagctcactgcaacctctgcctcccaggttcaagcaattctcctgcctcagcctcccaagtagctgggattacagacgtgagccaccatgcccggttaatttttgtatttttagtagtgacagggtttcaccatgttggccaggctggtcttgaactcctgacctcgtgatccaactgcttcggcctccccaagtgctgggattacagacgtgagccaccacgcccggccgagattcacaattttatgttgaagtctttcatctattttgagttcatttgtgtgtgtgttattagctaagggtccagcttcattcttgtgcacacagatacctagtttttccagcaccatttattgaaaagactgtcctttctctattgaatggtcttggcacacttgtcaaaatcatttgaccattatctgtgagggtttatttctgggctatctattctgttccattagtatataagaagctagcaaactgttttccaaggtggttgtaccttgttacatcccacaaacactgtatgaggattccaatttttcacatgcctgataatttgttattgtcagctccttttgaaaaaagaacttattttgtgtttaattgacacctaataattatacatattgatgggggcatagtgtggtgttttgaaacatgtatacattgtgtaatggccaaatcagtgtaattagcatgttcatcacctcaatcacttgtcatttctttgtgatgagaacattcaaaatcctctcttgtagctattttgtaatatgcaatatattattgttaactatagtcactctgctgtgcgatagaacaccagaatttactcctcctatctatatttggttagagagatcttattgggtgagaagttacggttttgatccttgacatttaaacattatgactttgtccagcatggagcagagaggtagtgaataagagtgagtccttcctctctcacaaccacagtgccagttacctgcctggacacattttgtgcatctgcagggtagaatgagtaaccccaggcaagtctcttatcacctagagcctcagctttctcttttaataatggcaataattcatactttacttacatcgagtgagataagagtacatgtacatttttaattttgggtgctaaataaatgttggatcagttatactgaataaattttccatcaacgtgttcttgctgtgggacatccttgacactaatttaagttttccaacaaatgcgactttccaatattttaagcatgacagaattttgctagacagctggctgtctttctcctgttcctctggatgccactcaaatatcttcacacccatctcactcattaacactgcgtgaactgtgagctctccaccccttgtctgtctgtaatctgggttgtgactacttgtttatccagtttatcttctttctcatcatccatcctggtttctgcatactataacaacatcggttgcatactattgacctctaaccctggatcctgttgggatgaaaacattatcccagtcctgttgaaagtagtgcagtggccttttcttctttcttggttctgcaatgtctgcagagatgtgctcttggggggatgaagtcatctgggtagctttcccctccctgtgcccaggttgctagctgctacagtaattggcttggcagtgcactccctaaaaggttgtccttcagctggtacttcattaaagctgcaaggccaactcccttgggagttcccttagacagcagctgtcatgcctaattaaggagagacatgggaaaggtgttttgaaaggagacctcttatctcgaagaacagtggccaggcctgaacattggaatggggagatgaaggccaaagtggagggcatggtagcagcagctcagaaaacttggcagaaaatgctttgctggcagtcaaggataagagcattgactgttttttaaaggacacagtatgtcctttttagcaaatcaagtaacgagtcccatatatattaaaaattttgtacacttaggttgttaggtgtcccatggagcatgcacacatgcaagaaccaattttcatatcctgcaaaaaatactgaaacaagtaaggaaaactcaagggattctcatatatatcaatagggtataactttaaagagttaggaccacttagggatgctgagactattctatgcttaaactgttagggtccatagtgaagacctggggcttgggggtggagtccctttatagtctagtgcaccaatatccaatagtaatatggaggccgcatgtattatttaacattttctagtagtcctgtgtattagtttcttaggcctgtcataacaaataaccacaaaatatgtggcttaaaacaacaaatacagttttttttttattcacagttttggaggctagaagtctgagatcaagatgtcatctgggccacactccttttgaaggctgtagggaagaatctttccttgcctcttcctagcatctggtggtgcttggcaatccttggcattctttggcttatagtgagaccctggtctgtctcatagtgagatccagcctctgcttctatcttcacttggccttctttactgtttgtctgtgtctgtctccaaatctccttcttctttctcttaggaaaacgccagtcattggttttagggcttaggataatttcatctgcatgtccttaactgatcacatctgcaatgaacctatttccaaatatggccccattttgaggttccaggggaacatgaactttatttattattattatttgagacagtctcactctgtcacctagctggagtgcagtggtgccatctcagcttactgcaactttggcctcctgggttcaagcaattctcctgcctcagcttcccgagtagctgggattacaggcatgtgtcactatgcctggctaatttttgtgtttttattagagacagggtttcaccatgttggccaggctggtctcgaactcctgacctcatgtgtgatcctcccacctcggcatcccaaagtgctgggattacaggcatgagccaccgcacctggctgggacatgaactttagggcacacactatttaacccactgcaccgcattaaaaaaaaaaaatcagaaaagccaaaaatttaattttattaattctaatttttactttaactgaatatttcaaaatattattataatatgtaatcaatataaaataattcttaatgtgatattttaacattttttaatacgaagtctttgaaattcagggtgtattttcaaacactcataacacatctcaatttttattgccaatttttaaagactccgtattcgcttgtggctggctgccacatcttggacagcacagttggagtgctgcggggctgacaaaacttttatgcttctcagtgtttcaccccatgttgtctccctctcttcattcctcttagttttcagggaattttaatttgtttgggaagtctcagtcattatgaacaaaagaaataaaaatatactttgtactgggatcccaagactcagtggaggaagtaaaatcagccagttttgaaagaaaagatctttattcagttacatttttaagcatcagtgtttattgtatggtagaattcattaagcactctatcacaagtggtttcaacacgtgcggttaatattcaagatgtaactttttttttttattgagtaggggaaatataagaccttattattacagatctccctgccatgagatttgtgactcacccatttatgagcccccagtgaacacagccattattctctgtcatgttaagacaagaaggggcataaataaactttttttctgggctgactgaacttagtctgttgcaacaatgaagttaagatctatatctctaaaactctgtgttgtcttctccaagaatttaaagcttgttacttgttagcatgcatctcagggcaaggcagagttttataagcaagcccataggaagaaaagttttagatccttgaattctttctttatttatttttttatatttttttaaacttctgagacagggtctcactctgtcacccaggctggagtgcagtggtgcgatcttggctcactgcaacctctgcctcccaggttcaagcgattctcctgcctcagcctcccaagtagctgggattacaggtgcccaccaccacacctggctaatttttgtatttttaatagagatggggtcttgccatgttggccaggctggtctcgaactcctgacctcaggtgatctgcctgccttaacctcccaaagttctaggattacctgtgcctgtcccgtctggcttaatttcatttcttttttctttctttcttttttttttgtttttgaggcaaggtcttactctgtcacccaggctggactgcagtggcgcaatcttggctcactgcaacctctgcctcccgggttcaagcgattctgctgcctcagccatctgagtagctgggattacaggtgtgcaccaccatgccgactaatttttgtatttttagtagagatgggatttcaccatgttggccaggttggtctcgaactcctgacctcaggtgatccgcctgcctcggcctcccaaagtgctgcaattataggtgtgagccactgtgcttgaccctgtctggtttaatttcaacacgtctttacccactgcgctgtagccacattggcctttactttctgttgagcaagccaggcactctcttgcctttgcgctagctgtgtttcccttatactagatacctaatgaccaactcccacctttcttcaagtctttgctctaaggtcatctcaaaaagtcctagttaaaattataccttttatcccaccctctgctaagttccctgtactcatccttttttctttctttccatagcaccatcacattctccagtatattctataatttactcatttgtgttaatcttgttttccccatccccggctacccctaatgtaatctccaggagagcagaatctttgtttcatagtcaatagtacctggcatgtagtaggcctcaataaatattgttgaaagaatgagtcagtgtgcataactgcttggcttgaaatgctgttctccaaactcaaggtgtttttggttattactgttttttccttctaggtttggcctgccatatttaattgctttgttggggccatttagtcatttttctttctctaacttaaggtcctttgggaaagggctgtggatcagaccaactattcagaaaagctggaggcttagggagttcctggaagtagctatgcggcaactaagagaggttggcccacaataagggtggtttcctctgactctacaaaatcttagtgatacttttgtaggggaagaaagctgttttccctttaccattttaggtgcattggttggggccctgtcagtcagactaacagaatacattaacaagagaaaaacaaaaacaagtttattgacatattcattgcgtatgaacatgagagcacccagtgaagagtaactcaaggaggtagttagaacttgggcttataggctatctcagcaaagactagtaaatttttagagaagtgagaagacaaaggaaaaggaccttgagctgctagggacagcagattgtgggaaggcaagtatgtggggaaaccaatggtagatcagggctggttttagcaaggtttgttatgtagattcccctggtaccctatctgggctgataaaggtcaagagttgtctccaagatcaacttctgtccttcttgttagagagggaagtggggatacctttaagaatttatgtcctgcttctggggatataggggagggcagagagcttttctttttcttttcttttcttttcttttttttttttttgagacagagtctcactctgtcgctcaggctggagtgcaatggcgcaatctcagctcacggcaacctctgccgcccgggttcaagtgattctcctgcctcagcctcctgagtagttgggattacaggtggctgccaccatacccggctaatttttgtatttttagtagagacggggtttcaccattcaagactggccaggatggtcttgaactcctgacctcatgatccacccgccttggcctcccaaagtgctggaataacaggtgtgagccactgcgcccggccaagcttttcttgtatctgcattttaataacccttaggccaaagttgtatatttcggtttgccatattctcctattcactgtcttcattgtaaattctcatgacaatttccttcaagaacatggcctctgagatctttgcaacctctgaagaggtggatggttcattacagagaatttcaaggccaggttcagcctggcaacagagaactctgggggtaagagttgggccttcctgatgcctagacaaaagacggtcacttgagctactcactgggggatgtagctatggggatgctgatgtaggtgcttctcctggccctgccttctccatcctcattaatacaaaatgggaaaagcagtcaggttaggtattccagattcacatggcccactgaaaaggactcattcaaaggcagatttttcttctaccatgacccttcttaccttgccaatcgtttattctcttttctttctttctttcttttttttttttttgagatggagtctcgctctgtacccaggctggagtgcagttgtgcaatctcggctcactgcaagcttcgcctcccaggttcacgccattctcctgcctcagcctcctgagtagctgggactacaggcgcctgccaccacgcccggctaattttttgtatttttagtagagatggggtttcaccatgttagccagggtaatctcgatctcctgacctcgtgatccgcccacctcggcctcccaaagtgctgggattacaggcgtgacccaccgtgcccggcctctcttttcttatactgttacacatatatacacacttcagaaatgatctctgtcctggagaattttatgtatgaggtcaaagcagcagccactctgacaattttcttcaaattagacttatgctgctggtcacggtggcgcacgcctgtaatacctgcactttgggaggccaaggtgggcggatcacctgaggtcaggaggtcgagaccagccttggcaacatggtgaaaccctgcctccactaaaaatacaaaaattagctgggtgtggtggtgcatgccagtaaccccagctactcaggaggctgaggcacaagaatcacttgaacctgagaggtggaggatgcagtgagacaagatcttgccactgcactccagcctgggcaacacagagagactctgtatataaaaaaaaaaaaaccaaaaagtttggataactgtattacaaaagtaaaaataagtcaatattaataatatcttttctttaacccatatatccaaaataatacatttaaacatataatttcaatatgtaatataaacattgttaatgatgtattttatattttgcgctagtcttctaaatctgtatattttgcaactacagtgcactttgatttgaactagctggatttctagtgctcaatagccacatgtggccagaggctaccgtactggatagtatatgtagatggctctaccctagagtgacttcatctgtgttacatgttattctaacaatgtatcttctggtttcccagccacagctgacttgaagcagtaaataaatggtgagagtgacagagtgctaagaatagtagagaaggggcagaagaattatttttataagtggctgaggtcattcattgcaagcacaaatgaaaggtatgaacctttcatacgttgagacctgctgaagcatacagtgtggtacctggtagaataattgataatttttcatgcttgccttccatttcataggtcagatcacttaaagaaggctacatcatgttcactcttggctacaaacatagggaagtgtgaagagtatgtggacaaagttaaggaagctttctatcaagtgttgctaaaataatggtgttctagtacaggaaacctgggaaatgtacgtgtaagtagaaacccaggactacatgatgaagccctcttcatttctaaagctgggagctcacagaagtcttggaggagcctgcaagtgtgccttcagctgggtgtgccccgtctcatcttcctaagattgctaacttcttcggttctatgggtttcccttctggtccatggggcagagatgcagctggtgccttggaacctgcaaggctcaaccttagcctagaccttagctgtgtttgtgggacatcaggagtctggcttgtggatttggaatgtccatcttttgagatggactttcttggaactcaccacttcatggacacccactgggggcaatggtagcaaagtgtgtgggtcagctgcgtgagctgtagcatgcagattccagccagcagacaacaaaagaaaacaaaaagcaaagcactcaaatcaaataccacctttgggttttctgtttttctcttgtgtatatggcagacgacaaagtcaggggtgaggggatagctgtcatataattagtgtacattgttctcatgtaaaaccatcagtccacggctgcctgttaaataattttgtctctttctttattccatttttaggccgaggagtcttgtaaatgtaatggctggaaaaaccctaacccctcacccactccccccagagccgacctgcagcaaataattgtcagtctaacagaatcctgtcggagttgtagccatgccctaggtgagttcctaaatcttcaaggaaagtataacgagttcattgtagcgtgagactcttaacttactgaattctgtgggttcaccaaatttgaatgctgtgtacctctgtatgagagcaacaacaagagcctctctagtctcacgagtttgctgggaagggcttctcgtgagagacaaatgctgcactgtgtgcagtgactttgtcccttcttcctttcaagagctgagttggactgggggattgccaaataagatgaaacatgacaatcgagctagttagcatgaataatgtgtaacatgtcctgattcattttgggg

SEQ ID NO: 642 - DNA, 32744 bp, Homo sapiens
  source 1..32744: mol_type = other DNA
ctgacaattaaaactcatcaattttattttcaacatactttaacatggattctatcccttgggctgagctccagatcttcctcagcacctcacactctctctcattggcctgttccaactccaacttaatattacagcgaacgagggccttacattcttccagtacaattgcattgtatgaggcaagctccttaatttgaatcataacctcttgggtgaaagttccagtcaaaaatacctgagagaccaggcctttggcgcatgcctcccgtgctgtcagctttcgcccagcaattaacatttcattggcagatgctttacccatcattttggggaatgtaatagaagaacagccatctggactctgtccaaaggtcgtataaggggtttggaaccaagccttttcattagcccacacgagatcacaaagaggcaggatggatgcacctagtccaatggcagggccattgactgatacaacaataggctttttaaattgaataaaagtattcacaaagttcttgatggtgtccaccatttcaaggcttgctgtgtttctgtcattccttaagtgcctcacaaagtacccaaaatcaagaccgcagcaaaagacacttccagctgcactgaacagcacgagcttgctgtcatctgcagcagcgctattcagagcattaaccatttctttaattacttctgtattcagtgcatttttttctgtcgatctagttgatagcactatctgggtgaatccatcctctttcttcactacaatgtctctgtatgtgatggcactttctgttagccttatggtgaagtgcatcttcttgataaaaggctggcctctgctgtcatcagtaatatttctttgcccacctttcactcttggaactgaggtatgcatgtctgttgtcccattggctgctaatgggtctattaataccactataccctttcgggtagctgaacctgtggccatagaagcagtaactgagccagacatctgcgacattagtgggtgcatctgagtcttgttctgtattccagtctgttctgcaccaggatgtgacaaagggtcccggaggagtttcccttctgtcaccttgaagaccaccgtgtcctgctgatctgctgcaatagggtccagtttctcaagtttctgaaagccactcacagttttcttgtggtcaaaggggctgtcaggtgcaagggtctcaatagttgaatttattatctccatattctttgtgtcggagagagttgaagctgcctttctcctaacgttcttgctggcagcaaataacttgcagtttttggacctgtggtgtttatcagtcactggagttttaggagagttcttagaatagtttgcttttgtagatctggaagttcttcttctggcattgtttgaaaaaattctactggttgtagtccatgtcagttttttctgtttttcagtctgtcgtctattaaaatcatgtacacatttttcacagttcatgaggtgctgctctggttcccaagtgtcatcctgtttgtcataacctttccaccgaaccaaatactgtgtattcccatttttatcctgtcttttgtcaacaatagcttcaacctcaaactcctgggaagccatgaggaaagacacgggattggaacagttgctgtgccacctttgtttcagttgcgtctccacatagacacttctttctgcctccagctcttcaccaggttctgtgtatggatgaacctcttctatttggtcaccactggtgtagtgaaaattgtgcgaaatagcagctatgccatgtgcctgaacctctccacacttactgcctggtgggacagcttgggctttgtctcatggtgcatgacagcttgctcagtagcctcaggtgagagtagctaaatccacagccccaaccctctggtgtagtacagaaagctttcttcctgcctgttactcttttgtgtttctttgtttaattgtggttgctatgacgattatatggaacattctaatgttataacatttttaaagttacactagcttaccttcagtaacatacaaagcctttactcctgtataatgtacctccattatttcacttactgagttctcaaaattatacctttattgattttatgtcaaaaacacaaattagtggtagtttttttattaaatatatttgtgttttaagttgtgtggagaacaaattgtggaggtgcacattgttaattgttcgttttgttttgttttgttttgttctgttttgttttgttttgagatggagtctcgccctgtcaacgaggctggagtgcagtggtgcgatcttggctcactacaagctccgcctcccggattcacgccattctcctgtctcagcctcccgagtagctgagactacaggcacctgccacctggcccggcgaatttttttttgtatttttagtagagacggggtttcaccgtgttagccaggagtgtctcgatctcctgacctcgtgatccacgcacctcagcctcccaaaatgctgggattacaggcgtgagccactgcgcccggccaaattttttatcttacatatttgttcatgtatttatctttaccttaatctttgcttgttcatactgcttttgagtgtctgtccattctaccctgaagtactccataagacatttcttaaagggtagtctacttgtaaaaggtgccagtttgtatatgggaatgtcataatttgtccctcacctttgatggacagtttggtggatcataatgtttaggcttgacagttttttctgacatcacttgcaatatattaggctactgctttccatcgttttagttttcagataagaaatctactgcttttcagtggttattcagataagcgatccactggttatttttagggtcccttttacatgactagctacttcccctgcttcccttgaaaatcctcaagattctctttgtatttattttagacagtttaattatcaggtaagtttgagtttgtttctttgagtttttgttacttggagtctgttgagctccttgggtgcttacttattgtcttaaattgttgcattctttatgactatgttgttaaatagtatccatgattttttgtctcttccttggaacttccaaaatgcgtatgtatggctgcttgatggtgtccctcaggtttctaggctgtataaatctgccttgccccttttcagactccattggtgaccactatatggttgactgaccccaagggtgtgtatcacagtgtggggacagtgtgtcagttggtctcgcaaggctgatgcgtcccagagctcaattcccagacttcaatcattgcagtctcattagtgcactacgatctagaaatctctaattgtgaggtatcacacagagttctttgtctcatggccaagaaaattcaggaggatggatgcaaaaaggttgaatcaaaacttttataagtgaaagtaaaaaactcttcacagtgaggggtgaaatgtgagtggtttacctactatgaggctgtgctttacggtttctaagggcagagaagtaaagaaatgtgcttagtgttcttggagtaggcgttatttggcttggccctgaaacttggccttggattcatctggagctgaagtgatgatttgtagaagctacaaggctcagccttggaacttggccctggaccaagaaggagctgaagtgacagcttggcctgagaccttggcctgggatcaatcaagggatgaagtaatgtctcatggccacaataattaaggaggctggatgatgcaaagttcaagtaggaactaaagtaacacaacagccatctggactctgtccagatgtcatataaggggtttgaaaccaaggcttttcattagctcagaagaaatcacaaagaggcagtgtggatgcacctattccaaaggatgggccactgactgatacaaaaacaggcttttaaaattgattgaaagtattcacaaagttcttgatggtgttcaccatctcaaggcttgttctgtttctgtccttccttaaatacttcagaaagtaccccaaatcgagaccacagcaaaagacacttccagctgcactgaacagcacaagcttgctgccacccacagcagccctattcagagcattaaccattgctttaattacttctatattcagtacattttttatgttgatctagtttataggcacatctgggtgaatctgtcctctttcttcactgcaatatctctgtatgtgctggcactttctgctaggcctatgatgaggtacatcttctggataaaaagctggtctctgccaccgtcagtaacatttctttgcccaactttcactcttgcaactaatgtatgcacatctgtttttccattggctgccgattggcccattaataccactataccttttttggtagctgagtctgcagccatggaagccgtaactgagccagacctctgagaaaatagtggttgaatctgggtcttgctctctattccacaatgtcctgccctgggatctgataaagccctgatgatcttcccttcctcctccttgaagaccactgtatcctgctgatctgctgcaatagggtccagattctagagttcctgaatgccactcactgtgttcttgttgttaaaagggttgtaaggggcaagtgtctttcttgatagttgaacacagtagctccatattctttgggtcggacagaggtgaccctggattactgctaacattctggctggcagaacataactggctgcttttgaatttgtggtgttggccagacactagcgttttaggagtattcttagaaaagttgggcttggtagatgtagaagttcatcttctggtattgtttgaaaaagttctagttgttctggtccatgccacttttttactttttctgtttttcagtctgtcatctgttaaagtaatatatatatttttgaccggtgctgctctggttcccaagtgtcataccgtttcttcttaacctttgcaacaccaaaaatttttgttgttgttgttgttgttttgttttgtttttttttttagacaaagtcttgagctatcacccaggcaggagtacagtggcacaattgcacaatctcggctcactgcaacctccacctcctgggttcatgcgattctcctgcctcagcctcccgggtagctgagattacaggggcctgccaccacgcctggctaactttatgatttttagtagaaagaggttttcactgtattagccagaatggtctccatctcctgaactcgtaatctgcccgcctcagccttgcaaagtgctgggattacaggcatgagccactgtgcctggcctctgtctttccatttttgtctcatcttttgtcaacaatagtttcaacctcaaactcctggaaagccaggaagaaagacacaggattggagccattgctgtgccaaattttttccatttgcgtctccacatagccacttctttctgcctccagttctttaccaggttctgcgtatggatgagcctattctatttcatcaccactgacgtagtgaaaattgtttgaaatagcagctatgctatgggctttaggctctccacaattatgccctggtgggacagcttgggctttgtctcatggtgcatgatagctggcttagtagcctcaagtgagagtagctaaatccacatctcttactctctggtgtagtacagaaagctttctacctgtctgttactctttttcttttttaattgtcattgatactgtgattacattgaatattctaaaggtattccacttttaaagttatactagctgactttcaataacacacaaatcccttaaccctgtataactgcacccccatgatttccttattgagttctcaaaatcatacctttatgcactgtatgtcaaaaacgcaagttagtgatagtatttttattaaatatatttgtgttttaaattgcatgggaaacacattgtggaggtgtacactgatattctttatgttttataatagcttatatatttatctttaccttaatatatatccattcatactgctccttattatctgttcattttaccgtgaagtatcccataaggcattttttaaaaagatagtctactggtaaaatgtcccagcttttatctggaaatgtcataatttctccctcacttataagggacaatgttttgaacataagatatctgttcaaaagttttttctcacatcatttggaatatgttaatctattgctttctgtcctctgagttttcagataagatatctgctgattatttttgagggttactagccagtaacataactagccacttcttttgttgctttcaggattttctctgtctttcttttgaagagtttaattatcatataatttgagtttgtttatttgagtttctcttacttggagtttgttgcctttgacattctttaacattattgtttctaaatagtcttcctgattctttttctcatcctttgaacttccagtatgcgtaatatggctgcttgatagtgttccatggcattttaggctttattcccattgctttatactttttctatcatgtcctaacttaattatgtcaacaccctttctttggtttgctgatagtttgttcttcccccagctcaagtctgcttttaaatatctgtagtgaatatttttttctttttatccctagatttttttaggtttcaaaataattttacttttttattaatttttgttcatattttttttgtagttcttttgtttcttctattagcttattctgaaacttaattttaaatattatgtttctgtaagaccaccatttgggctgtctaaaaaaagtttcagaccataatttttttttacttcttaaaatgagccatacttctctgcttcgctgtgtggtttatctctagacttttttaggttttaaaataattttactcttttgattaataatttttgtccgtaagtgtttgtgcttcttttgttcattctattagcttattatgtagctaattttaaatattatattttagtaaggctgccatttgggctgtcaaaaaaagcttattttttcataattattttgtagttgttattaaaatgagccatacttgtctatttcactctgtggtttgtgattttgctggtgctgaaaaagagcatttaaattttaaagtgctgtgactttgaaaataagattttctacttctatggtttggtagagttttgtttactcattatataggctctttctctcctgtaaatcagctgtactgagcttcgtcttgggtctcttttgaggcacattgttttgaggcacatatcgttaaaaccacaattcattacatatatatgtgtgtgtgtgtgtgtgtgtgtgtgtgtgtgtgtgtgtatgattaattttgaatgttttagtctacaaatgtcttaagagaaaaagaagaacaatcaggaaaaaatattttcactttttaaatctattgaaagttggttgcacagagggacaaagagcctgcataatatttggggaatataataatgactattcacctctgttgggacctccataagcagaagcagcaatcggcaaatgagtcctcctgagatttggaggacagggtcctttttgtttgccatggctcttgtaagctgctccagaaatatttgcaaggcagcatcccacagtggtggttattaaagaataagtagctgctgttgatctgtgctacaaaattgataaaatttaatttttatttactttacaaatctttttttggaagctgtaaaccttcaggtagactcggaattctatagtaattgcatcatagtaatcctgccactgcacccattgtatagttgaagggacagatatacagtgatcccttgtacattgcagaactttcccagaatctagtattattttacttcgacctatttgtctttgcacctgaagtatgccttgcatagaagtcacaaaagtgactccttcgtttaagggtacacttgcaacaatgtgtgcctttttaagcaagagctcacatttacagttcttacaagtaaaatattacatactctgacatggacttacatgttttccatatgcgctttctcttgcttgatcctcaatttcttttttgctcatttaaaaaatctggataatttttaaaaactgctgttgtatttttcatattacaatttgatgtacttgggatttcaattattattgaaaacttaaaatagcctactatgaagaatactaacttgtgtgaataatttaatgtttaaggtcagcagtataaaaatatgctgctcttgtagttttccatccttctcaatttatattactttctctgattttatctgtgcacacagtattttttgtactcagcaacttaaatgtttgtgaccaattcctggcatttccgaccgagagtgacttctgagttaggcaaaggagaaataaatgtttattttatcaaattttcatatatcctctagaaagactgggaaaaaaaaacacaataatttagcacataagggtttctttgcttttatgagaagcaggaatcaggtcctcattttgacaatggggatttcaattctgtaggcttcatctgtgcctaggaggtgatatgaaaatccttaaagaaaaaaaaacttcaccattttataattgtctttctggattaaatgtttacttggtttatataaactattgattttcagggtccagactgtttttgatggtttgaaacttttttttttttttttggaatggtttgaaactgccatccctgccgttttacttttatttttatctgcgaagcactgagtgttttctaatttcagagtttattgttatttatgaggtttatgttttgtctcttgtttaaaacacttaaagtgaatgttacatttccaatttgcaatccccggtgttaggtttttgttttagtggtcattttataaagtttttgtttttttattaagtgaaattatcaattttgtataaaatgtatgaggtaagattctctgttataaagtacattttggtttttgtaaaacaaacatacaataagtggcttacaaagtgactttcaaataattgtctaaagaaaataataagaaaataatgtaagcatgcagcaagatcaataagtacaatgattcctggtggaaggctgtataaattgtttttaaaaagccagctccctgtggctgcagcaggctgtagaagggggaaaattatagaggatgagctcatagaggtaacagacagtccatgtgattttctagggtttttataggtcttcagattttactttagacttcaccctaaccctggtttgtgactcaaagtagaattggtaaggttgttactagcatctattgctgagaggttagaaatgctgctaaatatcctaaaatcttgagtctcaggcacctttgagaagttaacagtgttgaaatatctctcgagaaaattatttttaaaagctcacatttagaactctttgatgttatattttgaagatttcttaactccaagtttggtttccgtatagcagaaggatttgaaaaagtgtacataagttccattgattcaacttagggtaaacattagtaaagtaaggtcagttcagttaatcaatgattagaaactaaatgatatatttcttatttctctgcttttccttccaattgctttttcaatatttttgtaaaacatgagtgtgaaaaaataaaaccctagtcagcctctgttttggaggtaccaagggagaaatctcaatgaatggtatttgggatggagctaatctttcatacagttgaaaggcataaataatacacgtgcatacaggtgcattggcacactatattatggatacacattgtgcgttcagaaagcacaatgtgtatccataatacagtcatgaatgatcctagtcataatatagtcatgaatgatcctgggatattacaataagcaagtcaaatggaaacaaagtttgcaaggattatagctggggttataggattttcaattttgctaaagttgtttagtagaaccaatattcaagtatctcctacttttaaaaaaattatttgatagaagtttgcatagtggacagctttgatcagaatcattagttctttgccaacgtaataaaagtatgcattcacaaaaaatgcatattagacaataagagaaaataaaaatcaatgaatgaggaaactgatgtaataggaacaatttctgaaaatgttaagataaatccaaaaggaggtgaatttctacagtggaaaatctttctcatttcaatcaaaaatttgtttcagaacattagcaagtagcagcaacatggtaattatccagatttacaccgtttccttagttcctacttagcgcctgagatgtaggctctgttgctgatgctagggccttctccatgaggcagaactcctacccatatagggcttgctttttctccaaggttaataaaatgccattgaacacctaaaaggaaacggcaagtttatttttttttttgcttaatatactaagggagagctctgctgtttagacacattcttggaacaatgcagagattgtgaaattgaggcattaacagacattaagttgtgcacagaagctggcattatttgtagaaacaaagttgttcagctaaaatttgtagtgaaagaggaatatttattgaaatctgtgactgacctgatttttcaaagtgctggcactgttttattattattagtgttactatcactattattacctgtaacagctttttcactaaggaagttaagctttatagatcacttaaatttaaacctgaatttgatgggtacattttacaatgattgcagaaccactatttactaaatatttctgaaagtctaaattgtcattctctaagaagacataatacacctttgtttttaaagaaatgaagagtatttactaattggtaaccgtttgttaaataattactctgatatatgttcaagagccttgtaagtaagtaaataggaaaataagtactttaaaggttttttttttttttttttttaacatagatgcatatggaccactgaagcacatacgcacatgtgtattgtgtatatatgtcaggattttttttatggaattagtttatggcatcaccatcaaacaagctgacttattaaaagaaggtttatagttttaatatttattcaaataatgttttttgattgtatcctagggatagtgatcagctcaaaacctgaaggaagaagatgggtgacttctccatttccaactgaggtaccaggttcatctcactgggagtgctgggaagtggggcaggacagtgggtgcagtgcatcaattgtgacctgaagcaaggtgaggcatcacctcacccgggaagcaaaaggggtcagggaattccttttcctagtcaaagaaaggggcacctggaaaatcaggtcactctcaccctagtactgtgcttttctaatggtcttagcaaatggcacaccagaagaagatatcccatgcctgcatcagagggccctacactgttggaacctcgctcattgctagcacagcaatctgagatcaaactgcaaggtggcagcatggctgggggagggcgtccaccattgccaaggcttgagtaggtaaatgaagcagctgggaagttcgaacccagtggagcccaccacagctcaaggaggcctgccagcttctgtagactccacctgtgggggcagggcacagccaaacaaaaggcagcagaaacctctgcagacttaaatgtccctgtctgacagctttgaagagtgtagtggttctcccagcacgcagatggatatctgagaacagacagactgcctcctcaagtgggtccctggccccctggtagcctaactgggaggcacccatcagtaggggcagactgacacctcacatggccaggtactcccctgagacaaaaattccagaggaatgatcaggcagcaccagttgctgttcaccaatatccgctgttctgcagcctccgctgctgatacccatgaaaacagggtctgcagtggacctcagcaaactcaacagacctgcagctgagggtcttgactgttagaaggaaaactaacaaacagaaaggacatggacaccaaaaccccatctgtacgtcaccatcaccaaagaccaaagatagataaaaccagaaagatggggaaataatagagcagaaaaactggatgctctaaaaatcagagcacctctccccctccaaaggaacacagctcctcaccagcaatggaacaaagatggacggagaatgactttgactatttgagagaaaaaggcttcagatgatcaaactactctgagctaaaggaggaagatcgaacccatggcaaagaagttgaaaaccttgaaaaaaaatagacgaatggctaactagaataaccaatgcagagaagtccttaaaggatgtgatggagctgaaaaccaaggtacaagaaaaacgtgatgaatgcacaagcctcagtagctgatttgatcaactggaagaaagggtatcagtgatggaagatcgaatgaatgaagtgaagtgagaagagaagttcacagaaaaaagaataaaaagaaatgaacaaaggttccaagaaatatgggactatgtgaaaagaccaaatctacgtctgattggtgtacctgaaagtgatggggagaatggaaccaagttggaaagcactgcaggatattatccacgagaagttccccaatctagcaaggcaggccaacattcagattcaggaaatgcagagaacaccacaaagacactcgtcgagaagagcagctccaagacacataattgtcagattcaccaaagttgaaatgaaggaaaaaatgttaagggcagccagagaaaaatgtcggcttatccacgaagggaagcccatcagactaacagctgatctcttggcagaaattctacaagccagaagagagtgggggccaatagtcaacattcttatagaaaagaattctctacccagaatttcatatccagccaaactaagcttcataagtgaaggagaaataaaatcctttacagaaaagcaaatgctgggagattttgtcatcaccaggcctgccctacaagagctcctgaaggaagtgctaaacatggaaaggaacaaccagtagcaaccactgcaataacatgccaaattgtgaagaccaccgaggctagggagaaactgcatcaactagtgagtaaaataaccagctaatatcttaatgacaaaaccaaattcacacataacaatattagccttaaatgtaaatgggctaaatgctccaatgaaaagacacagactggcaaattggatagagagtcaagacccatcagtgtgctctattcaggaaacccatctcacgtacagagacacacataggctcaaaataaagggatggaggaagatctaccaagcaaatggaaaacaaaaatagacacgggttgcaagcctagactctggtaaaacagacttttaaccaacaaagatcaaaagagacaaagaaggccattacataatggtaaagggatcaattcaacaagaagagctaactatcctaaatatatatgcacccagtacacgagcacccagatttataaagcaagtccttagagacatacaaagagacttagactcccacacaataatagtgggagaatttaacaccctaccatcaaaattagacagacaaagttaacagggatatccaagattgaactcagctctgcaccaagctgacgtaatagacatatacagaactctccaccccaaatcaacagaatatacattctttacagcaccacaccacacctattccaaaactgaccacacagttggaagtaaaggactcctcagcaaatgtaaaggaacagaaattacaaaaaactctctcagaccacagtgcaatcaaactaaaactcaggattagaaaattcactcaaaaccgctcaactacatggaaactgaaccatctcttcctgaatgactactgtgtacataacgaaaggaagccagaaataaagatgttctttgaaaccaacaaacagcatctcaaggatgtgtctttgagaacaaagacgcaacacaccagaatctctgggatgcattcaaagcagtgtgtagagggaaatttatagcactaaatgcccacaagagaaagcaggaaagatctaaaattgacaccctaacgtcacaattaaaagaactagagaagcaagagcaaacacattcaaaagctagcagaaggcaagaaataactaagatcagagcagaactgaaggcgatagagacacaaaaaacccatccaaaaatcaatgaatccgggagctggttttttgaaaacttcaccaaaattcatagaccattagcaagacaaatacagaagaaaagagagaagaatcaaatagacacaataaaaaatgataaaggggatatcaccacagatcccacagaaatacagactaccatcagtgaataccgtaaacacctctacacaaataaacttgaaaatctagaagaaatggataaattcctcaacacatacaacctcccaagtctaaaccaggaaaaacttgaatctcttaatagaccaataacaggctctgagattgagaaaataattaatagctttccaatcaaaaaaagtccagaaccagatggattcacagacgaattctaccagacctccaaggaggagctggtaccattccttctgaaactattccaatcaagagaaaaagaaggaatcctccctaactcattttatgaggccaggatcatcctgatactgaaggctggcagagacacaacaacaaaaaaaggtaactttagaccaatatctctgatgaagattgatgaaaaaatcctcactaaaatactgggaaaccgaatccagcagcacatcgaacagcttatccaccatgatcaagtgggctttatgcctgggatgcaaggctggttcaacatacgcaaattgataaatgtaatccagcatataaacagaagcaacgacaaaaaccacatgattatcttaacagatgaagaaaagtcctttgacaaaattcaacattctttcatgctaaatagtctcaataaattaggtcttgatgggatgtatctcaaaataataagagctatctatgataaacccacagccactgttatactgaatgggcagaaactggaagcattccctttgaaaactggagcaagacagggatgccctctctcaccactcctattcaacatagagttggaagttctgaccagggcgatcaagcaggagaagtaaacaaagtgtattcaattagaaaaagaggaagtccaattgcccctgtttgcagatgataggattgtatatctagaaaaccccatcgtctcagcccaaaatctctttaagctgataggcaacttcagcaaagtctcaggatgcaaaatcaatgtgcaaaagtcacaagcattcttaaacaccaataacagacaaacagaggaccaaatcatgagtgaactcccattcacaattgcttcaaagagaataaaatacctaggaatccaacttacaagggatgtgaaagacatcttctaggagaactgcaaaccactgctcaatgaaataaaagaggatacaagcaaatggaagaacattccatgcccatgggtaggaaaaatcaatatcgtgaaaatggccacactgcctaaggtaatttatagattcaatgccatccccatcaagctaccaatgactttcttcacagaattgggaaaatctactttgaagttcatacggaagcaaaaggagcccacattgccaagacaatcctaagtcaaaagaacaaagctggaggcattacgctaccagacttcaaattatactacaaggctacagtaagcaaaacagcatggaactggtaccaaaacagagatatagaccaatggaacagaacagagccctcagaaataatgccacatatctacaaccatctgatctttgataaacctgacaaaaacaagaaatggggaaattattccttatttaataaatggtgctgggaaaactggctagccgtatgtagaaagctgaaactggatcccttccttacaccttatacaaaaattaattcaagatggattaaagggtggagccaagatggccgaataggaacagctctggtctacagctccccgtgtgagtgacgcagaagacgggtgattcctgcatttccacctgaggtactgggttcatctcactagagagtgccaggcagtgggtgcaggacagtgggtgccatgcaccgggtgtgagctgaagcagagcgaggcattgcctcactcgggaagtgcaagtggtccgggagtttcctttcctagtcaaagaaaggggtgacagatggcacctggaaaatcctgtcactcccaccctaatactgcacttttccaatgggcttaaaaaacggcacaccaggagattatatcccgcacatggcatggagggtcctacgcccatggcacggagggtcctatgcccatggagtctcgctgattgctagcacagcagtctgagatcaaactgcaaggtggcagtgaggctggaggaggggcgcctgccattgcccaggcttgattaagcgaacaaagcagctgggatgctcgaactgggcagagaccagcgtagctcaaggaggcctgcctgcctctgcaggctccacctccgggggcaggacacagacaaacaaaaagacagcagtaacctctgcagacttaaatgtcccagtctgacagctttgaggagagtagtggttctcccagcacacagctggagatctgagaacgggcagactgcctcctcaagtaggtccctgaccctcgagcagcctaagtggaaggcatcccccagtaggggcagactgacacgtcacaaggccaggtacccctctgagacaaaacttccagaggaacgatcaggcagcagcatttgtggatcaccaatatctgctgttctacagacaccaatatctgccgttctatagccaccgctgttctgcagccaccactgctgatacccaggaaaacagggtctggagtgggcctctagcaaattccaacagagcagtagctgagggttgtgtctgttagaaggaaaactaacaaacagaaaggacatccacaccaaaaccccatctgtacgtcaccattatcaaagaccaaaagtagaaaaaaaacccacaaagatggggaaaaaaaacagagcagaaaaactggaaactctaaaaagcagagtgcctctcctcctccaagggaacacagctcctcaccagcaatgcaacgaagctggatggagaatgactttgaccagttgagagaagaaggcttcagatgatcgaactactctgagctacaggaggaaattcaaaccaatggcaaagaagttaaaaactttgaaaaaaattagacgaatggatatctagaataaccagtgcagagaagtccttaaaggagctgatggagctgaaagccaaggcacaaggactacgtgatgaatgcacaagcctcaggaaccaatgcgatcaactggaagaaagagtatcagtgatggaagatgaaatgaatgaaatgaagagagaagggaagtttagagaaaaaagaataacaagaaatgaacaaaacctccaagaaatatgggagtatgtgaaaagaccaaatctacttctgattggtgtacctgaaagtgacggggagaatggaaccaagttggaaacttggtttccaactgagtgttggaatactctgcaggatatcatccaggagaatttccccaatctagcaaggcaggccaacattcagattcaggaaacacatagaatgccacaaagatacccctcgtgaggagcaactccaagacacataattgtcagattcaccaaagttgaaatgaaggaaaaaatgttaagagcagccagagagaaaggacgggttacccacaaagggaagcccatcagactaagagctgatcacttggcagaaagcctacaagccagaagagagtgggggccaatattcaacattcttaaagaagagaattttctacccagaatttcatatccagccaaactaagcttcataagtgaaggagaaataaaatcctttacagacaagcaaatgctgggagattttgtcaccaccaggcctgccctacaagagctcctgaaggaagcattaaacatggaaaggaacaaccggtaccaggcactgcaaaaacgtgccaaaatgtaaagaccatcaaggctaggaagaaactgcattgactaatgagcaaaataaccagctaacatcataatgacaggaccgaattcacacataacaatattaactttaaatgtaagtgggctaaatgccccaattaaaagatacagactggcaaattggaaaaagagtcaagaccatcagtgctctgtattctggaaacccgtctcacatacagaggcacacataggctcaaaataaagggatggaggaagatctaccaagcacatggaaaacaaaaaagaggcaggggttgcaatcctagtctctgctaaaacagactttcaaccaacaaagatcaaaagagacaaagaaggccattatataatggtaaagggatcaattcaaaaagatgagctaactatcctaaatatatatgcacccaatacaggagaacccagattcataaagcaagtccttagtgacctacaaagagacatagactcccacacaatgataatgggagattttaacaccccactgtcaacattagacagatcaacgagacaggaatttaacaaggctacgcaggaattgaactcagctctccaccaagcggacctagtagacagctacaaaactctccaccccaaatcaacagaatatacatttttttcagcaccacagcacacctattccaaaactgaccacatagttggaagtaaagcactcctccgcaaatgtaaaagaacagaaatctcaacaaactgtctctcagaccacagtgcaatcaaactagaactcaggattagaaaattcacccaaagccgctcgactacatggaaactgaacaacctgctcctgaatgactactgtgtacataacgaaatgaaggcagaaataaagatgttctttgaaaccaacgagaacaaagacacaacataccagaatctgagggacacattcaaagcagtgggtacagggaaacttatagcactaaatgcccacaagagaaagcaggaaagatccaaaattgacaccctaacatcacaattaaaagaactagagaagcaagagcaaacacactcagaagctagcagaaggcaagaaataactaagatcagagcagaactgaaggaaatagagacacaaaaaacacttcaaaaaattaacgaatccaggagctgtttttttgaaaagatcaccaaaattggtagactgctaggaagattaataaagaagaaaagagagaagaaccaaacagatgcaataaaaaatgataaaggggatatcaccactgatcccacagaaatacaaactcccatcagcgaataccataaacacctctacacaaataaacttgaaaatctagaagaaatggataaattcctcgacacatacaccctcccaagactaaacagggaagaagttgaatctctgaatagaccaataacaggctctgatattgtggcaataatcaagagcttaccaaccaaaaaaagtccaggaccagatggattcacagccgaattctaccagacctacaaggaggagctggtaccattctttctgaaaccattccaatcaatagaaaaagagggaatcttccctaactcattttatgaggccagcatcatcctgataccaaagcctggcagagacacaaccaaaaaagagaattttagaccaatatccttgatgaacgttgttgcaaaaatcctcaataaattactggcaaagcgaatctagcagcacatcaaaaagcatagccgccatgatcaagtgggcttcatccctgggatgcaagcctggttcaacatatgcaaatcgataaatgtaatccagcatataaacagaaccaaagacaaaaaccacatgattctctcaatagatgcagaaaaggcctttgacaaaattcaacaatccttcatacaaaaaactctcaataaattaggtattgatgagacgtatctcaaattaataagagctatctaggacaaacccacagccaatatcatactgaatgggcaaaaactggaaacattccctttgaaaagtggcacaagacagggatgccctctctcaccactcctattcaacatagtattggaagttctggccagggcaattaggcaggagaaggaaataaagggtattcaattaggaaaagaggaagtcaaattgtgcctgtttgtagatgacatgattgtatatctagaacacctcattgtctcagcccaaagtctccttaagctgataagcaacttcagcaaagtctcaggatacaaaatcaatgcacaaaaatcactagcattcttatacaccaataacagacaaacagagagccaaatcatgagtgaactcccatttacaattgcttcaaagagaataaaatacccaggaatccaacttacaagggatgtgaaggaccttttcaaggagaactgcaaaccactgcgcaatgaaataaaagaggatacaaagaaatggaagaacattccatgctcatgggtaggaagaatcaatatcgtgaaaaaggccataatgcccgaggtaatttatagattcaatgccatccccatcaagctaccaatgactttcttcacagaattggaaaaaactttaaagttcatatggaatcaaaaaggagcctgcatcaccaagtcaatcctaagccaaaagagcaaagccagaggcatcatgctacctgacttcaaactctattacagggctacagcaaccaaaacagcatgttactggtaccaaaacagagatatagatcaatggaacagaaccaagccctcagaaataatcttacatatctacaactatctgacaaacctgagaaaaacaagcaatggggaaaggattccctaattaataaatggtgctgggaaaacaggctagccatatgtagaaagctgaaactggctcccttccttacaccttatacaaaaattaattcaagatggattaaagacttaaatgttagacctaaaaccataaagaccctagaagaaaacctaggcaataccattcaggacataggcatgggcaaggacttcatgtctaaaacaccaaaagcaatgccaacaaaagccaaaattgacaaatgggatctctttaaactaaagagcttctgcacagcaaaagaaactaccatcagagtgaagaggcaacctacagaatgggagaaaattttcacaacctactcatctgacaaagggctactatccagaatctacaatgaacaccaacaaatttacaagaaaaaaataaacaaccccatcaaaaagtgggcaaaggacatgaacagacacttctcaaaagaagacatttatgcagccaaaaaatgcatgaaaaaatgctcatcatcactggccatcagacaaatgcaaatcaaaaccaccatgagataccatctcacaccagttagaatggcgatcatgaaaaagtcaggaaacagcaggtgctggagaggatgtggagaaatagtaacacttttacactgttggtgggactgtaaactagttcagccattgtggaagtcagtgcggtgattcctcagggatctagagctagaaataccatttgacccagccatcccattgctgggcatattcccaaaggattataaatcatgctgctatgaagacacatgcacacgtatgtttattgcggcactattcacaataacaaagacttggaaccaagccaaatgcccaacaatgatagactggattaagaaaatgtggcacgtatgtgccatggaatactatggagctataaaaaattatgagttcatatcttttgtagggacacggatgaagctgtaaaccatcattctcagcaaactatcgcaaggacaaaaaaccgaacaccgcatgttctcactcatagctgggagttgaacaatgagaacacatggacacaggatggggaacatcgcacaccagagcctgttttggggtggggggcgtggggagggatagcatttggagatatacctaatgttaaatgacgagttaatgggtgcaacacaccaacatggcccatgtatacatatgtaactagcctgcacattgtgcacatgtaccctaaaacttaaagtataataaaaaaagaaagctttttgaaaatacttacaaactcttttattttccatccctttatatatttttatatatgcatgtatatgtgtgagtgtgtgtgtgtgcctgtgtatatgtatatataaatatttaggggaggttataagtacttacgtacatgatcacaataggctgcctgcaagctgaggaacaaggagagcaagtctgagtcccaaacctggaagaacttggagtccactgtctgagagaaaaagtatccagtatagaagaaagatgtatgctttggaagctagtcccatctcgctttttgacatgtttctgtctgcttgatgttcgctagaagctcatgagattgtgcccatcagattaatgtagatcttcccattgactcaaatgttaatttttggggggggggaaccacccaagaaactcatccacgattaatactctgtatccctcaatccaatgaatgagacactcagtgttaaccatcacaagtccaccccttgttaactcgaatcaaatcacatctcctgctataatacataatcttcaaatgcagacagaaatgaggtaataattacacctaacataatacaattatcctcttacagccaggaatgcagcaatccccaatccaaacactatttcataaagtttacaatacacaaatgttgataagaactcaataaatcttacgtagcatgataaaggaaaataaaaaaaatattttcttagtacatgtgtatacatgcacaaactttttttttaacaaaagaaggaggaaatacttaagacaattaacgtcctcatttctgcagctggtcacttgtttatagcggatatggatgactaacttcttctaacacccattctgccttccttttgtcttcctcaagcacctcagcaggttgcggtttttattgttttgttgttgttgttccttttgttgttgttaccctggtgagtgacccaaaccttaatacctgaagggtctgatccaactgtagcccggtcagaattgggctgttgtagttttccactgaccttaatcgcacgtcatggtaattctggaacacatcttaatgcatcttctgtattttatgccacactctttcttccctccattgtggaggagtaggctgatttcatcttgatagttcaggtcaatcaacccagtcaacactgtaactgcctttttacaatgctgacgtaaaggtaggaggaggcccaagtgtccaggtgacaatcttgacttccagtttaatggaatcattattgtttcatctggtggcagcgcttttcctcggggagctaagacctctaggccagcagaacataatatcataagaaacaggaaacagaaatgttgctggtgaaacaccaggagcgatagtgagtggtgaaatttctacttctattgcttgattcctggaccagcgaattttggctacagaagtaacaatgccatatattggatgctgattcagagaacatatggtcttctggagaactttgccacagccctgcaaagtattgtcacatagttggcattgcaattgtaacttcaaaaggccacttcacaatcttattaatttagttgcttcaagataatgagaaacatggtaagaccagcagatttaatgagcaggagcccactgccacatttctttagctgtaaagttagtgcactggtcagaggaaatgttgtgtggaatactgtaatggtgaatatggcattttgtgagttcatgaatggtagtcttatcagaagcattgcatgaagaatggggaaacccatatccacagtaagtggctattccagtgaggacaaacctctgccatttccttgatgaaagagttccaatataattaatctgtcaccaggtagctggctgatcaccccaagaaactgggccatactgagggctcagttttggtctctgctgctggcaaattgggcactcagcagtggccatagccaggtcaggctttgtgagtggaagtccatgttgctgagcacatgtgtaacctcagtttctgccaccatggccactttgttcatggacccatcgggcaatgacaggggtggctggggaaagaggcagagtggtgtccctggaaccagtgtttttatccacttgattattaaactctttatctactaaggctgctcgttggttagaactcacatggaatacaaatattttgacagcttttgaccactcacaaaggtccgtccacatacctcttcctcaaatatctttctcaccaatattctgatcatgcatctaccaagtgcctgacacccagacaaaccattggctatggaccatgaatcattatatagtcagaaatctggccatttgggtattgacataggctgaaggagagaagatggggtggctgcagtggagatcgtgagcatttgaaccactttctcatgtaacttagttgtgccttaggacctgcttaagcctggccacgtgtataccacatccatttcatgatgaaatgctgctgcgcacaacccactttaagactcgatgggtcagaaagcaccaagttcatgatagacagtgtacttcacatggtgacttgatgaccaacattgaaatgttccaccaaagcccagcaatgggccaggagctgtctctccaaagaatactagttatctgcagaaaatggcagggccttgcttcaaaatcctagaggtgtatggtctgattcacctgtgggagcactgcaaagtattgtcacatcgttggcattgtaattgtaacttcaaaaagccacctaaccgttctatttatccagctccttcaggataatgggaaacagggtaagacaagtagatttaatgagcaggacactgctgccacagttatttagctccaaacaacatccctatctgccactgaaatttcaagcaccattgaatctcctggttcacatggcccaaagagtagaggggtttgcaacgcagcctgaagtagttgcagagtcttttcctgttttggatgcccctgaaagctggcagccctttgggtcactaataagtgggccagtgggacatattcaaataaaaaatgtgctgcttcaaaaatccaactaggcctagtaggtattgtgcctctttcttggttataagaggggcctcacgcaacatcttgttcttcaccctggaaaggatattttgacaggcttcccaagactggacctctaggaacattacggaggtagaaggtctctgaattttagtcacatttatttcacatcctctggtacataaatgtctcaccaataattcaaatgtgcttgctacttcctgctcactcatcaaatcagcctaatttcatcaatgagatggatgaaatcatcgtgatactttacagaagtgaagagcaatcaaggtctctctgagtaagattatgacaggaagccagagagttaatatacccctgagcaaggttaataaatgtgtattgctggccttgccagctgaaggcaaattgcctctggtggtccttatagacaggaataaagaaaagggcactggccaagtgaatggctgtataccatgtgacaggagatgtattaatttgctcaaaaaataaaccatatctagaatatcagctgcatgttgattcacaactgtattaagttgcaatactccaatgtgattatccaaggtccacctgtcttttgcacaggccaaatgggagagttgaattagaatgtgctggtaattaccaatccagcatctttgaaatttttgatggtggcacccatcttcacaatcttctcagggttttgatatcatttcttatttactatttttctaggtaggggcagctcttgtggcttccatttaaccttttctattgttgtagccctcaccttggaggtcatggaaatgtgggattctgccagctgctaagtatatctatgccagttatgcaatttagcactgggaaaatgaccacaggatgactccagggactcactgggcactctgtaaatctgacctaataagctaaagcactattaattacctgacctccctgagctcctactttaactgcaggaccacagtaacattttgggtcccctggaacccacatcagcacagagctagtggccagtagtttctccaaagtctgactatttccctttccctagtacacaattactttggtaaagcctggaggtcttcttggggaaagattgtgtaaagattcactgcataaatagtcagttgtgttgtgggtttcttggtcaagggaacccagcctcctcttcattcgatggattctcggtctttaaactgtctctagcctggtaattgatggaggggccgtacttctctgttttcatcattccgaatagtgatttgtccttttgacgcaacgatttctgtatgtataacataagtatgaatgcagtaagctttccatcaatttcacttgcacgaacaccgtgactaattaaccaatggcaaggctctacaggagtcacattatttgactgccactatcccttcgctgtgcccacattacctttgatggttgagtggtgccacttgacccctatcacactgggatccaactattctcatcatatttaaattttgtcgttgcatgactgtggtttccatagaagagcaattacagggcaattgtgcccaccagattaagggtggaactaccttctccagcccactgtccctagtgttaatctcttttaggcaacactcacacagacacataccaaactaatactctgtatctctcaatccagttaaattgatactcagtgttagccatcacaggctcttggcgataaatttgctggtccccactaaggctccaccttcaagccggttacagcctgaggtccaggttccaggctgatggacaagaatgggaaccactgttgcttttttctgaaacgcatgcattgttgccaaataatccaatcagcaagcactttctttcctttgaagcaaataatattcctggactcagccacatttgaggactattcaaactaccagccgtggagaggagctacctacccaagggccatctctctcctgcaagcttaggagatgtcaggactatcagcagtgggctggagctacccaccacagtctctgctgaaagctggggagataatgggatgaccagctagagtgaggagctacccactcgagggtcttctctttgctgaagtcttagccaatcttggaaccaccaggtgtgaagtagacctacccactccagggtcttcactctgtggagagcttaacatctcataatatgaccagctggatggagaagctaccaagtccagggtttctttcctgctgagagctggacactaagccttgacaacttgcctgtagagataagccgcccgctctaaagccgtctctccgctgagagctggaccctcatcagaacatccagcctgtggagaagagctacccaatcaggatctcttttgagttctgtccctcagtaaatcttgtctataaaggtctcactctccacgtgtccatctacctcattcttcctggataaagaactattatttgagaatcactgaatggtggtgctgaaagaactgtaacacaaacagggaaaaacatgtctcttgctcatcacattgtgaaagacaaaaataagaggacagctaggctatctcaaaaccagggctgtgacaccctctttagggctttgctgtttctggcatcctgaaacttctgggcaccactacattccccagtatcagctgtggaagctgcttgcagtatgcctggtccagctgctgcatctcagtgagatggcacttctgttggtacctaaaatttcctgctttgcaacagctggcaggcctggccgtctatagcggctggaccccacacttgctcaaacaccattgccactctacctcacgtttgcccttggcagctgttaaatcctggcccataatgcaagctgagtgcagcctgtcaggcagagtgggtagagctagcttagcaggcctgagaaaacacaggcaaaggcaccactggccacagaggttttcaattggtaaggtgactctcccaaaatcccatgacaaaaggagcatagctagttgcgtttaaatgcctttcttctattggatcttgaaatacttaaaattcagtctcctacaatttggaatgtttaaaccttatttgaaaatcattatatttcaaaatcttttggaaattaaagttgaaagactggtatttccactgaaacaccctatccctcttacttgcacagacatctagtctctgagaatatacttctgtaattcatggcattgggcttcaggttagcactcttccactgtgttataaagctttctaatgaaacagaatttctgattttgacattttgtactcataaaatttctttatgtgcggagcttttgctgtgcattgcaggatgatgagcagcatttcgggccccttccattaagtgcaattgtaaacgccttttttttttttttttttttccccatggaagaaatgcccaaatatgtttgtgtcttgtggaagcaaaattgatggctatctttatcgtataagttaatacccatgaaaaaactgatggtagtgagctagtgcagtcataggaatgtttttacattgttctttggaatgtctatcagtacagacaatgtggaaaagtgtgtggtgattcacacttttagtctttcagaatgccaatcccactggattcagcaatttcattactgggtgtatagtacctgcaaaattagtcattctattacaaggacgcatgcttgtgtatgtgtattacagcactattcacaaattcaaagtcatggaattaacccaaatgcctatgagtgacagactggataaagaaagtgggaaaacaacaccttcaggacaaatagctaatttatgcagagataaatacctaggtgatggggtaatgggttcagtgaacaaccatggcacacgtttacctgtgaaataaatctgcatgtcctgcatacatatcatgaaacttaatataaatttaaattaaattaaatttaaattaaaaggctttcatttttgtagcagttatagtaactttggaatgtgtgccacaccttatttaagagattttataaaataactataaatcagagttttgacaaactgcaccaaaaagtaaataagtagtatatttcaattctcagttgattgaatttcttttctttcattttgaggatggaatcttacacagtgtcttcagctggagtgcagtggtgcaatcttgacatgctgcaacccctgcttcccagcttcaagggattaagctgcctcagctatttgattagctgagattacacgtgtgcaccaacacagctgatggggtttcaccatgttggccaggctagttccaaactcctgacgtcaagtaatctgcctgcctcatcatctgaaagtcctgggattataggtgtgagtcaggatgtctggccgttgaatgaatttctaattgagaaacttatccatcttgcaaaactttattttctatatcatacttttatgagtttcttcatatgtctcataagtcaagaaaaataatataatgttaatgcattctcttttcattggaaatgaatgtatatccatttatatgtaattaaaagagaaagtctatttagaatgtcatttttcttttgtgtaaaactctggggttttagaaatttctttaaaaatataactttggaaactaattacatttcttgacataaatggttgttttttaaggatcttttttggtaagaaaattcaaaattgtttgaagatacaatgagttgtttaattatatcaaataaacataaaggtattttctttgagaaaacaggtttttcttaatttaggttttctacaaataatattatgattactttctcttcctaaaattaatttatgttttcatcttccctgtatcaagagttcacctgcaatgtataagaagtaagaactgccagcagaacaggcatttccaagatgtaggtcacccactaccatgaatcctagcttgagctacttgttgcgccagctattgactgtgtaaaaaaatctaaaaatgagagtaggctctttgactgcaatatatgacacagacaaagcaataactagtgagtagtttaaattataaatctgattttattcatcaatattcatttactttggtttgaaatactactttttcatttagaaaaagaagtaactcactttttttttgtttgtttgtttttggtcaactagcccaacattttgtagtcatcaggtatgtaagtagaagaactttaatgagagaatacaatttttttgaagacgatgcctttctttaatggtttcctatagctggttttggtaacttaacacatgagttgtttttatcatatgtgaaaaaatacggaaatgttacattaacgaggggccaaacttaatgctataaaatgttatatttaaaatgtatgcactgaagttgcttaatgttattttaattaaattctaaaagaggaatggttttgaaaatcatgatattagaaggaaacatttgagtgcactttattacttctaaatgtccaaataagatccacaaaaaggtagcaatgtttaaacttacacagaactgaaactcaaagtgggaggtaatgtaagcaaattaacatacagtaacataaaacttagtgtatttcaagattaaactaagtgttaagtacgtaattaacaaacatattcagtataggcctgtaataagtaaatatgaaattatatatatatatatatatatatatatatatttccatgtaagtttttttttaacacattgtaggagtttccagctaactcactgattaaaagatcaaatcttcatttgcattgtgagatccatgtagagggaaagatttgcttttaaaaaacactttttttgttaatttatttaatgattgtattgacgtggtaaatatatatttgcaaatgagtgtttttaaacaaacactgctgttgttaaatgctttagctaactgttttacatagttaatatatatatatattttcactatacaggatgatatatactaacaattattaactgatcaccaattttatattcctgttccagagattatctctgtgcctgcagtaatccatatatatagctatttatttattttcttacacaaatgaatatatacaatagactatattgttaactttgtacttcgtcacacatctgtcagtatatgaagatccatttaattttgtttgtagatgcataacttgcaattcaatgtgctctaatttatgcagtccaccgctgagatggattgacgtgtaagtggtattcagttttacactaaataaagaagaatttacacttccaccataattttaaacacaccatcgcattgacttcatctcacaacaaaattctgagtgcaggcaaagtgattatcattatttgctgaggaaagaagcagatatttgcatgaaagttatagctttatgagtcagaacaataacttaaaggaagtgctcacttaaaactgggaaaactctcatttttttttaatgtaaagttctaatggcaatgaattgaatacaatcattttaagtgcaaaagtttttaatgagtaaactcataatgatcagttaagtctgcgtttaacacatgaaaatttaatactacgccgtcttctataactcaaagaaagcttttttttttttttttttttttttcttatctcagcttgtgaaatatttactgagtgggactatctgcccccgttggaccccacccaacaaaagtatttgtgggactcaaagacgctggtgctacttatcaaatacatgctgtgatccagcagctatacctgatccctgtcatcggccacagcatttctaccattgaaaacacaggtagtgacatagatgatgatcgtggggctgggaaatgagggttttcatccttcagacttcagaatggttggtccattgacagcttgatggtgtgcccagaaaagcccgtagacactcaatgccagatagtgaaagcagttgggaggaaggctgtaccccataaagcctcatggggggatctgctcaagaccatggaaacccacctcttgcatcagcatgacctggatatgagacat

SEQ ID NO: 643 - DNA, 32744 bp, Homo sapiens
  source 1..32744: mol_type = other DNA
agcgctcgcctgcttgccatcgcaaagttgttaaccccagagtcttctggctgtgctgcctcctctgcttttaatcttctgtggatatttctccgatttcccccaaaagcccacagatcctgggggaagccaccccattcggccaccgatcatggaagaaagtattactttttatttaccaaacattttaaagatgttggaagatccatatgctgcctggaggctgttgtttctagggacacaagtatccagcctatattgttacaattttttttcaagaactgccgtcttctttgcctgcactaatggtaagtttgtaattttcaccatttatgtcagtctttgaaagagccaccggctaaaaaggattttcattgtgtttcttctaacaaaaccaatctttgtatttttctttagctttgatctctgcacgttctacctaatcttgcctggttaatttttaccaaaagaaaaaaaaatagttttttttttcattgttaaagctaaatgtttataatataaattatactttaattactgtgaactacagaggaactcagatatttcaagatggacttgttttgtgccagtaatgttggcaatgccaaatatgtgcatatcctctttataaaaattatgtcttacctaatttgtccaggactcaattatcagcaggcaaactatggatatagtttttttttaaatggacctattgtggttctcttgatagattacttggatacaaactacagaaaagctgcccttggtataatgaaggtggaggttgacataaccgggtttatattaagttatggctgttactaaatagtggatcttttatttgctgatcagatctcaacttgtagtctatgatattatttctttgaagctcttcattagataatctttgcaggtctatcttgtttttctcctatacggtacatttgggagacattttgtaatttttggcatttttctaattttttttctttttgcacacggtgggagatcttttttgttttgcattgatctgtgttggtggcgctgtagtgctcctcaacaatttatgtcagtttcactaaaagaaaaaaggaagaaaaaaaaagaggtggggcaagatttgatctattctcttctccctttattttcttaaagaaagttcattttagtcagtggaagtattcagttgtgttatttaaatgttttctgtgaactgtgaactatggtgagagcagacatgtcgtcacaaccagccgagggaacatcagggacaggcatgcagtttgcagttgttttatctgatctgatttatcatctctatatcagaattattcagtaataagctgtcgatttatccttttagtaacattttgcattttccttatattacaaaattatatgtgttagtgtattttcaatttaaccaaatgtctgagttttagttccttcaacattgtaaaagttgaatttcattttgaacctagggatttcttaaataactattctaagtttctcctgaggtttttctaataagtagtcatataataattcccacattattgtttgtttcattttgaaatgatacttcaactgaattacagatagtcttgttttaaaaataacaaatattttggaataagataattttttaagaatatgtgcacaattgcttttggctttaaaaattttgatgttcacatatctaaatgcaggattatatcttttccatctttgttcttattgagttatctgattagagaatgtgggatttaggcccaaagcctcccaagaacaaaaatgtgttacgatctgacataggttttactggtctctgtaaacattttagctgtttatggagatagtaagtgtgcccttagttcaaaaagaaagtgggacgaatcagtaattgaaccctaaagcgtattttttttggtcacataaaataaaaacaactgaaatagtacactagaccacttttccataagattgaagagattattttttgaaagagtgaacatttcaagaattattatttagcgtgtttacccactttgaaatacgtaaatgctcatttcactttttaatcatttaacaggttgaagtaaaaggatgtgtgaaaatggctaaaaatagtatttctgatttttgtgtctctatactctatctatatatccctttccttgaacttcaaaaataattatgtattagcccatattttgtttatactatgccataaaaatgtgaaaatgttcactgtaacattttagctattcataaaatgtaaatgccccatcaaggctagtttttgacattatagattatttatagaatgaaatactgcaggtgtaaatatattatctaaccctctggttatgctggagagtttagttctctgaagttgatctaccaaataaaatatactttccaacacatgtattgctaaaatagtctgctattcagaatggcgataatttttattttatttaatctctgaaaactaaacatgtgtatataaggtagcccccttttaaaaacaaactgatgctctgaagtccatatggagctatgcaatgctctttgttctcctacatcattgactattacatcattgattatgaagtaactattatagttaaatcttcacttttaaaaatccttcatatatatttatatgactgataacattttatatatgactcttacatcactaagtatttaaggaggttgaaatctatgaggcaaaaacagttcactattttatattattctccattttaaaatccaccttgagcttcattttagctcttgattccttgaacattattttttttaattgataacatttttatagaaatgtagttcatgagcttggtgtgattgtgattagaattataacaaatttttggattaaaaacctttatttattaaatttagcagatagagaactaactcagtctttcatggtaacagttgctagatcatggacaataaaaaattattttaaaaaattcccaaaatgtcattttagtcaacagttacacacttatttctttcttgaacaccattttatcagataatagcaagtagcaaaatttactatattgtcatatcatttttctcatcctgcccatccctctgatggagggaggggctaatgagtagtgaaattaccaaaaaacaggttgcagaaagcagaaagaaataatgccaaagacatggagaatctgtaaatcaaattagaaacaataaacctcagaaaaatgaacttgaaattaaggagctcaatcaataacaaataaactgaaaattatattaagacaatgtaatgaaccaacacaatttcctaatttattaacttgcattcattagtattgttaaagactgaggaagtttcaggttagccaaactcattagatgataggtaatggtagggtaaggtaacaaagggaagaaagatttagagatgttaaggtgaccaaacataaaatgctaaaaatattagccagggctaatctaatctaccttggaatgaacttttttaaaagaagaaaatataaaataaaattctatcctgtgaaatcacgcacaatatagacctgaaattgtctgtttccaattctacccacttctcatgcatatttacctctgttatttgctagatgtgttactactttccataagacgatacagatacaccactgtcctcctcagcatggttttgcaaaagaaaacaagaggaaaatgatacacaaaatgtgtgtttgtgttatgactttgtttttgatctttccaaaatgattatcaaatggagaatctaaagggaaagtaaagcagatgtataattttataaatatttttatgaaaaagataaaagcagattttataattgatttgttcaacatttgtttctatttttattcgggggtttgtttattctagatcttcccccatctattatgtatcattctgataagatgctatgatgcaatattaagcaaaagaggcaaggattcctgctgtaatggagtctacactccaatgtggttagagttctaaagatactttaaatctaaggtcttagatgtgtgagattcccaaatgaaggccaaataatatttttagaaaaaaaatatttttttaatttagatctgtttaaataggatttgacaagtgttcttccattgaaggaccatgattcgggcatcaagtactcacatattggggttgggagaggatgtagcccttaagctttagatataacccaaatagatgctacagatggttgcctaatacaaattcctattgcaaaatgagaaatgaaactttgatttattggctagagaaaagagatgaagagaggatcactctggtagcaggagttttgggcatgtccctctgagatccatttgatgaaaacattttttaaaacatggtagggcctcattttgcacattttgttcacggtgtcatcaaataaacatcatggtaaatataaactgtgaagatgaagcagggaaataaaattagtattgaagtattatattagaactaaaatttttattttagaaccttctgtaataatttctaatggtatatataacagaaattttaaaaataaaaacatattttaatttatgagaataatataattcaacacttagctaatggttaattagttaaacatatcaggtatggagcaggaaagtaagactgatgttatttctatacagatgaattggaggagaaggaactatttattaaggaatctctatgtgggttaagatgatctcaggaataaagttaccagattattgtgtcatacagccaattaatctatagtagctaggtgtgttatattatttagtttgctttcatactaacatagaaccctactgatagtggcataaaaaataaggacattagtttttcaactaaatatgtaatcaggtggcaagtgagttctaggtttggttcaatagtgagttttagatttggttcaacaatgttattaagatactttaaccttttacgttgccataacatcagcaatgtctttcctcatagtcacaaagtggctgctgcagacccaggcatcatatcctaatattaaaatatccaaagtgaggagagttactcttattcatcttgttgtaaaggaagaaatcctttctcagaagccccatagcacagtgtttcttagagctcattggccaggtttgtaggacgtgcttatacctaaaccagtcactgacaaggggactgaaattaccaggattggtttaactaggcaagatgtttagaagggtgaacatctgctgaatatttagagctcaataaggttagcacttaattgctttatgtaaacttgaactgttttgtataaacattcttgagtgattaaaacattagtatctgttttctcagtggccagatatgtcacttgtgggctaattttaaaaataacaaaaacaacatttgattagagcttactatgttccagcctgcagcctaaatgctacctctatctccttaaatcttcacacaaaattaggaaatagggcaatcattatacccattttgcagccaaggaaactgaggcatagagaggtttataccccagacacttggcccatgttacacagaaatgaaaaagctagagtttgaacttgggaagtctgaaatcagaggctgtgtacttacctccttttctttactatcacatgagatatttgtaaaattggtgttctctaacttttattttattctattttatttaaaccgagtttcgctcttgtcacccaggctaaagtgcaatggcacaatctcagctcattgcaacctccgcctcccgggttcaagcaattctcctgcctcagcctcccaagtagctgggattacaggcgcccgccaccacacccagctaattttttttgtatttttagtagagatgggattttgccatgttggccaggctagtctcgaactcctgatctcaggtgatccacccgcctcggctgccaaagtgctgggattacaggcatgggccaccgcgcccggcctgacttatcttttaaatgtgctctatgatattgctgttgaatcttctggttaatttattactttgtaaatctaacagtgttttcctagaatgagtaatcggccttctgatttatcagtcatatacagatgaaattttgtatgtcgaatttgcttctgatacatttgtacttgtactttacctcctctcttcaggaacatctcatgaaattctttcagacaaatttttacagggaaaagaagatcaaagcctagagattcagtgaggccttattgaagggggtaaattcatgattcataacattaggtccagatggaatattggcatccatttcgcaatatgtaaggccaatggtatgtactgaaatgtttcagtctttataactttggcatatatggaagctttcacctgtgggacattttgcggggttttgttgtactctagatcagtggattgcaaactttggtgtgccctagaatcacctggagggcttattgaaacacagattcccaggcccccaccacaagagttacaggttcagctggcctgtggtggggcatgagaattttcatttcttagttcccagatgatgagatgctgttggtccaggcagcaacatttgagaacactgctctagagtatcagaggctgtctgccatgataagtattttggctttgaaatatggattgcaaactttgaaagggtgtcatttaatttttggcaaaaggaattaatatatacatatttcaatattaaataggatgttcagggtaggctgattgaaaaggtgagagttgagcaaagacttgaaggaggaatctttttgttttattttttgagatggagtctccctctgctgcccagtctgaagtgcagtggctcgatcttggctcactgcaaactccgcctcctggtttcaagcaattctcctgcctcagcctccccgagtagctgggactactgcaccaccccacccagctaatttttgtgtgtgtgtatttttagtagagatgaggtttcaccatgttggccaggctggtctcgaactcttgacctcaggtgatccacccgcctcggcctcccaaagtgctgggattacaggggtgagccaccgcgcctggccatggaggattctccttatgctttagcattaatatcacgtttaaaatttatttgccaacgagtcattaatgtgtgtatttttacctttttaaaatagcacgcatactttacaagtgatttttttaaagtaggtaaaagtagagtttagttttgctcaatatcaaggtccatctgtgaaagacctgaatctgtgtcattttgctgtttttctcaagattttattccaccaaccaccaatgccacatattcactagtaggacatagtatccatgagactgagaaagggaagctgccatgccaatgacctatatttagctctgaaactcaggccactgctccaatccactggaaactctccatcctccaagatagaggtcacaatccccagttgaaaaacactgcaacatgccaaagaatgaagaggaccatttccaagagtttaattgctttgcggttccattattaagttatgagacttcagaaatttttagttctgaaggtgttcattcatttgtcaagaaacaaattgccaacctaaatgagggaggaaaaaaccagcaaattccatgtcctttctatcctcagaagccattataagcttcaagccatccttccataccattggaggtcttctcaagaagctggtatgaagtatcctgaagaggcataagcaatgagtttgggctagtgtggtctagaatcaaaaagagtcattcagcatctatttaatagtagactcagatcatttaaaattgcctaaaactccagaactgtgctgtccaatacggtactcactagtaacatgtggctatttgaattaacttaaatttgaattagcttaaattttaaagttcattttcccagtcacactatccacatttcaagtggtccatagctacacccagctagtagctaccatatcggacagcacagatttatggcacatttccatgactgcccaaagctctattgaacagccctggtctagaatgattctgggtccttcagatcatgagaggctcacactcgtgcaccactggttctcaactctgcctgtatggagaatcacccagaaacttaaaagcaaaatgtctatgccctaccctaaaaagttttggtttagttggactggatgggatctggaaataaatatttcccaaaagttgtccatgggatcctagcagtcagggttgagaattgctaagttatagagacaggcttacggctattgaagcaacccactaaaccaaaaatttgggggaggtttttgtagactagccaggctacttctcatctccatctttcaaaacctactatccatctcctaggaggtgagggaggcccagacctacataaagattaatgacagtgaaaccagttctgtggagtgaagcaaaaaattgactgcctaatgaacacaaacttttgctggaagaaaaccagccctgtaactcctcttcagttatgagttatttgatgcccttcagagtgggtcttatatattgaaaggctattcagaagttaattccagtttttaaaatatatataaaaagtttttagcttatatattcaaagtagtagttctccattatgctttaaaatttagtatacaaatcttatcatattcataaatcttgcaaattttagaaatcatgatcctttaaataatatctggtcttatctgtagcatgacttaattaaacacctcccaactttttacactgaatttataaatttagtacatataattgccttctttagtactttgtaacattttcaagaagctaaaatcttacagatctaataatttaacttctaaacatggtaactcttaagtttgctctaatgtttcaataatacacataaacttagtaagaattctgcttaaaagtctaataggctgacctcttactccattaggtcaagtgttcttaaatagtgcaattacttacactacaaaaaaatgcagtactttcgacagcacattctaaatctttctggagttaaaatatgcttacctgttaaaagaaccgttatgacctacccaaacaatttggggtgttgtcttcccaagtaaattttttggtctgccttcttagcttgttcaaattttttgacgaacagtggttttggttggaacacaactagatccttgtttgagacactgatggggtgtactgagccttatttatatttactgtattttttattttaaaaaaaggtattctgaaggcctacttgtcttagatattgagtcgtatcatttcttattttcaagtcatgttagaatctatggctacatcaattgaaaaatacctggattttgcacttcctaaccttttagaatatgtagctgtcttttatatctaaatctaaatacctttgaatttggcagaatgtcatattctttcacattgtctcgtagaacaatcaactcttccagatatttctgatccttgactgactgaatttctctcatggctttgtctggctatgtggtcacaatttccaatgttattctattgacaaggttttttagcttccagaatagctgaccagaagcctctccatccacatttctattgcagacattaggagaacacttgaagtacacggctttgtctgatctgttcagagttcctaactttgccctttactaccaattgtccagaccctcagtttcttcttctatcaaacaaagtaatattacttaatctcacatggctgttgagagaacacaatgagtttgtgcatctaaagtgccttgaatagcgctagacttgccataagtactcaagatgtactctaagttctgtatttcttagacaaacctgatttcagagatcaaaataggccttacacagtgcgacgcgaatttaaaagattaccgcattcaggtgtatggattttgcagtattaaagatgctgcctggaataggtcattatcttctccaagtactctgttaagtcaatgagtcacatagagtataaggtttattatctgcttttctttcattaaataaatctttattgaatttctactacattaaaaaaccaaaccaaaacaaaacaaacaaaaaaaacacttccctgagccataaaggaaaaggtagttttgactggaaccttgaaggatgggtaaactttcagcagataaagattgagagaagaccttccaggtagagaaagcagtgtgggcacaggcaaagatggaagaacacacgtggctgtgggaaacacagctagaagccagtgcggatagagagtaggctatgatgtgcagaggttagacactgggagagacaggtccatgagagtagcttggactaacacagggagggtttggaatcccaagctggggaacctagaaatcaggcattgcccacagagcaccagttcaaatgcttgcgtcaattgccagaaaatgatgaagggataaataaagagagaactacttctttcttttatttgtctgttaacccattggcattgtggagggaaactccaacagtctgggtctcttgccaggtaagttttgatggcggagtaaagagaagtagaaaaggttggaagtttgggacaattttcagtaagtgtggacactggacagcagggggcagcataagggcaccaaaaagttgaaagacgcagaagacattcgcttatgtaacatttcctgacaattatgagtttacatttataaggctacttatattagtaacttagcattcttctcccaaaaatgaacagaaaatgacagagaaaagacgaaagaaaaataacaattgcactgtgttaggctggctaacagcagaatggcactgctgtttatttgagaggatagaaacaggcagttgtctgcttattatttcctttcaaataaatacaaactcagaattcaatacaaatgtgtacatttcaattggaaaacacacctttatatgactttacgattttgcatttttaaaaatacatttgttcagctatactgtattcacaagtttccctagtgaaaaagtggggaaacttgaaaaaatatatcatttaaaaagaattgaaagtttaatatacatgttattttatatgccaatatatggaattttaaattttgagttgttatgattatgaaattttctggacttttaaattaaaattttttctttatgtctaaaattcaaaattatctacattacatttaatcagatttttctagtgaaattcatctcttactagcctttttaaaagtttcttcagctattgttttaaaaaagtttggggccggggacggtggctcatgccagtctttacattaataagaatagcgaaaggctgggtgtggtggcttatgccagtaatcccagcactttgggaggccgaggtgggcagatcacttgaggtcaggagttcgagaccagcctggccaacatggcaatacctctactaaaaatacaaaaattagccaggtgtggtggctggcgcctgtaatcccagctattcaggaggctgaggcaggagaatcgcttgaacccagcagctggaggttgcagtgagccaagattgtgccactgcactcaagcctggacaacagagcaagactctttctcaaaaaattaaaaatacatacatacatacatacatacgtacatagtttggatggttagtgatgttaagagtggaaaactggaaatttccacgtagatttttttttagctctggaatttgccatggcaaaggctacattatactcacctgcaatctctccatccaacttgtgaggaagatggtagcacactgcttcataccctcacacttaaggagaaacctctctgtctgtgttccttcatgattctttcaatgcctgtcacacgttttgaaggctgtgatcactgtgtgggttgcactctgtgtgctgctttttgttctgtcattttgcttttttatatatacctctttacatgtattgatataatacctcatatttatcactataaatggccaaaaaaaattgatggcagactattcttatgattattgaatactgatttccaattttaataaggaaaatctgaaacaatgaataaatttggggcttaagctggttagcattaaacttcattcttcaatatcataattgaaaataaagtactctgtaaggtaacttcatgaaaaattacctatttttttattttaatcatttgtaaatctgggcatataaagatatcaagttatttaaaatgttacctttcaaactagagtttacaagcagggtgtgcctgcttgtgtttataggaagtaagttcactaacggcaagagcaacattttcttttatatttcccctggcttatagtacaatgcttttgcacagaggtggggcccaataaacaaaacaaggttaggaaaacttattaaagcatcatatgaaacataaacatgttttgtaatgtagatttaaaagtactcgtggtcgttgttgttgttgtttttagcctgagtttcgcttttgttgcccaggctggagtgctgtggcatggtctcggctcactgcaacctcctcttcccgggttcaagcgattctcctgcctcagcctcccaagtagctgggattacaggcacgcgccaccatgccatgttaattgtgtatttttagtagagacggggtttcaccatgttggccaggctggtctcgaactcctgacctcaggtgatccacccatctcggccccccaaagcgctgggattacatgtttgagccattgcacctgtccttttttttttttttttttttttttttttttttgtgagacggagctctctctgttgcccaggttggagtgcagtggcgtgatctcggctcagtgcaacctctgcctcccgggttcaagcgattctcctgcctcggccccccaaatagcagagattacaggtgcaccactatgcccagccagttttttcttttttgaattttagtagagacaggggtttcaccatgttggccaggctggtctggaactcctgacctcaaatgattcacctgcctcagcctcccaaagtgctaggattacatgcatgaaccacgtccccggcctaaatgtactcttcatatttccatcatatgtttcaaattgtgaaagtggttagagtgcgactgttattgttcttgttgttgttgttggtatttttctcagtgcctaaataagactgtgctaattattttcttacatagaaattctcctcactttctagtgaaactatcagactaattgcagatcttttattactagatggttattttgatctgctttagcctttatgctaaagtttgcatcttttcatattaattctgagtccttgttatctagttttagtgacatttataaacaacactgattcctcaaatcacatttgagcacacttaaggcagagttacttctactaaccatcctgtaagaccattttgtttaagcgtcaagtgtcaccaattactaactaataggccataacctctctgactcagggattgaagttacgttccctagggcatgtcttccagaactttttctcttatacttctcttagtgctttctttactatgtaaaccaggggtatccaatcttttggcttccctgggccacattggaagaagcagaatcctcttgggccaaaaaatatacaaacgatagccgatgagctaaaaaaaaaaaaaaaaaaatcatgaaaaaattctcgtaatattttaagaaagcttatgaatttgtgctgggctgcattcaaagctgtcctgggctgcgtgtgtcccacaggccacaggttggaaggttgcaggttggacgagcttgataaatatatagttagaaaataccaaaggcatagtttctttagaaatcacatgtctcaaagtaaattatcttttcttggctttttacatttaaaaaatttcatgtattccctattttctataaactacaaaaaataaaaataaaaacaataataaaatttgagagttgaaagagttgggaagggtcgagtctcactccttcttttcaaagttgaggagatggaagcccagggatattaacatcaagaccattcaactaggtggtggcagagccaggattgaaacttacattctttaaaataaaagcttgcaaataactttgtaatacagttaaggtaacctagcatgggttaatttttaattcattgatgactctaattataaaaatgtcacatggcttaaaaaaatttttgctttttaaaaataccctgagtaaccaacatgatggggctgggcacaatagctcatgcctgtaagcccagcactttgggaggctgaggcgggcagatcacctgaggacaagagttcgagaccggcctggccaacatggtctctactaaaatacaaaatctactaaaagtctctactaaaaatacaaaaattagccggtgtggtggtgggcacctgtaatcctatctacttgggaggctaagacaggagaatcacttgaacccgggacacagaggttgcagtgagccgagatcacgccattgcactccagcctgggtgacaagagtgaaactccatctaaaaaaaaaaaaaaaaaaaaaaaaaaaaaatgccaacatgatggacacgatactattataaaattagactttttctctgtacataaaattgttttgttttttattcccactgagaattaagaaaagagaatattttaagaaagaccattatacagaggatagttcaaaattcatgctgaagagctattgcttttcaagtagattgagcaagtttagctatttggaaaagcacagttatcggaacaactcaagaaaacaaaggcaaaaagagttctgttaagacagaagaaaggaaactatatattggaaatacacacaatagtgtcccctacaagcctggtgtaaagaagcgtatatatacatgtgtgtgcacactagtatttttgtgaattgaaagagaaaggatagagtttgagaatttatttaagaaggaacacttttttaaaaattcagaatagcatttctttcttttaaaggtctaggtttttagtatttttgttcaagggaaagaatgactgacagctagcataaacccagcttagcatttatgttaaaatgaaggtaattagaacctggctcaggatactcaggggcaactgactttccaccctacagtgaaaattattccttactctttcttcaagaaaaaatgggctgagcacggtagctcaagcttgcggtcccagtactttgggaggccaaggcaggcagatcctttgagcacgggagttcgagaccagcctgggcaacatggtgaaaatacaaaattttctctgcaaaaaaatataaagattagccaggtgtggtggcacatgcctgtagtcccaggtgctcaggaggctgaggtgggatgattgcctgagcctcagaggtcaaggttgcagtgagctgagattgtgccactgcactctagcccaggtgacagagtgaaaccctgtctctcaggtaataaagagttgtctccctcttcctgttacagatacttttactaatatagatttcctttatggatgtaaatttcttttacaaaagtgtagcagaaatacaggttcagtagctggctacttgcagagttcgcttaccaaggaggtatggtgtaaagaaggtgaatttttgttcctaaagctagcttaggagaagaagtacaggcttcctgccttaagggtactgcttcacttctgcagcagaaagcaggcacttttaaaagggggcctaacatgaatggcacatgggaggaagcaagcagatggggtatccatgtgttagtttggtgccttatctaccaggcagttgagttggcatcttcgtgggccaaaaactatccaggtgggagagagttttgtagcaggcatactgtattagtttgttcttgcattgccgtaaatacctgagactgcgtaatttataaagaaaagagatttaattggctcatgcttcagcacgctttatgggaggcacgatgctggcatctgctcggcttccggggaggccttaggaaacatagtcatggtggaaggtaaagtgggaatgagaactcttattgccagagcaggagcaagagagagacagggagcggggaggtgctactatgctttcaaacaaccagatctcatgaaaactcactcactatcatgagaacaacaccaagaggatggtgctaaatcattcatgagaaatccaccccctgatccaagcagctcccaccggaccccacctccaacattagggattacagttcaacatgagattttggcagggacacatatctaaactatatcacatgcttttgttaccagaaaggggtccccatccaggccccaagagagggctcttggatctcatgcaagaaaaaattcagggcaagaccataaagtgaaagtgagtttagaaagtaaaggaataaaagaatggctactccacacacagagcagccccgagggctgctgattgcccatttttatggttatttcttaagtatctgctaaaaatctccttattttagagcatatagggtaacttcctgatgttgccatggcatttgtaaactgtcctgatgctggtgggagtgtagcagaggtcactctcatcactatcttggttttgatggttttagccaacttctttactgcagcctgttttattggtaaggtctttatgacctgtatcttgtgctgacctcctatctcatcctgtgacttagaatgccttaactgtctgggaatgcagcccagtaggtctcagcctcattttacccagcccctattcaagatggagttgctctggttcaaacacctctgacatttggggctgtaaattgactattatctctcaaagcagtctcccgatgggtgagagtttcgctctgaagcttggaagcacatagatgaacttgccccatagggggtgtctggtgattgggggtgggtaaaaggttataattgcatttctaaatgactaagcaggaagtggggaacagggaaaatgcagaaaagagaaaagaagagaaaacagtaaactataatcgtaacttattctatttttcttagaaaaatgggggtattctgtaacaaaggatagcttttcggcgctactactatacctgcaacttctcagaataaccagctcaaatatgccaaagaaataaattttgggggtggcatattctggtctcccactgtcatattttggggtggtatgtcctgatccccaacacaatgcctgcacataggcgttacagaggaggaagctgacgctcatagaagttataaatctcattcatgtttacagagctagaaaaaagcagagctgagattcaaacccacatcatgtttgactccagagccagaccttttaaccactacacaacactatatctcttagcaatttgttttcctaaagctgttgacctaaaggaagaagctcaggcacaaatacaattttaagagtttacttaagccaaagtgaggatggctgcccagagcacacttttaagttgccttggagagtgctcccttggcctttgttacaagcatgtttttaaaggcaaaagagaataaggaacgggctgtttgacaggaattctcattgggttagagagaccacattgattactgattgtctatacttttttttttttttggagatggagtttcactctgtcgcccaggctggaatgcagtggcgcgatctcggctcactgcaaccttcgcctcctgggttcaagcaattctcctgcctcaacctcccaagtagctgggactacaggcgcaggccactgcgcctggctaagtttcgtatttttagtagagacggggtttcaccatgttagccaagctggtctcgaacttccggcctcaggtgatccacccaccttggcctcccaaagtgcagggattacaggcatgaaccacctgatacatgtgagatcaaatcctttctatagagtcctactgctggtaaatggtaaatactagattcagatccagatcagcaaatatggaaacccgtgttccttctggtacatcctgctgtgtctcactacactatgtggctgccttgaatgcaaactgttacttatcactggactgttttcacacacagcactcaccctgaggcaaacagtagcaacctgtgcaaagaggccttgaccccctgggagctagcttgaccagatttggagattgggcagccactgtgcaactaccagatgaaatcacttggcaatgaggaaaagaggcaacagggctccttgtagacatatacatgatacaaaactactaaatatacatagaaatgatacaaaactactgatacaacatatgaatgatacaaacctactaaatatacctaggaatgatacaaaattactaatgatacaaacataaatgatacaaaactactaatgatacaaacatatgaatgatacaaaactactaatgatacaaacatatgaatgatacaaaaactactaatgatacagacctgctactgatacaaacatgaatgatacaaaactactaatgatacaaacatacgaatgatacaaaagtatgaaatatacctacgaatgatacaaaattactgatacaaacataaatgatacaaaactactaatgataccaacataaatgatacaaaactactaatgatacaaacatatgaatgatacaaaactactaaatggaaacaaaacaaaaagacctcagaaggtgaatgtcctcttttaaataaattaattttatatagtatctttcaggtatttggcttcgtgtgagaatttcttttctctttccttagctaagagttttgaagcctttacaacacaatattatgttgtatactgtacatatgaaaaataaatctcagaagagtaaaatgatctattcaaaaaaatagggtaaaactatcattcaaaaaatagcttatgtttattaagcatgacgtttgtggcaagcccatgctatgctgttttcactgaatgcttgcaacaacctaggtaatagattctgttacaattcctattttatggatggggaaactacagctttcaatagcttaaattagtgtcaaaatcttttaattaaaattcagtgtattcattttactagagaaatttttggaaagaaatgtagctaaacatttctcgttaatttgttattaaaccatatatactatcaaagtgtagcaatctgctcaattctagtacctgccagaatttcatccaattttatatttaaatgtcttatattacacaatttttagcaggatgaaacattttaagacagtgataaggataatattttaaatttataagatctttatgccttttcaaagtttatttggcagacttgagtaattagatggataacttgattggaaaaacttctatttccttgaattgcctagaatgaaatttcctaaagtgtgcgcttatagagctaaaggtaataattaacagtgtacagaaaggggttctatggtcagagaactttggaaaatactgtgctaagcatcagtaaatgggtttcttttctgcaggacttccctgagcctatacatggtgagcctctacctatcttaaagaggaagatttaataagcagtatttccctaacttaccagttttatacagaattctttacataactctcatttcagaacatcagtattttatggagcctagtttttgaaaatgctaaactaatatctggaaagaaatactgatatttaaatcctaggtgcttgtcatctactcagacagatgatgaagcagctaaccttcatttgtgtagacttggcactatcattattcaaagaacagcagacattggttctgtgccttaaaccgtgaaaatttaaacccactttcttccccccccgcccccgcttttttttttttttttactccgttccccaggctggagtgcagtgacgcgatcacagtccactacagcctcaacctcctaggctcaagtgatcctcccacctcagcctcccaagtagctaggactacaggtgtgcaccaccacaccctggctaatttttgtattttttgtagagatggggtctcattatgttgcccaggcttgtctcaaactcctgggtgcaagtgatcctcctgcttcagccttgaaaagtgctgggtttaaaggtgtgagacaccacacccatcctaaacccactttttatttttattttaaaagtactattcagattatacgtgttctttataacaatgaaaagtcagtgcattctatactttaagagggtaattcttaagtaaattgttttacagatgctagataagtatctttgtcaaataatagtctcagaagagtatttaatgagatgggagcattctcaaattatactgagaagtagcctgggcgtgatggctcatgcctgtaatcccaccactttgggaggctgaggcgggtggatcacttgaggtcaggagttcgagactagcctggccaacatggtgaaaccttgtctccactaaaaatacaaaaattagctgggtaaggtggcaggcacctgtaatcccagctactcgggaggctgaggcaggagaatctcatgaatccgggaggtggaggttgcagtgagtggagatcatgccattacattccagcctggcaacagagtgagactctgtctaaaaaaaaaaaaaaaaaaaaaaatttattgagaaggccacaaaacagaataaactgtattatctctatattgtaaaaccagccaatgaaaagcaaaaacaaaaactaacaaatggggccaggcatggtgaatcacacctatgatcccagcactttagaaggctgaggcaggaggactgcttgaggtcaggagtgcaagatcagcctagccaacgtagcaagaccctgtctctagaaaacaattaaaaaattatccagacatggtggcacgcacctgtagtcccagctactgaaggctgaggcagaaggatcacttgaatccagaagtttgaggctgcagtgagccgtgatagcacaactgcactgcagcctgggccacaaagcaagatcctgtgtcaaaaccacaacaaaactaacaaacaaaaccagaaaagaccagaagaaacagaaacacaaagtgttaaccttattataaataaatcaattgaaacaaaaaatattatctcgttccaatatacatgctgctgcagtgcaactgtcttattttttgtcttatgcgtctcgtgtttgggaaaccaaattcagaagaaatcttaagatctggatgtggcttttacctgtgtcagtaattcatgtagagaagtcatgtaggtctttggtttccaagcttctacagctttaactctggaagatacgtcatgtactctgttctaacatgggaggcgctgaggatgatagctactctgtgtccctggctatgtcctgaagcttaactgatttttgacttcaaagtggtctcattcttgtgaacaagtacttaaacaatgattataggagggtactgggaaatcacttttttgggggctttggtaaatttttttatttttatttttttgatgcggagtctcgctccctcgcccaggctggagtgcagtggtgcgatctcagctcactgcaagctccgcctcccgggttcacgccattctcctgcctcagcctcccgagttgggactacaggtgcccaccaccacgcccagctaattttttgtatttttagtagagatggggtttcaccgtgttaggcaggatggtctcgatctcctgaccccgtgatccgcccgcctcggcctcccaaagtgctgggattacaggcgtgagccaccgcgcctggcggtaaatgtttaatcaacgtgcgcaggcaccactaggcctataacttccaattcacggctcagctcacagagtctattttcctcccacggtgtcctaaagaaaatgggtttactgtgacctcctcattctttttgattctcctcgttgatctcctccttgaaatgctgacctcatttggcttgtctccaggcttgtcccagcctctccctctgttcttgtcctgggtatcttctagatgttggtattccccagggctccattctctatgctcctctctcactccctgagtgagtcttcacaccaagaatcccactccatgggcttccagtcattcactttcccttccctgctctgaaagggaaggggaactagattcacagtgcttacctaagcaattggcacaatgttactcaaggtgtcatggagaagaataaatatagtgaaagataaaacattttatttcactaatcttaatttattagatgataattctgtaccccaagtttcagtaagaaaacagaatttccttcctcgtgttataaaagcaaaagcaattcatgatattttctctctcgaagcccttcctccctgacagtctttgtctaccacccactaataaattgtacttaaatgttccaacatatgtttctacttcattaacaatttttctctaaattttgttcctttgttccttcacccatcatgtaccatctgtaccatactgatttgtatgtgcattacttagtaaaactaatgcttaagtagtctatctactcaaaagtgtaaggcactggccaggtgcagtggcttacacctgtaatcccagcactttgggaggccaaagcaggcagatcacctgcggtctggagttcaagaccagcctggccaacatggtgaaaccttgtctctactaaaaatacaaaaattagctgggtgtggtggcgcacgcctgtagtcccagctactcgggaggctgaggcaggagaatggcttgaactcaggaggcggaggttgcagccaagatcatgccactgcactctagcctggtcaactctgtcccaaaaaaaaaaaaaaaaaaaaaaaaaaaaaaaaaaagggtaaggcactaaaggtagtgtgttctttgtttttgtctttctaccatttataaccttgcaccaatgcctggcctacacatagtaatctgtcagtatgtgccagtcaatggatttaatgggttgacagtaatttaacgtaatccagtttagataaataccaccaaatatttctaaaatgtatacagtttaatttgtacatttttctaagatagacttttattctgagaaattaattgttgggatgagacatggaagagactaccgaatagttcctctgctaaggagtaaattattatttttcaagttcagtttctcaacagtttcctgttcacgcatcccaccacttctccaactgcaactagtagtatcctccttaaaatgctgtcatagaggtatcaactgcttgccagcacagtgaggaaaagatcagatgatttacagcagtggtccccagtctttttggcaccagggactagtttcatgggagacaacttttctatggatccaggggagggagtgctccccctatgaggatgattcaagtgcattacatttattgtgcactttctttctattattattacattgtaatatataatgaaacagttctacaactcaccataatgtagaatcagtgggagccctgagcttgttttcctgcaactagacagtcctatgtggggacagtgatgggaggcagtgacagatcatcaggcattagattctcataaggaacatgcaacccagatccctcaatgtgcagctcagaataaggcttgaggtcctatgagaatctaatgccgggtgaagcttgggtggtaatgtgggcactagggattggctgtaaatacagatgaagctttgctggcttgcctgccacccacttctgtgctgtgtggccagttacacattacacatttacaataaatgtgtaaatcccaatacatttacacatttattgtgtaaatcctaaggttatagaaaacctaaaccttaggatttacacaataaatgtgtaaagacattctatttagattacatagaaaatctaaaatgtattgtgtgacatcttttttaaatcccaatactgctgcaactacaattctcagatagtcccatttgtttaaatcacgcattttctttcttttttttgaggcagagtctcactctgtcgcccaggctggagtgcagtggcacaatcttggctcacttcaagctccgcctcccgggtccacaccattctcctacctcagcctcccaagtagctgggattacaggcgcccaccaccatgcccagctaattttttgtattgaatcatgcatttttcatttcttttttgttgttgttgttaaacttcatattgaagataaagttaaactgaaataactttgagtccatcctgctactgtttgctaagattgataatttgccctttattctcttaaggtacagatatattgtttctaaatatattctgaatgattttattttatgtgaaaaatagttcttaaagattatgtacagacctccatgcacaaattactcagtaaggaaatcagtacttcagatattgtttctgtgacaccttagtaaatatattgaaaggcaactgtaatattttctttccaacatttcctagatgaaaaaaacaacatactataaagggcttccagtgtttgtttacctaaatgttatggtggaagaattgtttgcagtcatttctttatgtagcttattatgaaagtaaaaagcaggaagttaagagaaatgattagaaatgattacttcaagtgataatgtattcagtattcatacttttgcagaatgctttaaattattgcactacatcactttttaatgtagagatcattgtgcatttacatggtttaaagatattaatttcacattttcccaattaaatacaaatacagtacctcactttattattagtcccgtgaggatgtagagaccatatcttgtttattattgtttctccaacacaaactgtcttgccttagctcttagtaaacatttgataaatatttgttgaatgcttgaagaaatgaggaatccggactcctgctaccaaaaccagtattatgatttttaatcttgttgtcccatcaaagagagtttaactctttgcatcactgtccattctggctgtcattctttcctgcctggctcagaaaaagacagccctaaaattaacccatttaaatgattctttgcttttagtatacaaacatgcccacatctctcctactttcaaaaacaatgaaacccttgacttcaaatagctacccctttctctctctctttgcccttcattaccaaccctcttaaacatctctttcttcgattctagttcgcacttcacttcaatctgggactgcactctggaatcagataccagggatttctttttttgctttttttttttttttttgaaatggagttgtgctcttgttgcccaggttggagtgcaatggcgcgatcttggctcattgcaacctccgcctccttggttcaaggtatttttctgcctcagcctcctgagtagctgggattacaggcatgtgccaccacgcccagctaattttatatttttagtagagacagggtttctccgtgttggtcaggctagtcttgtactccccacctcaggtaatctgtccgcttcagcctcccaaagtgctgggattacaggtgtgagccactgtgtctggccagatagatactagggatactaagcactgcctcttatcagcttcctggccataagccagtcacacaacctctctaaacccaacaggaaatacctaacagggctgtcacgaaaattgagataatgcatttaaagtatttctgcatcacctagtacatactaggtgttccataaatggtagctattcttcctgttgactgaaagcataataggagctcagagatgagaaagactgggggaggcttattttgcatttacctaactgctcaccgatgcttcagattaggaaattagggcccagagagtttaagtagtcaatgtttcatgggggaggtgatatttgagctggattttgaagaataataacaatatcttacatctattgagggttcactgtgggccagggatgattctaagtgctttacatggtttgttttacttagtgtccaaaacattcctgtgaaataggatttcggtagacagtctgaggcaggacagggaggacagactgaaaagaatcaatacagctgggcggggcgcagtggctcactcctgtaatcccagcactttgggaggctgaggcgggtggatcacgaggtcaggagatcgagaccatcctggctaacacagtgaaaccccatctctactaaaaattaaaaaaaaaattagccgggcgtggtggcaggtgcctgtagtcccagctactcaggaggctgaggcagaagaatggcgtgaacctgggaggcggaggttgcagtgagccgagattgcgccactgcactccagcctgggcgacagagcgagactctgtttcaaaaaaaaaaaaaaaaaaaatcaatatggctgggcacgatggttcatgcctgtcatcccagcactttgggaggacgaggtgggtggatcacctgagatcaggagtttgagaccagcctggccaacatatggtgaaaccctgtccttactaaaaaaaatacaaaaattagccgggcgtgatggcgcacacttgtaatcccagctacttgtgaagctgaggtaggagaatcacttgaacccgggaggtggaggttgcagtgagccgagatcacgccactgcactccagcctgggcaacagagcaagactccatctctcaaaataaaataaataaataaataaataatcaaaagaatgaataaaaacctggaggcaggaaagacacgctgattttttttctttttttaagatggagtttcgctcttattgcccagcccggagtgcaatggtgcaatctcggctcactgcaacctccacctcccgggttaaagcgattctcctgcctcagcctcctgagtagctgggattacaggcgtgcaccaccatgcctggctaattttttgtatttttagtagagatagggtttcatcatgttggccaggctggtcgtgaactcctgacctcaggtgatccactctcctcggcctcccaaagtactgggattacaggcatgagccaccgcacccagccgacatgctgatttctgaagatggtgatgagactgctagctagagtgaaaagcttgtcttaagcaataatgacaaacgatgttggacagagtggggcaaaattacaggaggtcttgacaaccaaacactcgaaaatttggctttatctaatgggcaaaacaagagcagttataaagatatgacttggggaagggaagatacagaatgaagtacagtttttggcacactgacttggtgacatgcattgtgaggccccagggacccagagcctctgcttccacttttggttaccactagccaccaacagaagagtaccagcacagtttcctataaagtgagggctttaaaaaggtttattgagggaatgagtaaataaaggatggactgaataaataaaggatgaatgggaggctgtttctaggggtgaagtgatcagagttgggactatgtttaagacaatggaaatggaaattgggaagtaaatcccagaaacaatttcaaagaagaaatcataagacttggatacataccgaacataaactactatttagagctgtatttcaaatgtattagttaccacagaatgcagtgtcagagcagttgcctttggcatattctaagtttttgttaagtagaaattctgtatttggaacagaaatcacatttcttgtgctattatatgtaatgattattaccatgaaaactcatgtctctttactttctactcctactccatccacccaagttcttaccagttttatctcctaattggcttgttgttggagtctcctactgaactccggccaaataaacctcctcatcctcaatcatacctgacagttgccgcctctcacccttttgttcatacagttgcgttcccccatgaatgttctttcttctataatagcatttcattcccatgagcagttgaaaccttagccatccttcagaatcagatcgcatgctgcttctccatgctgtctgatcaacccagatgggacctactgctctcttttctgaactcccatagccactgcatttcattatactgccttgccacttgggcaactgggtatccatttaccagtgttttatttgtatcccctacaatgacagtactgtgtgttacctggttatccaatacatatttgtgacatcaaactatcttaaatactccaaatcctttcccaaacaagagtttccctctgccgttagggtattcacctttgccctagcatacattgtttgcaacatcgagaatttcacatcacttttgttggggatacttagaaaaagaaggaattttaagttgagaacagaaaagaatttttaaagtgaaagtacaggattaaccattttttcaaggaatctttcggacagataaaagaatctagggaaaactaaacctgaatctttactgctgccttcctgtcccttaaggtgaagaaaagtgaactgcataaaaaagaggcatgggtccgaacgcagtggctcacacctgtaatcccagcactttgggaggccgaggtgggaggactgcttgaggtcaggagctcaggagcagcctgggcaacagagggaggccctgtctttagaaaaaatttagaaattagcagggtatggtggcatgtacctttagtcccagctactgatggctgaggcaggaggatcacttgagcccaggagttcaagcctgcagtaagccatgatcacaacactgaactcaggcctgggagatagagacactgtctctaaaaaacaaaaatttcaaaaaagggtttttttgtttgtttgtttgttttaattttataaaagaggcttgggactccagcctttgagtccttgggaacccagaaggacctgagagttggaaatccacagcattgaggagacggataaaggaatgatgagaaaaaggtgtctcttagcaggcatataatattatctgccaaaaggcaagtgaatctgtaagcttatctgtgaatttgccacggagggtgattttagactctctagagaataagaaatttttttgtactccacccattattactaatgtaggatgtggaaatagttattttgttgtttactgttattttaatgagggtagaaataattcatttccttggttcactcttgacttactctattttgttcttaaaatcttaggctcctcaattatgaattctactgctaggactttcaggaacctaatgttgtaggctggagagggctgtcagaataatattcagccagtattttcggaactgttaaacctggctaaacaggtgtcattccacagtgaagttggcaattcttgaggctcccagaaagtgactgctatctaatgactcagcttgtggatacgtcgctaccgttgtcttaagatacctttcttcccttcatttttactttttttgcaaagttaacccacacttatcctacataattttactcagatatcatctcttccaaaaagtcttcccttgctacttcattagaactactctcctgggttgggcgccactcttgccccttcccacagtggcctgggcttccaccataacacttagctcgccgtgtggcagttgccattcgcgggtccttctccccactgtgtaagctcctccaggagccctgtgggtgccaagctgacttggaaggctatgagggctcaatacacaccctcaatactcattgaatgaataaaggcacggtctctgtgtaggaaatgcaggtgaacgtccttatgcctcacttaagtgagctgccaatatcggagtttaagtataattttggagaactgcaatccgtcctgttttctccctaccccgcgggagctggctaaaccagcctggaggctagcagtttgcctgtgtgccctaagctagtgacagctcatatcaagcccagtatttaaggagcgtgattacttttactacgtagttcccagggagaaaagcaactcaaaacatttttgtatctttttgtatcttgttgcacaagatacaaaattgtgcactaagatacaaattgaaactcgaattgaaatttggctgccaatttattaaacccaccccaacaatcttccctattaacaacaacaacaacgaagagatctcaggatacccattttcatgtgtaatataaaccgatgccacccatctatcatatccatctaaatctaataattcagctttttgtttggcgggagtacgacaggtctttatatgattcaatgttacaaagtttttcagaggacaaatgatgaaagtgtgaacccacggctatgatgaagccgcagtctctttgagtacagaatcatgagctagatataaagaactggctttaaattctgaagtagatcttgcttttaaatgttatagtggtgggtaataatttcctttgcttcagttactatttaaaaagtaaatatgtgtagatgaaaatgcaggatttaaaaaaatctactttgtagaataggatacctatcatttatattaagcccaatgcgtgggaaacggatcaatgacttgatgcggtgcctataaaacattataatccaaagttgcattaggacataaaaataactgctgataaaagtttactcaaagtagcatctgcccctaattcagtttgtatttttatcgtaaagacctaaggcgccgcgggaactaggctgtgcgttcgccccccgcggcagacggcggcgcgcggcgcctctggagcgcccctccgaagccccgtgggggcggccgtggccccggggcagccgctggcgagcaccccagaggtccgagccctccgagccccaggtgcccggggcccgagccccgcctgccactctccccagctgcctttccaaacggcggcgtgctggtggagagagttttcccgcaccttgttcgcccgtcagaaagcggcgccgggagggagcgagcgtgagaaagtgagcgtgtgcgctgcaggagagcacgacccaagagccggcgcccggtgtccgagcgcccagtccgccctgtccgcccccggacccgcgaagggcgggggcccggagcagcgaggcgcgggaagcgaggccggcgggtgccgggggttggcgggacgcgcgcttcgtgccggcgccggcctcgagcccgcgctccctccccccgcccgcgtgcccgcgccgctgcgcgatgcagtgtggggaatggctggggttggctgaagagcgcacagtggagttttaatgtccgccatgttggccatggcgtattgaagagagcgagcgagagaggagcggagcggcacagcctcccaccctcccggctggtgttagtgcccggacggcgggctctgcgctccgcccctcaagtccccggcagcggttggcgagtggggaccgaacccccggttctccatgatcccgctggccggggccgtttccccagagcggagaggtatctgctgcgcctgagatgagtaaactgtcgtttcgggcgcgggcgctagacgcctcgaagccgctgccggttttccgctgtgaggatctgcccgacctgcacgaatacgcctcgataaacagggccgtgccgcagatgcccaccggaatggagaaggaagaggagtcggtacgtgttaactcccctgtccgacccaccgtcaggcccgctccctctgctgcctgcggcggcggcggagcagcaaacccacacaaaatggccgccatcttctcttcgccgccgactctcagtcgccggccgggcctataccccgcctcccccagcctcgacccccggccgccgcggcccagcggggccccttctaaggccacccgctgaccctggccacttgtacccgggtcccgcggagttcgggggcccgaaaggcacaaaggggtcacgtgacgaagctgccggcagccattttgtgtcttagttcttgggttgggccttgtgcatccggagaggggaacgggctgggtggctgtgggggtgcggcgagtcgggagccgtggaggacccgcctacaggcctctccgtgggccgctgggtggcgctccagggccactgcggcctgcgcgccgctgcccgggccgggagcgcaggttctgtgcacagtcggggaatttgattgccccatggtctgggaagcttgttgggctcagtgcagcccccacgtggagcctcagacgggcatgtcatgtcgcctgctgctctatgaggcttttctccccctctgcaaggaaatgtcgagggtgcagcgtgtttgcccggacgacttacttttctagaagataagacttactttcagtgtcctctttctgggacgtttgtatc

SEQ ID NO: 644 - DNA, 32744 bp, Homo sapiens
  source 1..32744: mol_type = other DNA
tcaggtgacgcgagacccagccggaagtgaaggaaaaagcgcttcagcccgcggcgcctgcgcagaacgctccagacgctgagaggcaggaggcactagggatcgtccgcaggattgggactgatacagaggccgccacggagcccgccggagccaccgttcctgctgctgccgccgctgcccgaatcggaaccgtcgggccgcagccgccggcaatgccgcgaaggaaggtgagaaacgggagaggagggatggcgggtttctaaggacagtcgattgagcaccgtgacgcagttggccacgcctcacagtgcttgggtcccaactttccgctcccccgaaccttgttcagctaccctctcttctgtccatacccaacagaaaaatgtgggcccgaccctggcctcggcctatgcttgcaactattcccgccctctgcttgcctggatcggaggcgttcttattaattggtcgctgaaacgtctggaagcatattgattggctggtgacgccgcctgtttgggctcaacggtcacctccccgcgtgcgggggcggtgtctggccccggccccagcgctctcccactggctggagagaacgatccctcctctcctgattggtcgaggttggcagtctgtcctgtgggggcgcggcttaggcggacctcgattgggtggcccgaatccccgcctttccgagcggggacgctgataggtgcagaggcggggttttggaggcctcgttaccttccaggtgaggggcacaacaaagcagaagactgggtggtgggaagccagcgcccactcgcaggggatccctctcaggccagttgcctctttccttatttgctagttcgacagcgcctagaaaatgcagttggtaaaaactaaaaacttctagaattagaaggcacttagaagatcacccaggaatggccccgtcgtttcttcttacagctgaactaacggaggcccatggagtgccgcaagccactcaggcagtggcagatccagaatatagaacaaatctaactcaattcaacaaatgtctattgactactttctgcgcggtggttgctgtggattcagaaattaattagatgtgatccctggcttaagggtgtcacagcccgataggagaaaacagacatgaataatcttagaaggatctagtaagttctcagcttggaggtgtatacaaggtgttgctggaaggaagtgaaggagcagttaagtctgccctggagtacaatgggagatatattggtaaaagccacagagaagagctgagttccaggatcaagccaggaaggaataagtctcacgtcaaggctttaaatatctcggtaattagactataatggtgacttttaagattcccccttcatttcagccgttttctgtgattcttgctcatttcctggcaggttacccttaagatacttggaaaactgggtggtattcttgctcatatcaatagaaatctttctcttcacagcggcttttcaggttgaaaatgtacactttttaatgtctcctaaaatgacctcagctggtgggtggtatgtatgtgtttttttgtttgtttgtttttgagacgaggttttgctcttgttgcccaggtcggagtgcgatggcgtgatgttggctcactgcaacctccgcctcccgggttcaagcgattctcctgcctcagtctctctagtagctgggattacaggcggattccatgacgcccagctaatttttgtatgtttaatagagacgggatttcaccatgttggtcagggtggtttcgaactcctgacctcaggtgatccacccgcctcggcctcccaaagtactgggattacaggcatgagccaccacgcccggccggtggtatgtatgtaaaggctcaccaaatgcaggaataatattggtgccttgaaatagggccacagtcctctttcttaatttcccaaataccgggagttacttgaaaatgtacatttttttagtaacctgtttggcggcaaacctgtcttaatctgtcctgaggctacttatggtttttgtgtgtctcatttagtgtgactgtttatattttttgctgcagaaatactattatgttttgttattgggtggtatttgcaggatacatgcaaagtactccccttctaaaaatccaaaacaattacaaattctaaacacaactggccctcagggttttgaataaataattgggacttacagtgtgaatctttgtattgttttcagtaaatattttttcctttctggttttgtaaagggtatagtgttagtgcttaattgataaaagttatctttatggctaagaaagaactcctcaggaggataataattgacaaatccttgctcattgaaaagatggttttgaaaacaactgtttttgaatacccatgagtcttcatgtgcaagctgcctttttggaagatagatggctttcatgtggagaaacgtcaaggatagatggcatacgcactaacaattttcatctttttctgcttaaattcttttgggattagagttgtggtccatgatattttgagatagtgtatggtttttaaaaaatgtgatagcttttcatggagacattgaacaaaagctactctaagttaaatgaggtccagcaccaacgattttctcactacagtggacctttttttgtgatattgatctccaaatggtcttggttaatacttagtactaatacagtaagaattaattctcttcatggccgggtgtggtggctcacgtctgtaatcccagcactttgggaggccaaggcgggtggatcacctgaggtcaggtgttcaagaccagcctggccaacatagtgaaaccccgtctctactaaaaatacaaaaattagctgggcatggtggcgggcgcctgtagtcccagctactcgggaggctgaggcaggagaatcacttgaacccgggaggcggaggttgcagtgagccacgattgcgcccttgcactccagcctgggcaatgagagcgaatgaaacggaagctcttcatttatttaacaaaattccctatttgtaggttgttccatttaagtgttctaaataaagtgaagttgcctgagggggtgggaggatgagaaatgcttgtggaatccttatttaggtttgaacttggggttttcagtgtcacagcttgttttattttcaatgttaatgcaaactctcagaccaaatgcttctgtgctaatatctggatctatggtattacagaggaatgcaggcagtagttcagatggaaccgaagattccgatttttctacagatctcgagcacacagacagttcagaaagtgatggcacatcccgacgatctgctcgagtcacccgctcctcagccaggctaagccagagttctcaaggtaaaaaaaccttcatttttccttaccactcctcacatctggctgactggcccatcacattattttcctagttaatgtggaaactggccccttggcttggtgtagatgacagtgcaccagatgattggtaaaatgtagagtgaatgcagagttgtcaggtctttaacaatgcctctgtggggggctactatccaatctgtagacccaaaggaactgcggatggtataatggatagagacacacgtatgtcttgagtcatttgtttgtttgtttgtttgtttttttagatcgcagtgtctccatcagtaaaattggaatgttatcccttcactttctgtttgaatgtttgaggcttagggacttgaagtccagatggtatctgatttatggtggcttgatttaatttttttttttaactttacagtggtgctaaaacaatatgcattcagtggaaacttttagaattttgaatttcggtcttttcctgggccagtgatatgtgggccaaatattttctcatgttgctgagtggtggcaatgagccataataactccagtcagtgagccgtaactcccagtcagccatttgatcatgagggtaaaccagtactcttcagtgtactgtctttaataaattatatgcaatattcaacactttattaaaaataggctttgtgttagatgattgtgcacaattgtaggctaatgtaagtggtttgagcctatttaaagtaggctaggctaagctatgatgctcggtaggttaggtgtatagcggttttttttattttctggagacagggtcttgtgctctgttgcacaggttggagtgcagtggtgtgatcttggctcactgcagccttgacctccttggctcaagtgatcctcccacctcagcctcctgagtagctgggactacaggtgcacgccaccatgcctagctagttttctttgttttttgtagagatgaggtcttattatgttgtctaggctggtctcaaactcctggactcaagcagtccttccaccttggcctcccaaagtactggggttatagatgtgagccaccatgttcagcctgtaaatgcatttttaacttataatactttcaacttatgatagttttattgagacttaaccccattacaagtcaaggagcatctgtagtctcttggacttactcttggcagaggcccacttctaaaaccatgtttaactctggaatgtaatccaataaacacttgatagatattaatagttgtaccaaaatatcagtgtggaaataatggaattttgctttggtaataaggaattgagaatcttggggttggaaggtagtttgaactatctctagtgcatttaggcatctggggttagatttggagggtacccttgaccctcctggctctgctctggtattccctgaggaggaaagaaggttgcagctaatacagaaagccgatgatcaacaggtgataatagatgaagggaaaaaaactttaacatgttttgagcacttcaacagtgttgctttggttaattttttttttttttttttttgagatggagtctagctctgttgccaggcggagtgcagtggcatgatcttggttcactgcaacttccgcctcctgggttcaagcaattctcctgcctcagcctgcaagtagctgggactacaggtgcacgccaccgtgcccagctaatttttgtatttttagtagagatggggtttcaccatgttggccaggatagtctcaatctcttgacctcatggtctgcctgccttggcctcccaaagtgcttggattataggcatgagccaccgcgccctgctgctttggtcacttttatatgagtatgttgcacaatgagagaaaaaccatcagtttttcaagcaagaaagtgggaatatcctctttaacaactgttcctaactttatttttgaatttaggatttcagctaaagtattgctattgtctcttgatttcttaagctttaaatttttaccacaatgagactatggataaatagctactataactcaagcagtatgttatgtactaggaaccatgatagaaaaatcatagttcctgtcctcaaagatcttacagttcagtgcaagatacagatatgaaaattgatcatgggaatacattatggcaagggctgtgagaggggtttgcatagagtactacataagcccagaggtgggacagccaacttagggcagcactcccacaatgatgaagtcttttttgttgttgttgagacagaatctcgctctgtcgcccaggctggagtgcagtggcatgatcttggttcactgcagcttccgcctcctgggttcaaggaattctcctgccccagcctcccaagtagctgggattacaggcgagcaccaccatacctggctattttttgtatttttagtagagacagggtttcaccgtgttgtccaggcttgtcttaaactcctgatctcaagtgatctgcccgcctcggcctcccaaagtgctgggattacaggcgtgagccgccgtgcccagctgcacactgagatgtcttaaaggctctgataggaatttacaagttgaaagatgggaatatgttattctcggcagatggaacagcatatgctaaggaaaagacataatgtttgtaggaagtataattgaccatgccctagacacctgaaaactaaatattcaaaacagctaggaaatgcgtaagcactgagtctctttctggttatcatacctcatgaccacagagttgcacaactccaggggtaccatttacaatgtcagcaatgtaaggtggtcctccctagagcacaaggtagatcatattgtgaaaggaggccccttggagatgtacaaatggataaccttgctctgtgctaacttttctcacccgaaagtttggaaattttcagttttcttctttagagaatctataagatttcttcagattttttttttttttaaatatacgttggggggtgcagccgtgagagagtgaggctgacaccgcgccctggcctgtgcatcccgccctctgaaaaaaaaattaattaattaaaataaaatatactttagagaggattttgactgttctcaccacaaagaaatgacaagtgtttgagatatggatatgctaattattttgatttcatcattacacaatgtatacgtctatcagaacatcacagtatactctataaatatgtacacttacatgtcaattaaaacaaaactaagactgctaggggcttacacggagggaattgagccagcatcaccacgatggtgttgttggagagtgagcagttcctgacggagctgaccagacttttccagaagtgctggacatcgggcagcatctatatcaccttgaagaagtatggtggtggaaccaaacccgttccaaagaaaggttctgtggagggctttgagccctcagacaagtgtctgttaagagctatcgatgggaaaaagaaggtcagcactgtggtgagctccaaccaagtgaataagtttcagatggcttattcaaacctaccgagtgctaacatggatgggctgaagaaaagggacaaaaagaacaaaagtaagaagaccaaagcagcagcacagtaaagggcacaaatttcctgctttcaccaattaaccactgaattgttattttttcctttggtttttacttttggccacatagctaggtttctggttcccctacactaggtgttttcacataagatgtagggtccttttgcaaagaatagttgcaatgtttatagggcagttgtggtaagaatctagtttattttacatttggctaattggtctgtactgcatggttatatactcctggattatagattaaaagtctctgtagtcatctctgtgaagagcaagctatgattaaacatgtctctttataaaaaaaaaagcacaaaaaaactaaaacatatctacatatattttttaaaaatgctttaatttcagctttgaattttccttcatttcctttgtcctcaggttggagatataaaagggctgctgagtgcctcagaataggtttttctatccaaaaaacttaaaatgctgcattcctgctttacctttatgaatctattatgacagtgccagagagggtaataagaaagaaaaaaaaatcggccccttaagaaaggaaatcgttttgtttgttgttatatctttggtaatagaatatctgttttatggtgggttagaaaaagggaagaatgagaggatgcagttaatatttataaagcactctgtaccacggatcatgttaagtgcttcacatgcattatctcacctattcctcaccacagtgttatgaggaatgtgctactagtattttccttttcaataggtcaggaaacaggcttggagaaaataacttgcccaagatgccacagctagttggtatggtggagtggagttgaatcaagttcagtcctaattccagaacctaaacttattaatgctgtactacattacatctgtatacctgagctaggctcttttgcttatattttatttaattaaatagatattttaaggatttgttggattttgtgaaatatgaagaggaggaggagcgatattctgataaattatatggataggaagtaaaacagatttccatcttttttctttattttcttttaaaattgggatcagattccagtcctgttcgaaatctgcagtcttttggcactgaggagcctgcttactctaccagaagagtgacccgtagtcagcagcagcctaccccagtgacaccgaaaaaataccctcttcggcagactcgttcatctggttcagaaactgagcaagtggttgatttttcagatagaggtgagtgggtatggtatgacttagacctattacagagcatctgggtgaaattctttttaaggagggcttggggccactgcaggtagatgcctaatacttcagctagatgaatgctgtttgcttgcttcctttcttatgtctttttttttttttttgagacggagtctcgctctattgcccaggctggagtgcagtggtgcaatcttggctcactgcaagctctgcctcccgggttcacgccattctcctgcctcagcctcctgagtagctgggactacaggcgcctgccaccacgccaggctaattttttgtatttttagtagagacggggtttcactgtgttagtcaggatggtctcgatctcctgacctcgtgatccacccgcctcagcctcccaaagtgctgggattacaggtataagccaccatgcccagcctcctttcttatacattgctgaggacagtttgatatcagaatattctcaaggtccagagtagctggagtatattaaatcgtacctgtaataggaaaaagagactgggcccttcttaaccacatttgaaaagggcttgaagcagacttttcttatagccatacttctcagtccatttatctccaaatttcttaatgcagaggtcacagactggtgaactacttctagctgtccgcatggttggttggtttgcttgcacagtgtttaaaattttttaaatttgttgctagtatttgaaaacacaatgatttcatataaaaacctggattaatagtttattttaaacaatgaaaagatctgggaacactgggcggccaatcacccatagtaataattggctggagttgaatagtagttgtcccctttagatggacaatgagctgtctctttggccttgctgagcccctgtaggcatttggtttgcaattcctgatttagagtctggaatttcaagattgaattgttagactacaaacaggctcactcaagactctaagtccattcacatcttacaccaagcctgttcagtgtcatccagaaagataatcactgtcacttatcttctgtcctgtgtatctcctggaagggaagtgggatagtaatgttttaaaaacgtatttccatctagttttgattatccatgattagcaactcaggagaaatacagataggtgtaatagatgaagtacaaatttaattttaatcagaatttaaagttgcacaaaatggatggtgtagaagtgcctcttcattttccatttagccatctagcagatgaatagctgaaagttactggttaaatcatagaaaaagaacctgggaagcccataaactctgaatagtaaacttctaaataaatgaactccactcataacttctaccaattgcttttgctttagaaactaaaaatacagctgatcatgatgagtcaccgcctcgaactccaactggaaatgcgccttcttctgagtctgacatagacatctccagccccaatgtatctcacgatgagagcattgccaaggacatgtccctgaaggactcaggcagtgatctctctcatcgccccaagcgccgtcgcttccatgaaagctacaacttcaatatgaagtgtcctacaccaggctgtaactctctaggtcagtgtgccctagcttcatgacatcctttgttctgtggttctctctcccaggatcatccagaaatgttttgtgttctgttgggatttagcttcttaggctcttcagtggtcatgtgctgagtgataatgagttgctcacttgaataaaagcatttatcttcttggccgatggtccataataatagatctggttgtaaggaaattaactatgatgagccattcagtttatcctagagcttttcccagtgaaaaattccctcattttcctagcaaaagcaaaaaagactatctgcagatatcttactgcatggcacatagctcgtactcagtgaggactagttaaggataaggtagtgcagaatagtggttgcacggccatagctgttaaggaaatgagaaaaacatttcctgtcaagaggctgtgaaattaggagtacacatgagaccctggccttctgtaactttagtagcttaggttccttgctttgtgtacttagtaagtatgaacaagataaaatatttcttctgtgataaataagtatcttattatattcttatgagttttaccccttagtgaattactttagagattcttgtggtttgaaccttatttgtgcaccttcagtgagctgaggtgcaaatattgggcttaaggttttgtctagagttggaagatgctgattgggaggtaaggggcctttcactactgggtctacttctcaaattcaccctttgcatgtggctatcaagtttgaaaaaccgtagaacagagtaaattgctgcttggcaggccaacagtacacttcctgtagtgtgttttgtttgtttgtttgtttttgagatggagtcttgctctattgcccaggctggagtgcagtggtgtgatctcggctcactgcaacctccgcctcccaggttcaagcgattctcctgcttcaacctcctgagtagttgggattacagatgcccacaaccacacctaacttttgtatttttagtagagatggggtttcgccatgttggtcaggctggtctcgaactcctgacctcatgatctgcacgccttggcctcccagagtgctgggattacaggcatgagccttttgtttgtttttatagagagacaggggtctcactttattgcccaggcagaggtgcagtggcatgatcatagctcactgcagccttaactcctaggcttaagtgatcctcccatctcagcctcccaagtagctgggactacaggcacgtggctttcaagcttggcttttttttttttttcttgttttttagtaatgaggtttttgctgtgttgttcaggttggtcttcaactcctgggctcaagcaatcctccccactcagcctgctgagtagctgggactacaagcgtgagccaccatgcccagtggttttctgtagtgtttaattaatttggattgtttcctggcctttttttttttttttttttgagactgagtctcgctctgtcccccaggctggagtgcagtggcgcgatctcggctcactgcaagctccgcctcccgggttcacaccattctcctgcctcagcctctcgagtagctgggactacaggcgcctgccaccatgcccggctaattttttatatttttagtagagatggggattcaccgtgttagccaggatggtctcgatctcctgacctcgtgatccgcccgccttggcctcccaaagtgctgggattacaggcatgagccaccacgcctggccatttcctggtcttacagcagtttctcagataatttcaaaccatcggaataaatacagcaaagttgtcttgaactccataccagttgtcactcgaagataattgtttcaggcctgcattgatttccttggaataaataatgagaaaaactaagaaagacaatatattacactagtagatgatatgatggctaatgtgctttaagagtttaaggggatctgcttgccatgcatcaagaaaaggaattttcctctgcttctgcttgttactaaccatgcattgctaaattgttaattttatgtactatatttggtcattcatgcagcaaatatttactgaatattggtcatgtgccagatactgttttaagttatgaggatgtagctatgaacaagtcaaagtctctgccctcatggagcttatagtctagctgagaaaggcaaatagatagacgtgtaatatatcaactggagataaatgctgtgaaggaaaatgaaactgggagtactgagggtaggatattgtgtgtgtatatacatacatatgtgtatgtatatgtgacatatatatgtagttggctaggaaaagctgctgtgatatggtcacatttgagcggagacttgctgttggaatatttgagaataagcattatgggtaaggagaacagcaagtgctctgggcaagagaatagttaaccagtttgaggaacacttagaggccaatatacctggggcagaatgaccagaacggagaggaggagataggtcagaatggggcctgattgtgttatttatgcccaggagttaacctcttaatggggtagaccatagggtaaataaaaaatatgttgtattagaggaaagtttacttgtatttgtttatttatttattttggagacagagtctcactctataattaccaggctggagtacagtggcgtggtcactcactgcaacttccgcctcccgggctcaagtgattctcatgcgtcagctgcctgagtagctggggattacaggcatgtgccaccacgcctggctaatttttgtattttttagtagagacagggctttgtcatgttggctaggctggtctcaaactcttgggctcaagtgaaaaagtttactttgactttggttttaatgtattggaactttgaaaaatatgaacccgagcttccaaagtatcctttttttttgaggcagagtctcactctgtcacctaggctggagtgcagtggtgcaatctcagctcactgcaacctccacctcccaggcttaattgatcctccaacctcagcctcccaagtagctgggactacaggcacatgccaccatgctcagctaatatttgtatttattgtagagacagggtttcaccatgttgcccaggctggtcttgaactcctgggctcaagtgaccctcccacctcagcctcccaaagtgttgggattacaggcgtgagccactgcaccgggccccaaaatattcttgaccctagtctattccttaagagttttatgtacttgtgaaaaattaaaactctataggaaagtttgaagtgcattaagtaaaaattgcccttaactcatacccgcagaactgtgccacagatacaaaacttctgtttgcagttttctatgaatgcttccaagaagtttttctacatatataagcacacgtatatgtacacatatttcctttttgtgattattcataaaacggaaaataggatacatttgttcgttgtacatcttggatatttgtatttagaggcttgtctttttaaaagatacagagaatttcattatattgatagtttataaattatttaaattgtctcattgacatttagattgtttctcatttttagcttttttgaacaatattgtaatgggtagccttgtatgtacatattttggtgtctttctagcaaatctgtaggataaattcagagcagtggaatttttaggtcaatagatcagctgttccttttttactgtagataatagattggttttatttaacatataaaagaaaacatgccctgaataaattactaagaagtatggatatgcctgggtgcggtggctcatgcatgtaatcccagtactttgggaggccgaggtgggcagatcacctgaggtcaggaattcgagaccaacctggccaagatggtgaaaccccatctctattaaaaatacaaaattagccaggcgtggtggcggcgcttgtaatcccagctactggggaggctgaggcaggagaattgcttgaaccttgggaggtggtggttgcagtgagctgagattggccattgcactccagcctgggcaacaaaaggagtgaaactccatctcaaaaaaaaaaaaaagacgtatggatacatagtatctgaaaagcaagtcttgcagtattaatgacattactttttttgagacagggtctctctgtcacctaggctggagtatggtggtgtgaccatgactcactgcagccttgacttcctgggcttaagtgatcctggcacctcagccttctgagtagccaggactacgggcatggactaccgtgcctggctaattatttttctttttgtagaaatggagtctcactatgtatgtcacccaggctggcctcaagctcttggaatcacatagtcctcctgtgttggcctcccaaagtgctgggattacaggtgtgagccactgagcccagctgatgctacattgtatgtatggtatttgatcagtgaggatggtttttcgtgttcaagataattttgcggacctctaaaattgcattttttttttttctgagacggaatcttgctctgttgcccaggctggagtgcaatgatgtgatcttggctcactatagcctctgcctcccaggttcaagcgatttgcctgcctcagcctcctgagtagctgggattacaggcatgcatcaccatgctggtctaatttttatatttttttaagtagagatggagtctcaccatgttggccaggctgacctcaggtgatctacctgcctcggcctcccaaagtgctaggattacaggtgtgagccaccgtgcctggccctaaaattgcatttttaaaatttatttattttattttatttttttgagatggagtctcgctttgtcacccaggcaggagtgcagtggtgcaatctcggctcaccgcaagctccgcctcccgggttcacaccattctcctgcctcagcctcccgagtagctgggactacaggcacccgccaccacacccggctaattttttgtatttttagtagagacggggtttcaccgtgttagccagaatggtctcgatctcctgacctcgtgatccgcctgcctcgccctcccaaagtgctgtgattacaagtgtgagccactgcgcccggcctaaaattgcatttttaataatacagtcccggagaaatgatggcctgaatgtcctaaaatcacccattcaccagtacttggactgttttttccttttaaagtttattctataaattatgttgtgtaagctttaaactccactttcttctttaccccaaattaaatgtcttttttttttttttttatgaaagatgaagatttttgtagacttgctattcaggttagctaactttttatctcattagcattgtcctatgacccctttcaatcttaggtgttttataaaccttttggttgaagagaaatatataaaaaggaaataatgttcaattccctgtgtgttttcaaaaaaaccaaatgaaaaatagatgaatgggccgggcgcggtggctcacgcctgtaatcccagcactttgggaggctgaggcgggcagatcacgaggtcaggagatcgagaccatcctggctaacatggtgaaaccccatctctactaaaaatacaaaaaattagccgggcgtggcggcaggcgcctgtagtcccagctactcaggaggctgaggcgggagaatggcgtgaacccaggaggcggaacttgcagtgagccgagatcgcatcactgcactccagtctgggcaacagagcgagactccgtctcaaaaaaaaaaaaaagaaaaatacatgaatgaagagatacccatttaaataaaacaagctttcgtgttttgttattcctaacatttttacgtcttcagaaggccttgtgttactgcctgtttcaggcgtggctcatgcctgtaatcctagcactttgggaggcggaggcaggaagattgcttgagtccaggagttcaagaccagcctgggcaacactgagacccgtttctacaaaaaattttaaaatgggcccagcgtgatgttgtgagcctgtagtcccagctacttgggaggctgaagtgggaggatcacttgagcccaggagttcaaggctgctttgagccatggttgcaccactgcattccagcctaggtgacataaaaaaattttttaaagtaaaaaaatctgattatagaagaatcctaaatctttaagcaaaactcagttctccctccaaaaaataagtatttaatctggtttaaagttatgtaagtatgtttacttatatgatagaaaaggccgcttctccatttttcataaatttgagtattgaaaggggttaaattcaggttggataacattgcacagtagaaagaaaagtacacttattctacatataacctgattaatttagtataggagagttacattccaccaaaagaaagtgttcctgttcatagtcttgggctttaattacaaatgttgacttcgtgacattttgagatttgagaagtctaagagcagaaagaattatagtttatattgatcatacataagcatgttcaaagactgccagatccatcctgtggaagaaaagaatgagtgtaagttatagccctaccagccttatgtttggtggattcagtctgatcagacatatatttgataaaaatgatgtagcaaaaaaacaggtttgtcttagagaaacatactactttctaagcttgtcttctttcttgagattaagttttccctcctttaacaggacaccttacaggaaaacatgagagacatttctccatctcaggatgcccactgtatcataacctctcagctgacgaatgcaaggtaattgtgctctcatttattcaacacatgcttattgagtgcttaccgtttgccaggcactttgctgaacactggggatacagtggccaacaagatgggtagggtccttgttcttacattgtagtggaggaaacataaaaaacaatgtgcttttttagaaaaaactagttaaacagacaaaagaattgtaatatgtaatgagtgctttgagagaagttaacaaggagattatgaaacgtttggaacatcagccactagtgcattgatattttctgttgaaaattggcttcgaagactgctagggacttattgcactaaggaataacttgcataaatatgtgatcttaatatttatgcattcggttctcttctcataaatctatgaagtcattttgcttttaaaaacctttcataattcttgttcctttttctgtccatttctgtgaaatactttttgttactctcagtcacacctacttttggctaattcatcttttaaattcttgaaacctagctcctaaataacctttgggattttgagataatgtatttaagtagaagctcagatcccatttgtgcgttcttgtgtgggttgctgttcccaaggatggaaccgaagatctaattatggggaagcaagagtggaaaatgttattaattaaatggattgcttgagtagtattggacaggttatctaagctggttagaccaaagtattattgttgtttttgttgttactttgctagtgacaccagggtcacaggtttattcctgtctgagccaatttcattgtgaggaaaattagattccctagctaacattaattttccttgattcagaatttgttctcttatttacaggtagaccgcaggggtgaaagtttcttttgtgtggttagtctttcagcaaagtagtgtactttccgtgcttatatggattttaaggtcaatgaccctactcttatttttcttcattccaaatcattttataagtggcaattccttctgctctgtgtaaaagtgagttgtagatcttcccattgtcctcccattattctgggactaaatcaaaacagaaaaagctgtgcccacatctatgtcagaagcaggaaaggcttcaggtacttctttctcagaaaataactgcgatccctgctttttgagagttgtcctctaccacttgtctctaaatacaatgatctgatactatggatggttttacataaaaatcttcctgagatgtcttttgcttttgaaattgttagtttgtagcaatatgaccatgtaacgttaagcagtttattttagaaaaagaaaaatttcagtttggtgaagaaaattctgaccaaaggaaaacatttctatcttgaatttatcctctttgttctctcttctttgcaaggggcattaggcgcagaataatccatctttactactggaacatgtgcatggaggatcaggagaatttctgagatgatatatttttattacatttagaaccctaagtggaaagattagacaaattccccacatttattaacagctctagtgtttttgaagaacctgcatatacatgattgctcttgagtttcccaggacacccttgcgatcagtgatgttacatttgtattcagtcatatatttctgtagctgcatgtgccaaatacaggtatctgaggattcagtgaataaaagactgcatttaaggagctcatgttctcacagggggaggcaacataaaccttcaaattaataagtaaataattttgtgtagtgataaatattgtgaggaaaaaaagacgaatgatatagagagagtctgtttcgggggtgagggtagggatagcactgcttttcccaggatggtcctggaagacattcctgaggagatggcatttgatctgggacgtgaatgatggcaaagaagcagttgtgtaaagatctagaagaaaagatatcttaagtagaagcaacagcaagtgcagaggccatgaggcgcggctaaactgatgggtttgagaggctgaatgaaagtaggccgtgtatggctggatccagatcataaaggaccttgtggaccttggcacaggagtatatttttgttctgatagaatgagaagcatttggggggctttaacaaaggcatgacaggatttcaggcacgcttttgaaaactgaagacttgttaacgtggagaatggagtgtgggggcaagagttgatgcagggtatagggtgcttgggaaactgcatggaagttcaggcagtagttggtggactggactagctttgtatcggcagcaattctaagactaggttggattcaggatacgttttagaggggagcaacccgttaggcttgctgattgatttgatgtgaggtgtgagaaaagagaagaatctaggataacattcaagttgttgactggatcagctatttagacagtattgccatttattaatactgggaagatttggggtagagcagatttgtggagaaatgccagtcgttctgttttgaccattctgagttttagtggtgaagtggaataagcagttggatatcagttcccaattcccagattatgaaacagaaactgttgagagctgatgtgatttgtctgaggtcatgtaactacagaattaagtttccctggagacttgaacccaggttttctttttttttttttttttttttgagacagtctcgctctgtcacccaggctggagtgcattggtgcaatctcagctcactgcagtctcagcctcctagattcaagcaattctcatgcctcagcctcaagtagctgggattacaggtgtgcgccaccacgcctggctagtttttgtatttttagtaaagacggggtttcaccatgttgcccaggctggtcttgaactcctggcctcaagtgatctgcccaccttggcttcccaaagtgctgggattacagatataaggcactgcatgtggccaagcccaggttttctttctttctttctttctttctttttttttttttttaagacagagtctcactctgttgtccaggctggagtgcagtggtgcgatctcggctcactgcaacttctacctcccgggttcaagcagttctcctgcctcagcctcccgagtagcggggatcacaggcgcctgccaccatgcctggctaattttttgtatttttaatagagacggggtttcaccatgttggccaggctggtctcaaactcctgaccttagctaatctgcccgcctcagcctcccaaagtgctgggattacaggcgtgaggcaccacacccagcccaaacccaggttttctaatgttttctttgtacttccatactctattcttgcacttcctcatgcttttttaatttatttattgtactttgagaagagtccaggctcagagtcatcagacatgattaaaaccttagtgatcccatcatttagctggatcatttcaacttctctgatcctgttattggctgagaaggcagaatgtgaatcttgcattatctctttcttgtagagattgtgacaataagtgtgaagaccctttgaaagtaaagtacaacataaatccaaggcattatcattgtattcttatgctttaagtaaacgtagtcttagaagcaggtggatttattgacgttgttgatggttgcaggtgagagcacagagccgggataagcagatagaagaaaggatgctgtctcacaggcaagatgacaacaacaggcatgcaaccaggcaccaggtatgggccttgttaaagcactggccattcatagtttgaggtccgtttcttggatctcctctataattgtcttcaggcatgtctgtgcctcatttcctgtggtatatcttccagatgtaaacttagaatcatgtttgtttttcaaacagtaaattttcataaaacaaacacttctacctcatgaatgaaggaatcatgctatctacagtagtagtaatagtagtagcagtagtagtagtagataattctgattatttgaaagattacacttgctgcttcatttcctcacttcgcatcctttaagactattgtagctttcaaacctctccactctgctagcacctttccaaggccaccagtgacttttccccagcatttgacacttgctgactgtgttatttgtcttctacttatctcttcccttggtttgtagggagcatcctggcttggtcctaaacctcctcctgcctctctgaacattcctgccacattggttcacttacttccttgttcttccctaaatgcctttggtcttcactcttcctgttttcctgcctggaacgctatacctgtaccaagaacagatggtattttctttcaaggcccgtgcagttctcagctgttggaggaatttttcccaaattctctcccaccgttaaggaatttcttccttatgtattcccattgtagtgctctcaaaatgttagcctttgtgacatattatattttgttcatcatttaggtgtctgtttttgcagttagattatagttggatagcagagatatatggtgatgaggaagaagtttgactttggagccaaacagatgtgaatttgaatactgattatttaactctagctatgttgtcccgggcaggtcaactaacctatttctttgttaataagaagaggtgaataatgcctacctggcaggggagtcagctaaattatgtatgtaaagtacctatacccagtgcttggcaggtaaaaagcactccataagtggtaactacacttttcttcgttgtctatcttaggtttaatttaatttaatttatttattttttagacagagtttcactctttttgccccggctggagtgcagtggtgtgatctcagctcactgcaacctccatctcccaggttcaagtgattctcttgcctcagtctcccaagtagctgggattacaggggcacgccaccacgcccagctaatttttgtatttttagtagagacagggtttcaccatgttggccaggctggtcttaaactcctgacctccagtaatccacctgccttggcctcccaaagtgctgggattataagcatgagccacggtgcccaaccttgggttttattcttattcagtttttctatttaaattaatacatataaatgaatttttgtaccactgttgatcagatcaataagcattaattggaaaacagtaagcattctataaatgattagttgaaatgatcttaattttattcttgttgctttggtggagacgtctatccttagtttatgttagtagtaaaataagtttgtattcctgaacctatatttaactggcagtaaaggtggtgggtgatgagaacctgatttggaatttttaaattgccatattcatgaaaaatttagctgggcgtggtggtgtacacctgtagtcccagttacatggaagactgaggcaggaggatggcttgagcacaggaggtagaggttgcagtgagccgcgatcgtgccgctgcatttcagcctaggtgacagagcgagaccctgcctcaaaaataatacaaatgaataaaataaaattgccatatgatttgcattgtggctagaaaatttctggcatttttttctctttaaaatttttttacatgttttggtaccttcttttttttttttgtttttgtgccagagtctcgctctgtctcccaggctggagtgcagtggcatgactggctcactgcaacctctgcctcccaggttcaggtgattctcccacctcagcctcccgagtagctgggattacaggcgtgcaccaccatgcctggctaatttttgtatttttaatagagatgaggattcaccatgttgtccaggctggtcttgaactcctgatctcaggtggtctgcctgccttggcctcccaaagtgctgagattacaggcgtgagctactgtgccgggccttggcactttcattttgaagcttagctttataaggagttttctctcagttttctcctttttccttttaggcaccaacggagagacagcttcgatataaggaaaaagtggctgaactcaggaagaaaagaaattctggactgagcaaagaacagaaagagaaatatatggtgagggaaagttaaatatttaatgagcatgaactcctgctatcacatttgattccttttgctttctgagcttctgcctttcagatttgccatttagtattctccacatgtgaataccaattgactcttctatggcacttagagtttatttcatcccccaaaactgaattgttgagagtggaaacaggaggtcttgggaaaatgaaatacaattagaatttaaattttaaaaaatttgatcctctagttgttcataaattttactttcatcttaaagggttaaatttacccgctagaacacatgccatggcactggaaatgtctgtatgaagaaaaatattcaagcttaatagtagtctgcttattttaatggaaaaatagatttcctccatgattaaaaggtattaattgggtgaatattctgtaatagaccttcttgtagtattttaacatttttttctaactttagaagtaatgtacatttgtaagagaatttagagtgattaagcaaagtatatggaagaaaacaaatcctactacctaaaaatagccacagttagtgtttttggatatatcctagctttttcacaatctcttatttacataattaccttcttactgtatgtagcactttgaattctgtgttttcgcttaaaaatcttttttttttttttttttttgagacagtcggccaggctggagtgcagtggcacaatctcggctcactacaacctctgcctcctgggctcaagtaattctcccgcctcagcctcccgagtagctaggattacagacatgtgccaccacgcccagctaatttgtgtatttttagtagagacggggttttaccatgttggccaggctggtctcgaactcctgacctcaggtaatctgcccacctcggcctcccaaagtgttgggattacaggcgtgagccaccatgcccggccttaaacatctttttttaggaaaagattttattataaatgtattaatacatgcttactactgaaaataccaaaaatatagagaagaaacattccaataaaaaaaaattgtccttcaagatacaaaccactgcttaacattttgatgtgtgttctttcacagtctttttctttttctttctttttgagacagagtcttgctctgtcaccaaggctgaaggctggaggctggagtgcagtggtgcgatcttggctcactgtaacctctgcctcctgggttcaagcagttctctgcctcagcctcccaagtagctgggattacaggcgcccaccaccacacccggctaatttttgtatttttagtagagatggggtttcaccatgttggccaggctggtcttgaactcctgacctcgtgatccacccgcctcggcctcccgaagtgctgggattataggcatgagccactgcacccagccttttttttttttttttttttttttaaatttatttattttaaattttagataagggtgtacatgtgcaggtttgttacatagatctattgtgtgatgctcagatttaggcttctaatgatcttatcctgtcacccaagtagtgaacatagtgataggtagtttttcaacccttgtccgcctccccactcttggaatcctcagtgtttattgttcccttctttgtgtccctctgtacccagtggttagctcccacttataagtgagaacatgctgtgtttggttttctgtttttgtgttaatttgcttaagataatggcctccagttgcatccatgtcgctgcaaaggacatgatttcattcttttttatggctgctcttttagatttttttctgacattttagtttttttcatagaattggaatgttttcttattcagccattgggatagattcttaaacatagggcatgtgaatacttagtcagagcatggcttcactaagacaaaaatatgccagactatgcatagttgacccttcgtatccatggattttgttcctgtggattcaaccaaccacggatcggaaatattccgggaaaaaaatgtggtttgtactgaatgtgtacagactttttcttgtcattatttctgaaatagtagtgttaacagctatttacatggcattgacatcacattataagtaatctagagatgacttaaagtatactgctggatgtgcccaggttatatgcaaatatgacatcatttacatacgagacttgagcatccatggattttgttatatgcagggaggttgtgggggcgttcctggaactggtcccccagggatatcaagagatgactgtatttccttttttttttttttgaggcggagtttttgagacagagtctcactctgtcacccaggctggagtgcagcagtggtgcaatcacagctcactgcaacctctgcctcctgggttctgggttcaagcaattctcctgcctcagcctcctgagtagctggaataataggtgtgggccaccacacccagctgatttttgtaattttagtagagacagggttttaccatgttgcccaggctggtctcaaactcctgacctcaagtgatttgcccacttcggcctcccaaggtgctaggattacaggtgtgagccagcacacctggcctgtatttacttttttgacagtcatcactgtcttaaatgctaattttatgaatacatggacataggccaatgtaagatgggttgtggggtgaatttgtagttagacctttacaccagactgtgttggtttgtacagtgagggctttagtagtgggctatagggtaccagattgtttgcttgccccagtcttgttcactgtttccatctgcaaacttgttagaagggtaataagacaatgataccgtatattgagtgattagtgctaggcactgtgattgtgacgttcctttgatcttttaacagtccagtatgattggtgatatttcccatattttatatacaggaaaactaagactgagagaggtaacttacctaaaatcatacaggcagaaagagtgtctgaagtaaaagttcttgaaatttttaaccttaacaaacatctgctctgctttttagtaatttgggataggttattaggacccaacctccttgattaaaatgctggctaggacttttttcaagcttttttttttccagtgttcctcaaaatagaagaaataactaatgcgtagaacccaaatcttagatgatagagtccaaatttaaaaagattcacagcagatggaatcagattaaccggaagaaattttaatagggataaagatactgatgaatggtctcttcatatggtaatatgtgtgtgaaatctataatgttttcctgagataagccatccactccacttaactaccattatctcctattctctggatgggaggtggagcctacaacagagtgggaagggctgaaatcaaaggcttaaaagggaagtttcctttgtagaatctctttcctggaaaggattcttgtagtgactgccatggtaagattagggaattatttaagactggattattctcatgcttttaattttctatggctttcacctgtcttattcttgcttaatatttagtaagtcatttttagagagtccagcctatttttctgtgtatgtggactggagtttgagggtagcacgccttttgcagacagcataatggtggctggagcaattcaagtgaaagaagttacaaaggactgcttcatccagctgcccctgcccctcccttcctgcagattttcttttgagtctaaaatcttagacactaaggcttagaaaatctggtttttgtttgttttgtttttaaatcggggagtatctaccaaagctccttccaaatctcaggattctgggaatttgtagtgtctctgggtttgttgtactttatttatttgtactgtcatgtaaatttttacatgaaggaacagcgttctgatccacaaagtgtatcttttcagagatagaagaatgaagctcccttctggagctgtgggagcatttcctctccagaatcactggggtgggtagtgggagtcttgtggcattaacctgataagtagtatgtcttgtgctcaatccctagcacctagtatgtaggcactaaataaatagcttatggttgtgtggtttgcatggattgaaatgaaatagattaaaaagttcttagaagcagagagtatcagagtatcacgctctggttattttcctaggaacacagacagacctatgggaacacacgggaacctcttttagaaaacctgacaagcgagtatgacttggatcttttccgaagagcacaagcccgggcttcagaggatttggtgagtattaaaacctccaaactgaaggccgcttgtgaaaggtgcttagagttgccaggaaaaatgattgcaaatcagtttgatgggaattaaatgtaccttgcttctggaatctctttccctgtctcccagctgtccctttttggagactagccttccctttcagatttaaaatgaatcacccctcctcccttcctttttttattccctgctttccacctcggctcccggaagtaccagtttggctagagctgatgaggctggataaaaccataggcgcccctttgtctcagctgggcaatttgcaattctgagaacctgtagcctaggagagactcatctctgttgttttcttaatcccaacaggaactccccttttgctaggtttcctctgcactaagaatgaaaataacagtgaagaggaataatggaaaaggctgttgtcagatgttttagaattaatctttgacacagccaagtttgatacattggttttccattctgatatttatttagagctagtttatactgagttgctgtcctaggcagaatttttaacaactttgcttgaagaaaattctggtgattgagtttacctctgatataacagattaaatgtgttcagggaagctcagttttaaagtgaatctcgtcttcacccccttcccccttgtattaaaaaaaaattgtatcaaatactagacttgttgaaaacttggcagaggcagggtttgctggctacccttggctgggatgggctgttactgctgctggttttctctatcctattctggcatggagcatttcctgggctagccttttacaactttacacctggttatgcttacaaattatacttttgtagccaactcagagccactgaatggagatggatatccgaattttttttttttctgagacagggttttgccctgttgcccaaactggagtgcagtggtgccatcatggctcactgcagcctcgaccttcagtgctcaagcgattctcccacgtcagcctcctgagtagctgggactacaggcatgccactacacccatcccagaaatattttctgccttctagagtttagattctagaattatcatgcacatttcaaaaatattttttaaagggcctgtttttttttctaagtgaccattgtggatatatttcacggagattcatatagctttataaaagcttctgcagataagtaaggcagattctaaatcaagttttttgtttagttttagaatactttataagggtggggagtttgtatctgtgatgattttctttataattcagtttggtctaggctgataaaaatgaagtttccaaggtatcattctggtgaggcccagaatgtgggaggtagcagagaaacctctcttttgagacctgtgctctgggcagtatgggtagtaagttttctgtacacctgtgtgatttttcatgtagctctctttagtgtaaattctcatggatagaagccaaatctgtctgatttttttcatagcctagcgtggtggcatgcacacacacttttaaaaacaaagataatatttatttttttaaaaaggagtttcgctctgtctcccaggctggagtgcagtagtgcgatctcggttcaccgcagcctctgcctcttgggcgattcttctgccttagcctcccaagtagctgggattacaattgtttgccaccacaccttgctaattgttgtatttttagtagagatggggttttgccatttcggccaggctggtctcgaactcctggccttaagtgacctgcctgcctcagcctcccaaagtgttgggattacaggagccactgtgccctgtctaaaagcaaagataataaattctgatcctcctttgacttttgatttcttggcaataggagaagttaaggctgcaaggccaaatcacagagggaagcaacatgattaaaacaattgcttttggccgctatgagcttgatacctggtatcattctccatatcctgaagaatatgcacggctgggacgtctctatatgtgtgaattctgtttaaaatatatgaagagccaaacgatactccgccggcacatggtgagttgtcttgggttcctctgccttgaccatgatggcaataagctgtaggatctctagattttgccatagcgatggcatctgttcaggcaccttctcagtggtcctcagcagtgggatgaaggcataggaaatgacaggccacagcttaaggcggggtatagagcctgaggtatggcttgtgctgggtgccacccaaagcagctgagggcccttacccacatcctgtcatgtacatcttcttgtcttttgttcttgctgcctactgctcttcatttcctccttggaatatgaattacctctgcccacaggttttgtgtgtcccaaactagatgaaaatacagacttcattaggcacagcagagacagcatggctcaccttcatatccctagcaactagtgtggacaactgatgcccaagaagtatatgttgaatgggtacttattaatatttaatagtgatcagcctgtgacagattatgaaagtagcagagtgggtcctttggtgccttcccctctttttcctaataaaacaggtataaggagttgaatctgttattgttgacaaataggtttactagattttttgcagcttcaaaaaaaaagccatttttcccccgctctgttacagaataagctttgtcttaaggggaatttctgccatggagcaagggtgcggaacaggggaaggagtagagattagcctttcaggcagagaagactttttcttgttttttttttttttgagagggagtcttgctctgttgaccaggctggagtgcagtggcgcgatcttggctcactgcaacctccgcctcccagattcaaacgattctcctgcctcagcctcctgagtacctgggactacagtcgcacaccaccacacctggctgatttttgtatttttagtagagacagggtttcaccatattgaccaggatggtcttgatctcctgacctcatgatccacccacctcagcttcccaaagtgctgggattacaggcatgagccactgtgcccagcccttgttctcataatcacaatataatttggctctaaggcctctggggtgtctctttttccttccccttccttttttatttcccaggatttccatatgttgagcatctatgacccaggtttcctgtgatttctgtcattatactcttctccccagtttggttggtgataactgcttttttatgttcccagttcaggagcatgtggtctgtaagttcagggcccagaactgttgctttgactcaggttctccagaccctggcacacttgactgcatagggctagagtcatggaggggaggtgattggcggcgattggtagaaatatcagtgcacaggaaataatggggtcagaaggtggggcactgatacagatggcaggccgtggagataaagtaaaatggttttactgtgtgaaagcgggtatttttattgatgtgaactgcttaccatttatgccttttttccttttcgtttctggttgttgagtgacacaaaccaatgaaatagccaaaagggcaagaaatagtaatagaaggagaaaacaaagagtctgaataaatctgagaatcaaataaacattctgaatatttgaaaatcttccatattatatgatataaaaatcagatttcaggaaatacctaatttattccatgcctgttcttattcccgttgcttcaggtgtgatcactgaaatgaaatgatcttcctttggcttggcttctgtttctgaacaaataataattgttacatgagtttggttattgttgggaagagccagcatgagtaaaggggtagagataggaacaaactacagatggaattttcttggatggattccagttaataaatatttggatttacatatgacaaattggaacatgcttcttgagttgacaaaaagagttgcagtaaatttgcttaatagaaagtgtttcatgggccaggtgcggtggctcatacctgtaatcccagcactttgggaggctgaagtgggaggattgcttgaggccaggaatttgagaccagcctgggcaaaatagtgagactctgttgcttcaaaacccttttgaaaaattaactaaccaggcatggcgccatgcgcctataatcttagctacatgggaggatcttttgagcccaggagttcgaggctgcagtgagctatgatcgtgctatttcagcctgggtgacagagtgacaccctatctcaaaaaaaaaaacttttttttatacgtctatactttttaaacacttttttcttttttttttttgagacagagtctcgctctgtcacttaggctggagtgcagtggtgcaatgtcggctcactgcagcctccacctcccggattcttctgcctcagcctccagagtagctgggattacaggcccccgctgccacacctggctaatatttgtatttttagtagagacggggtttcaccatgttggccaggctgctgtcaaactcctgacctcaggtgatctgcccacctcagcctcccaaagtgctgggattacaggcgtgagccaccgcatcaggccttaaacattttaaaatgtaaaccttttgaagaattcacctaacagcagatggctggctggctggctgcattaaaacagtaagcacttgagggtgaggaaaagggggtactttgtgctcccttgtggccaagtgaccctagcttcctgctgctcagctaggctgcttgccttttttttttttttttttttttctttttttgccacaggactttctcttaatttccttatataacaaagggaatgcacttgcaggggagaagggcagacaggtagtggtacatggtttttatcattgtgagtgggttttctaatctgaacaaagaaggccatcatggttaggtggtaatgagaagttatgggtaaaggtgagagtaaagtacttagccaccctaagctgctggaaataagctgcttaagaatttcctgttggcttgaggcatttggtaataagcaagcgtattgttatttatttggcctttatgtagtgggtgattttaatctcctgggctaaagtagtgccagaatgtaatccagaatacttgttccagattgctataaaagtgtcataaatatattcaaatgactttggaagcctttgttttatggaaataaaatctctgttttgctgtatgttctcagcttgtccaactgtccggtagctcagttaaccacatttgacctgtcattccttttcccttttgaggagcagtcttgttgggaggctttggttccctgatgtgaatttcattgtcttgcaggccaaatgtgtgtggaaacacccacct

SEQ ID NO: 645 - DNA, 32744 bp, Homo sapiens
  source 1..32744: mol_type = other DNA
aagggcgctccgcgcatgcgcacaggatccggctcgggaggcggaccctggctgccatcttgcagtgcgcgggaaccgccgccgccgccgctggccaaaaagcggagcccaggggaagcgtgtcctgctcagaccgccttccttctccattgccacccgtgccgaacagccaggctgcccaattgcaactgtagaccaatgaactaatccatcgcccgcagcccgactctcagcagcggttcgtcccggtgcccacccccgcgaagcggagcgcccgggcacctagcctccctgccggccacctagcctccctgccggccacgatgccgaacgtgctgctgccgcccaaggagagcaacctcttcaaacgcatcttggtgagtggccgtaggccgcgctgccgccccccggtccccgggtcctcgggccttaagggcaagcggtctggcggcggccggcgcgggccaggcttggcctccgctgcccaccgctctttgtttacctcggaggtcgcgggaccccactttcccgctccggccggcccacgggggctgccgagccgctcctccgtgcgcttcctttccgcggtcttctgcggctcgcctcacccccgccgcgctctttccagaaacttcacgccgctctccgcagtgcccgggcacagccgcctcggccggtagtggctgccgtgctctctgccgcgccgggctcgcagcagcccctcagggatcctcccccggtggtttattttgccagtctctcctcggctaggtgttttgcgttctgcattctctgctttgcgtttagttagattgcacagcacacccgcatacctattaaagcgggatcgatgcgatggtggaatttttcctggttacgaggaaataaaaccggcaactttaggaagccaggcctggcaccacctccctttgggaaaaagtttgcctgtttgtaatgtaccttatttacctctttggaagtgaatatttgacttgaagtgcgtttctgagttgtcaccaacttcaaaacagctgtttgctttttagtcgcacaggccttgcttgagtaattaaagccgcgtggactggctggttttgcatttgaggggagcatttttactttatcgcggagcagaagcctgaataatggccccgtagtgatgaccgctgcggagccgggtgggcagttttctgtgggctgtgtgccagcgtccctggtagctttccaggttctgttcttccaaggagaagaggcagcattcctttgctttcctcagtatcctctggctaccctaggttttaaactaatattgttagtaggtaactgtcttttctagtttatcttttcacctgaaaaaaagcttttatttgctaaacatgcatttaggtttaaaggtgaatttattgaaagctgggttggctatatggctgttagttgttgcttaactttactataaataaaatactaattttagagtaattttaagtatgaacagcggcagataattcatagtagctgttctgtttcaagacgatagaaacttcacacttagtcttcagattaggatacatagtagatgggataaaaattttaaatattatgtggtgcttagttttgaaccaataataagatacaaatgtgagaacattaaaaatacgaataattaaagcacgtggcaggttgcttcattgggctttgtatttttttattttacttctcatgcccttttattttacacagcatggaattggagaagtaatttatttatttttatttttaatttttttttgccctgggaatctgaaacattaatgataatatcatttataaatcgctagttggatttcaggacatttggcatcatactttaaagatgacagcacttcttttctctttatacgagttttttgtagttcaaatcatggatcagtgtcataaggaaaaagttacattattattcttaaattacaaaaaaggtagggtttatccccaaataaattgggaaatggtaaccactaaaaaaaaatcaattattttgagatggaagtctcggtttgttggccaggctactgtcgaattcctggcttgaagcgatcttcccacctcagcctcccaaattgctgggattacagatgtgagctactgtgctcagccaagctaaacatttttaaatctaggtatgtaatgtttctgacaaggttgcgtgaatttaggaggattctgcataaacgaatgattttatcatttcacaattgcaataaatgtgggtaaaatttggctacaacaaattccatagcaaacagaagtctctgtaataaaattatctttaaagtttagtggattaaagtgctttgccaccaacagtaaaattttttctattgaaaaaattcaaacacatccacacaaactgaccagctggttttttacgtgttccacgtggcttgtatctgcatgtcttattccccagactggatattaattagcattacagtttgttgaattttggaggtattccatgccctcttttagaaagagacaaacctaaagatggtaaatgaccaagtggctaaggttctctgtctggttagtagcaaagttgagactagaatctatcatttctgcttagtatataatggttcctgagtgaatgtagatttgtcttttttttttttttgcgagagtgtatcgctttgtcgcccaggctggagtgcagtggcaagatctcactgcaacctctgcctcccagattcaagcgattctcgtgcctcagcctcctgagtagctgagattacaggttgacttgtctttacccgagtacttggactctggggacagactacctggttaagagttgtggctctggcacttaatagttatataaactctataactatgcctcagtttctctatctaaatggggatatcatgcatctcataggctttcctgggatttaaataaagagtaaataagctgtcatgggatgaaggaaaaaaataacagtgtctggacgtatagtaaatgcttccaataggtgttaactattattactgttattggcagtatgattattattattttcagataacctggtaagtcagaaaaactagtatttctatttgtctttctcagtagttcctttctcttgtttttttcttgtcatttgtgagacagacttgtagtcaaactcagattgtcattttttattttaaaatatttttggaataggcagtatattcacatggttcaaaatttaggtttctctcctatccttatcgcagaatcacctagttcccttccccagaggctgtcaagaggcctcaatataaactttttttccatgaagacttttctaattccttccacatccagcccctgctgcaaggcttaaagatggtctcatccattgctagtggcattttgctttgaacttagtaggctgtatttatggagcagtttcttatttgtttagccatggcaatgcagcagtatgtaaaataggctaaggccggcgcagtggctcatgcctgtaatcccagcactttgggaggctgaggtgggagctaggatcacttgagcccaggagcaaaagaccaacatagtgagacttcatctctaccaaaaataaaaaaataaaaaaaaatttagccaggcatgatggcacacacctgtagtccttcctatccactcaggaggctaaggtgggaagatcacttgagctcagcagtttgaggttatggtgattgtgtcactgcacaccagcttgggcaacagagtgagactgtctctaaaaaataaataagaaagataggtgagatcattgttctaaggatccattatatgatggtggggaagacagacactaaataatagcataaataagatttcaggaaatgatagcactgtgtggaaaatagagtaacatggtagagaatatgttggggaaggaaggaggatgggagtatttgataaagtgggcaagtaggggacatgtgagacttggataatgaggaaccatccatgggaagatctaggaaagcaattcaggcagaaggaacacaagtgtaggaggcctgaggtggggataagcttggcatgttgagtaatttaacacccagtgtgactgaacaatgtaagccagggaagagtggaaagcaatggggtgttcttcgcatcagtggctgccagggagagatgttaattgtgtaccctggctggtggcattcggaaataaagatgttgcttatccttgcattggactaatgatggtctttggagtaagatcagagtttgcagctaagctgagcagcttataaacaagtttttgaacctctggagtttcagtttccacatctctgaagtggaagtaatgacacctacattaaagaattggtattaagtaagagattacaaattttttacagacatatcatagctgctcaataagtggtagtatttgtgtgtgtgtgtgtatgcgtgcacacacccatgcactttggtttcattcttgcggtagcaaaggcttttagtgcagtttctggtatttttctgttgccacatatgtttttgcttaaattttttttttgagatggtgtcttgctctactgcccaggctgagtgcagtggcacagtcatgccttactgcagcctcagcctcgtgggctcaagtgatcctcccacctcagcctcccaagcagttaggaccacagatgtgcaccaccacgcctgaggaatttttaatttttttgtagagatgagatcttgctttattccccaggctggtcttgaacttctgggctcaagcagtcctctcgccttggcctcccaaagcattggaattattttgaattaaaaaattctgtgtactaggaaagggaaacaaaataaaaaattctgtggcagtattgattggtgaattgtcatttttttctgtttgtttgttttgagacagggtctcattcagtcgcccaggctggagtgcagtggcatgatctcggctcactgcagcttccagctcctgggttcaggtgattctcctgcctcagccacccaagtagctgggattacaggcatgcgccaccacgtctggctaatttttgtaatttttttttttttttttttgagacagagtctcgctctgtttcccaggctggagtgcagtggtgtgatctctgctcactgcaacctctgcctcctgcgttcaagcgattctcctgcctaagcctcctgagtagctgggattacaggcacgcaccaccacacccagctaatttttgtatttttagtagagacggtttcaccatgttggccaggttggtctcgaactcctgagctcaagcgatccgcccacctttgcctcccaaagtgctggaattacaagcgtgagccaccttgctgagccacatttcctgttttttaaatgtcttttttcatggtcttttataaaaatgaaaatatgtagattttagaacaatttgacaagaataggtaacaaaagtacactgcatgtttgtaagtgatatcctttctatcacattttagacctaattttggatcttgagtttagaatatatgatgctgtgagaagttgctccattatgtattcatttgataaaataacttttgttcatatttctttacagaaatgttatgaacagaagcagtacaaaaatggcctcaagttttgcaagatgattctgtcgaacccaaaatttgctgaacatggaggtattgtctcatgtgagagattgctttagggaaatcaaattctaaaaccaggcattaacagtgaaagaagagtatttccccgattccagggccttgcagttctctattagagtgcataaatgttcagcatttttttaatgctttatatgagtcttctagattacctgtattatccttaagtatgtatacttaaggataagattaggatggttcgtttatctattggggaaaaaattggagaaagtatgtatcagtatttttatggacctgatttcctttattactttgaatagaatttaaagtttataccttggtttcctgtgtgtaaaattaggacaaaatttgcaatatagaagtatgaagatatggtcacctgcactttattctttggtagatgtgttttgttttgtttttttttagtatgtgctgacgtttacatatgatattactaatttaccattagattgtatattttgagttgttttctaacactggtgttaataaagtttgtattttctggttgtgtcctttttcagtaacagccagtgttagaagggtggatcaggatagacatgaaaataatgatcctgtagcatagcaaagctggttgagattactcagtatcagacttggataatggttgagatcatcttattgggaaaataggctgaccttgctcacttttccaacaacatttaaaagattctttgaaggaaatggaaagaaatcttcatttcatagaattaattttaaagcttgttttcaagctttttagctgtggaagctttatccaaatggtgcctgtgggaaagttcaatatgtaaaacagataaaaggtgttggagcggggtttgggccacaggatcaccatgttctgaataccatagagtttgaaaatcattcttcttgtgtaattcccttcttgtggataattcagagaattatttcatcctaaaccatcttttattaacttccttacatgttttttgttgccactaccatcatccagtgttgtgctgttgaaatgtgaactgatgttaattagcctaagtataatttgttggaataaacttgctatcaaaaatgaagtctgttccaatattgaataaagtgattagtgatttttaaattatgtatttgtctttattaaggtagattgagtgtttttgtgtggttgtaaatcagattgatgattgattagaattgaccttaggtaagagctgtggaactgctatggtagatttaattccattaagactcatgtctgctttgtaatttttttttttttttttaagacagagtctcgctcttgttgcccaggctggagtacagtggcacaatcttggctcactgcaacctctgcctcctgggttcaagcagtgctcctgcctcagccttccaagtagctgggattacaggcacatgccaccatgcctagctaatttttgtttagtagagacggggttttgctgtgttggccaggctggtctcgaactcttgacctcagatgatccacccgcctcagcctccctgagtgctgggattacaggcgtgagccattgcacctggcctgctttgttaattttttcagcagaataatatcaaccacttttacagagtcttgtgaagggcagaaaccattttagcaactctgaaactaaggaatttcagaaaaggacttgggctgctaagctttaagtaaatatttaaatgtagttttactttttctacttggagagaagttcaaactgtgagattaaaaagatgaattggagccatagtaatccttcagatctcaactattaaagtactattaagagaataagagaataattttgtgtcatttgtaaatagagtttaaaaattatttttcagagactttggctatgaaaggattaacactgaactgtttaggaaaaaaagaagaagcttatgagtttgttcgtaaaggacttcgtaatgatgtcaagagtcatgtctgtatccttttgcagtagttaaatagtttatgttttagctagttttttcctaattcaaattaaatttgtactatgaaaattccaaacctacgtagaagagagaatttaatgaactctgtgtatccattactcaactataatcattatcaacattttgtaatactagtttcttttttgcttgtgcccctcctcctatattagtttcatttgttccctaccccgtgtttatttattggaatattttaaaggaaatctctataaaatgtgcttacttctgttgtgcttagtgttggagaaaagttactttggtaattgtgacttgaaacccatttttttcttaaacataattaactgggtaatactttcctgttattccaaatactgacttttagttaatcatatgttaaaatttgtgtgtcttaaactttcttttagacatttgagaagaaaaacttaaacttattttaaaacagattttacttaatatataagtatgatattggttcttgagcttggtttctgttaacacagagacatagctgttacttaatttgatctttataattgtgtttttctttgggtaatatcccagtgtgtaaaaaaaaatttttttttgttttttggggggagggagtctcactctgtcacccaggctagagtgcagtggcatgatctaggcttactgcaacctccacctcttgggtttaagcgattctcccacctcagcctcccaggtagctgggactacaggtgtgtgccaccatgcctggctactttttgtactttcagtagagatggagtttcgccatgttggtcaggctgatctcgaactcctgacctcaggtgatccaccctcctcggcctcccaaagtgctgggattacaggtgtgagccaccatgcctggccaaaaaaaaatttttttttaaagggtggagcattgaaattgattttcatttttttttttttgcttatctgtatgtttatctgcattttttttcacatattgcccttgcattttagtttgttaacatgtaattcacttagccacgtactggtattgaacacgaataatcttagtagtgttttcacatatttagcttagagttttctcaaattactaaatacttatttctttatcccagtgcttaccccagagtgaagagaagggcatgtaagtatgatagttttgtggggcttttggctccaagatatgctaatactttaatttataagaaatacaacttattttttgtggcctttaatataactagggaagtaggtgatagttacacattactttagaattggttgactaaatttgtttcaaaaagtagttgcagtttttgtatatattctgtttcaagacatcatgatgaagaataggtgaatgttgaagttgctggggtaggaaagtgatgggatagagggtagaaaatgtgaagaatttttgctaagaattctttaaggttacttaaaatattacagaaaatttcaaacatgtacacaagtagagagaacagaataatgacccctttcccatgtggccattacccaggttcagcaatttgacaattatcaacccagcctgctctggtttcgtctttaacttcccctcaccattcccctcccccagactccagatcattctgaacaaatcccaggcaaaataccatttccttaatgtaacttttatattagatatgtatcatagaatattctagtgtctgtgtatgtctttgtttccttaacttaataggttggcatgtatatggactcttgcagcgttctgataaaaaatatgatgaagctataaaatgttaccgaaatgccctcaaattagataaagataacctgcaaattttgagggatctctcactgttgcagatccaaatgagagaccttgaaggttaccgagtaagtacttcattcttaaatgtacatgattttacagtagacaaaatttaagagcgtgtcatttcagaatgaggtgagcataagccaaaatcaagtagatttgattgttcattagaaggtgtatgtcgcttgggaccttccttctcagtcatagttgtggcactttgtacttgagtattcaaaaagaataactggtggggtgtggtggcccacgcctgtaatcccagcagtttgggaggttgagatgggaggatcgcttgaggctgggagttagaaaccagcctgggcaacataggccagactccgtctctacaaataagaaaattagcccggtatggtagtttacacctgcagtcccagctatccaggatgttgaggcaggaggatcccttgaacctaagagttgaggctgcagtgagccatgattatgctactgcactccagcctgggcaagagagcaagactttttctcaaaaaacaaaacaaaaaaaactggtttttaaaacattcttaattcattaattatttaaaaattagagacaaggtcttgctatgttaccaaggctagtcttgaactcctaggctccagtgatcttcccacctcaccctcccaaagttctgggattacaggcatgagccactacgcctggccataactgtttaactggaatatctatgtgcagctgctgtactagattatttgtgggtttgatatttacaaatttgataaactaataaggcttttataatggaaacctaaacataaaagtagcttttaaaaattattggttagtaaatattttaaaaacgtgagaagggttgccataaatcagtctttctgtagttgagacctcttcagatttgcatcttcaactctctcctggacatctccatgtgcttagtccacttcgtatcctagaatcagtatgtccaacatggaattctcttacttacttatgagaaggaggccactaggttctaacagttttctttaaatacattatttatatacttcttacttttgccctctactgccatataagccctcataccccatgcctagatttttgcagccactttaagggctctgctgaacttactataataataatggcaccactcttcaaagcgtgtatttttttcttcagctgtgtttagcagcttagatgtggttggagttaaaatcagttatctttaggaatgaggcatagaaattaagaatattggcaaaacaatggctgctaaagtggattgtgaagtaaattaagttaaaagagagctaggcttggtattacgtgtcttagtcctggctacttgagaggctgatgtagaaggattgcttgagcccaggagtttagtccagcctgggcaacatagggagactctgtctctaaagaaaaaaaggagagctggtggtgaaagtgtgaaggacccaggaagtacagacactggtggtcaaagaacaagggtaggagtgtcatcaaatgatagtgttggcagcatgggagctgtgggtagagagtgagatacctaaatttatgatttctgggtggcagtaacttctagggtgtggctgtgggagtgggcctctgaatggggtggaggagaaaatcattaaagattagaaaatcttgggatttagaggataggttgtgggatgggtgatacacgttagtgttgcatttgcccagggtaacgccaagagttggcagagaaaataatactgacctagactttaataaaggatttgggaatgacagagaagcaacagtaaaaataagggataattagatgtttgggtgtttcgcctggctgtgtctgtcctgtgtctggccaattattacaatgtatttacactgtaaatacatgtaattcatataatagttttataagtagcaaaatgtagtttaataaaaaaccatcttagtcttcttacagaatatttagttaccaaaaaaaaaaaattctcattatttaaatgtaatttaataaggcagtccaaaggcatgggccccaaagatgtttcaatgacagcctcacagtgagtattacagggtattgtagaactttagtattttaggtaggaaacataaaaagtacttctattttattctgaaactgatctttgttgatatagttcattagaaatgtgttaaaggttagattgttttcttaaaactgatgaaataatgttttagagaatatttagcaagttaaaactttttttttaggagacaagataccagcttcttcagttgcgccccacacagcgtgcctcctggattggatatgctattgcataccatttgctgaaagattatgatatggccctaaaactgttggaagaatttagacaaactcagcaagtaagaattttaatgtttccttctaccttcataaatggagtagttgacttctaaattgtccctgctctcaaatgtgaattaaagtatttgaaacctatggaaaacgggaaaactttttgacgtaattggaaacagttaaaatgtaggattatttttctctctctttttttttttttccgagacggagtctcgctctgtcccccaggctggagtgcagtggcacgatctcggcttgctgcaagctctgcctcccgggttcaagccattctcctgcctcagcctccagagtagctgggactacaggcactcgccaccacgcccggctaattttttctattttttaagtagagacagggtttcaccgtgttagccaggatggtctcgatcttccgacctcgtgatccgcccacctcggcctcccaaagtgctgggattacaggcgtgagccaccgcgcccggccattttttttttttttaagagacggggtcttgcgatgttgtccaggctggtctcgaactcctgggctcaaatgatcatcctgcctcgtcttcctaaagtgctgggattacaggcatgagccaccacgcctgcctccacgtttcaatggagaatattctacatgtggattcagctgcaagttgatggagatggtgtggattgagtcacttcacttagagttaatccaccaaccttgagtctcttttccactcctctgtttatctgtcatttcataatcttgaccctgtctggagttttccaggacagataggcattctctgtagtaatttcctctttatggatactctagacttgagcttcttccatcctatttcacttactcctcctttgcattctgttttctagaaatttgttgaaatcttaaatagtatcttctatttatgggtttttatattttttaatctgctatttttactctcttaagggaggaaataaactttgtagtaaggccaccgtctttacttaggtttttagctttttacgtcacaccagagaattgattagactggttctttgtttttatccaagaatcaagttctgaccaaaagatagtactgtatcacatttggtggacttgataaaaaactttcctttgaacacaaaattatgacattttgatggttagatttaggtgtttgcaatttctttctttcttttttttttttttttttttttttttttttgagacagagtcttgatctgtcgcccaggctagagttcagtggtgcaatctcggctcactgcaacctccgcctaccaggttcaagcaattaccctgcctcagcttcccgagtagctgggattacaggcccccaccactgggtctggctaagttttgtatttttagtagagacggggtttcatcatgttggccaggctggtctcaaactcctgaccttgtgatccacgtgcctctgcctcccaaagtgctgggattacaggtgtgagccaccgtgcccggccaatttctgtttttttttttcctttactttttttctagagacaggatctgactgtgttgcccaggcagaagtgctgtggctatgcactacagtcttgaactcttaggctacgactaggacttgaactcctagctaggactgctccagagactgaggcaggaggctagctgggactacaggtataccactgtgcctgacaatgttgtgttttttttttttaagacataatgctgctgcatggttaatagactatagtgtagtgttaatataacttttttagtttagttttttttttttttttttgagactgagtttcactcttgttgctcaggctggagtgcagtggcgcaatcttagctcactgcaacctccacttccgggcttaagcgattcttctgcctcagcttcctgagtagctgggattacaggcatgtgccaccacgccaggctaattttgtattttagtagagacggggtttcaccatgttggacaggttgttttgaattcctgacctcaggtaatccacccacctcagcctcccaaagacctggggttacagatgtgcgccaccgtgcctggccaacggaacttacatgcactgggaaaccataaaattgtgtcactcactttattgtggtggtctggaaccaaacccacaatatctccaaggtatacctgtaattgatttgtcttcattgatattttattctgtgactttggtaaacacttttattaactctagtagttttttttttgtagattctatagtatttcaaccatttttatatttgtatgtaggatttcttgacctgtgtcacttgggaatagacagaagtcccaccctattatttgttttaaataatgcattcattttttgtgttattaatcactcttctgtttgtatctgcttgtgggttgctttcttgtttatgtgaatgactctcctgagaaggcagtttaattaaaggtctgtaactgctttatataattatacaaataaagtaatttggtcattttttttcaggttcctccaaacaaaatagattatgaatatagtgaattgatattataccagaatcaagtgatgagagaggcagatctgttgcaggaatctttggaacatatagaaatgtatgagaaacaaatatgtgataaacttttggtggaagaaattaaaggtaagttggcttgcctttttttaatagcctcaaacagaaaacaaaaaaactatatattttattctctcctaagtcttacgtaacagttgttatgtatctggcaaggttccaaacacgattattaagccattattaactagtttaatcctcataacaaccctatgttgtagttattatatctattttggagatgggggaactgagagattgagtagccccaaatcatacagtttagtaaactggagagtgctggatttgaatccagatttcattcccttaagcagtatattacactgccttcatattgaatatgtatctctgtatatccatatatagttaattaaatacagtgagaaccataactgatgatactgggatcatcatgaacacaaaggtcatttattttcattatgggctaattatgaagacaggatccctatagttttaacagcattcatcaacaaggggtcaaacaaaaattttcacagagctttgctcattaattccctttccctgagcaataatgtattaaattgaatgtccagctaaaataatagtttagaactaaagttccatacaattgtagaacctctgaagtctgaagctcttaataaaaataatagctaatatagattttaaaactcttcttctatttgagtatggtaattgcttaaattgctttatttcatttaattttttagcacttttaagatggatgctatttattaaccccattttatagtggaagagactgaggcttagagaggttaaggacttgcccaaagtcatccagctttttaagtggtagagttatagtttccaagcacatcaacacattccctgacttcagagcccttacttttttctaaaaaatagacattttcaggacagttttaggttcacagtaaaatctagaaaaaggtgcagagagttcccatatatccctgtatacccacagcctttcccactgtcatgctctatgggttttgacaaatgtataatgacatgtattcaccactgtagtattatacaaagtagtttcactgccctaaacatcctttgtttcacctttccatccctcactcctgcaaacccctggcaaccactgatctttttaccctctacatagttttgccatttccaaaatatcatatagttggaatcatacggtatgtagccttttcagattggctttatttttgccaaatcatctcttgcctgagaaagattggcttttttcacttagtagtgtatgttttttttcccataccttttcatgagcgtcttacttttaactactatactctttctggttaatgtatagtacatgagtgatttagtttttattgtaattcatattaatgacacttttaaaagttattgataaaatatgggtaaataattaaatattctggtttctatcttgttctgttacttattgatggtagcaaagaggaaaaaaggcaattattttcctttctgaaatattattgtcatttcctgattaaatcttaactcaggttgctgtttctcttttttggtatttgtcctgtagcatcaataggaaatgcattcaatataatccatatgtgagattatttaatcttaaaaaaaaaaacaaatagggaatgcagttaggttagattatttaatcttcaaaataaaagcaaatagggaatgcagtttttgaaaagtaaatatggtacagtgaaattaattcaagttagtatacaccgtgaatgcattcctctagtaataacctttgcttcatggtagtagcagataacagatgttttttgaaatgaaaaatacgctgttgtctattatatctgggataagcagggtaaaaattggccagaagataatcatggaggaatggggcatgtttaaagttttaagtagcagacatttatatgtattcattttgtgacaggcagtgtgctgtcacaaaggcactttctccacgtcacaaaactagttagtggtggagttggtaattattcctagttcagtcttattctagagtttgagtgatatatgatataaaaatagtaaaaaaaatagtacataagacctgctataatatactgcctcctccaacatgatgaaagcagaaatagtatgacttgaagacattttaaagggttatttgaaatagattgtttggggaatgggtaatcttgagggcaggaagctgaggtatgttcttttttgagaatctcccctttatcttggattaggtgtgtttccatcgtatttgagaggtctgggacctcattttccacaccacctcttaatttgtgtggcttagtaaaaggatttgaccttttaccaacccgctgagctgacctgtacatgaacatggcttgtgtggtttcctgttacaaagtggtgtttagtgttataatttcactgagttaaacttctccagttttagtgaccttgaaacaatgagaattgagtggagaattaatatatgaactgataggaaagatatatttaaatcttgtagtaggaagataggaatgtttcactagcattatttgccaatctaattttgatgtgtttgtgtgtgtctttacttatttcaaagagtataagatgtgtgtaatgcaaaagtttttttactaacaaattaatgtcctatgtatttgtttggagtgtaagagggagccaaaaataaaggtacaaatgaaggttcacttctgaaggcaagctatgcttagttacatgaactgcaacatgcccaaaggggaagcatacagagttctgtctttttaaccatctgttcactgataatgtttagtgaagtccctggggtcagatagatatttaatgtttaaaatgaatatgtctttaaacttaatttcaggggaaatactgttgaaattgggaagattaaaagaagccagtgaagtgttcaaaaacttgattgatcgaaatgcagaaaattggtgttattatgaaggcttggaaaaagctctacaaattagtatgtaatgatttttctcctctttctcataactactgattgaagtataataaaatgtaaagttgtaataatacttgggaacaaataattttagcattagtactcatttttccatttagtaaaattataggttaaacatgggagtaaaaatgaattcaaatagttacacttaagtgtaagtgattgcagatatgttaggttccttgacccttacctgtgatagtattggaaggtgaggcaaaaataaaacaaagccaaaccaaaacaaaaaaaaccataccaatttagagtagggacatgggaaagaaaatgagcattccctttctgggaagtgttgtaactatttaatattttaaaatcattagagattcattaccctcaacctctaaatataagaattgggccaaataattattgttgaggatatttgctttgatttcaaactaggctaatttgtgtagagcaaaatgttacatatcttcctttgaaatttggtaactttgacccttttcagaactctagtgtcagtccaagatttttgtaatattttcataattaagtgttggcaggaactgttaatattcctaaaatcatatttactcatgaataaatatattcctgaaataattatgaagttggctcaaagatgttgaaacagcagaattttttttttttttttttagaatttttaaatttaaaaagtttggtaaataggtagctacccacattcatttatagtagtataagctacaagaaaagtttaattgttgtatcctcactggtattaattctggtgttctttttatgtttaaaatttaacactacaaattgttaaaaatttagtttaagaaaatgattaaaatcacaatattgattaaagtaataatctgaagaaaacagcaaagctcatatgtgtgaaggctgaaaacatgggttaactacgatttttctttaaactagtaacattacgatttataaaaatattttcatgttttactaaaatgaataatatgttccatatgtcaggattcttggttactataaaatgtattgattacaaaactaattacactattgttttaggtaacttatgacctttccttccccgtggtaagttctggagctccaacttgtgactttaagtaggatttatacggcttgttatatctagggtagtggataatttttttttttcatacttggcgcttgttgttctctacgattaggcacgaacatgagagtatttttaaaatacttatatgcagttcatttatgtgttagtataagggtctttaatattttgtgaagtctccaaatcattaacagagagcgaggtttttttttgtttttttgtttttgtttttttaccccccacacatatccttggtcttaaaatccaaccacattggagctccaaaacatattactgggggaaggaatgcgtctaaacgagatcacacctcttcaaatgtggtgtttacaatcttgatgcttgatattaatcttgaatatcaatacttataaactacatttactacagagataccttgtctgctagcacccagggttattcttaggatagttatttttctgtggtttagaccacagaatttggattaaaatctacttaaaactttatagttcaaaaacaggtttgtttgctttttcttaaaattccactataaattatcttattgcttataaatctctttgtgaattatgcaggatattattttagaaagataaactatacccagatcctatttgcttgcttattgttgtttcagagtaacatgtagtttatgtatagatacatcctttatgtggtactataaaattaggtgtctcttgggtgggaagatacaactttctgttagaagtgtaatttatatcttttggaaggataatggagtttcattgaagattttaagtgttaaagttaacatggaagtttagtttatcttcttatattttaaacatttgcaatcgtaatcctaaaactgttgctcctttgaggcttttatggggatatatgtaggtttctttgattcagcgtgtttacgtaggttatgttattagacctacgttataaaaagattttcttttccatgagttgtatgctaaaggaatatagagaagtgcagcatatcttgagtctgtgatggcttgtatatgtgatttgggttgtatttagaatcttgcaatgagagaagttttggatttttctggagatgagtttaaaacagtgacttaactgattatagtattttgccaccacagagttttaaatgtcatttttaccaaaattgaaagcagctttaatattgttaatgcagttttatttataacaaaattttagaagtttgttagcattttaccatagataaaagttttgatgctatgaatctcacccatatttactgataataggcactttagaagagaggcttcaaatttatgaagaaattagtaagcagcaccccaaagcaattacacccagaagattacctttgactcttgtcccaggtaatattaagatgtcttttataatattaattatttgtcagaattactcaatgttatttatattttagaaacgtgtttctggtatagagtttatgtttacagcagtcttggagttgggagtgaacagttatgagtttatatgttaagagtgtgatacttcaatgtgtagttaaatgttgattttaatatttgaagttatctatataaatataaaactgcttttcttaagttgatctcatagaggtagaaagaatgatagatatcagagctggcaaggggagtgtgggggagagatgaagagaggttggttaatgggtacaaacatacagttagatagaaggaataagtttcagtgtttgcagagtaaggggactgtagttaacaacaatatactgtatatttcaggatagcaaaagagaggacttgaaatgttcgcagcacatagaaatgataagtaatcgaggcgataggtaccctaaataccctgacttgatcgttacacgttctctgtatgtaacaaaatatcatgtactgcctaaatatatataaataatatgtattggtagaaaaactgcttttcttaatgtgactttttaaaaagcaccgtatttagaaggtaaattccctataattagtgacaaattatatgtggtatcatgatttgagtggtaaaagttttgaagtttttgtgtttttgtttttgtttccgagacaagatcttgctctgttaccaggctggagctggagtgcagtggcgcaatcactgtagcctcaaacccctgggctcaagctatagttttgaagtttttgtcttcttttttgagcataaattcaaagaaatagttgtgagctgtttgcacccactatggtgttttaagaacagaacatcatcattccctcagagttaaccactttcccgagttttgctttttcttttgccattacttttatttttagagctccatgtattttgtattcctgaaaacaaaaacagcttttgtactttatataaataggagtactccggtatatattctgtgatttgcttttattgtacaatagtatattcatgaccttgagtcgagttattgtatgtagctgaactcatttacttttgagctacataggacgtagacagtatattagctcttcaggtagctaatatctttgttgagtttttaaaaaattatgtgtttttgttgaagtctttatttttagttgtaagtgctatagattatgaattgtatattgggacttctggtatttcttttgacacaagtcagagtctagaaagctaatacaacttaaaagtattctggagaggcgaggagtttattttctattctcatagtggcaaatatttgtttaaatacttgggttataagtttatttttaccaaaatattgatgaaaattaaaaatttttagttgactgacttgtgaaataccttttagaaatgtatttgattagacagtagatagaaattgattttaaaaattcattttatactattgcatttcaattccacatatgaagagtagtgttcttctgatcctccatttttttggttttgtttttgtagaatacagagagcagatttctctaatgttttccagggaacattaagtccaagtggatattaataggcttggtggggagggtgttagtgtgcttttgctgttcttcagccaagtaagtttgggaaactgggttagacacagctatcaggtttctataggacttctcagagcttttaatatacactttgtgaatttcaaagatgggagtatatgcgtagtgaggagtattttccctaataaaagtgtcttgtggaagatgcttaggcttacatttctgtatttcttccttctcctctttgttttaaaaaataatagctttttgaaatataatccatataccgtaaaactcacttttaaaaagtgtgtgcaattcagtgttttagtatattaatcatgttgtgcaaccatcatctctgtctgctttcagaaatttttcatgaccccaaaaagaaaccccatacctatttcactccctgtcacccctcaaccacagcacctggcaaccacaaatctactttctgtacctatggatttgtctgtttttggacatttgaaataaatggaatcataccatatgtggtctttagtttctgacttctcctccttttattggtctcaaggtatattttgtgtttcacaatatattgtgtgtgggggggatatttccttaggagctttaaaatacattcatatgcttcttaggaaagaaagaaacctcgcttagctttaagattacgaacaagacttctttgttctctttttctcatttggaacatggggcttcaggtttatactgcctaaatttatttccatagacaatataagtttactaaaagccctcaatatgtggcagtatagggtaggaaatatatttttactggaagagcttagagtttttttttttattgtaaagtgtgatttaggttaaagtggaaccatcctagactctctaggacatgctgtctttgaaatgccataaaaatctttttacaaaacaggtctcagtggaggggtctgatggcataggctttcaaggtcatcatcgctttgaggttctgacaaatgtgtatttacaaagctccagtgaatatatataaaattatgcaaatacttaattttctctgtgcaaagccgaatatttcatgatttttttgcctgtctagaagtgcttttatgtgcaattagaaagccgtcttggcattatcaaaagcagtaagatcttcctcaagaaacatgatgcatcttgagaatgcaaggtgaaagttttgaaaaagcctttccactttttaggtaaaagggcttcatacctacagaacaataaggaaattttctaacacctgaaaatattaagcactctaaaaataatgaagggataaagctgcttttcaaaataatcagttcatcatgttccattatgcactggctgaagggtagagagagggaaggaaataatccagagtattaaacatagaatactaattatattttgctccattatttagaacggatttccagtgaataagaaacagtctattcttgctgtttacactgattattttaggaattcatgtaaatatggacatcatgttttggggacatcatgctaatgtatctagatgagaattattcaggtaacctgttttgtgagcagtaatactaaacaggcacataataattgatggaaaaaatgagatggataaataataagtaatctggggatatggtatgtgactgagcagttgggtagctgtgtaggcttcttgtttaggtgatgtattcacacagttgcaaattaggtaaaaagagtttataagtgaagtctttttcttgtctgtcccctggcaactaagtttactttcctgaagacatccattgtgatcagctgatggtgtattcttctacaaatacattgtgcatgtgtgagccaaaatatgtgtgggagatttgtttaaggtcaccccccccactgtgctttttgcaaaagtgcagtaacatggattgatggattgctgcgcacctgggttttcttttcacttaacctcgtatttggagattagtcctggatcagcacttcaagagcttccccattctttttcatacctgcacaatctaatcaaatttgtcaatatgatctgaatagactgagaaagttgaccaaggaggagttcagagtggcttctgccatgaagataaaaggcttgtttcctcagcgggtgattgcaagaatagaaaacaaaatattaactcgaaaatataaaaactgtcagatatcagagaagagacatttattgagtgattactacgtgcaagacattgtttactgttatattcttatctcgtttgagccatacaaatgtactcttgaggtcagtgatggtattgccttcattttacagtgataaaactaaggtttttaatggacaagttatttgcccaaggttgcacacaaatacgtggagaagtctgcattcctctaagaaacagcgtctcttattgtctaccacaatattgttaatttcgttgtataccagaggaattactggaaaggttcggtctctgaaactatttttgatttttaaagaagcagtggtgtataatttaacccaggatgaagttttatgttgtcttcgtaatctgtgatttttcaaaagaccagtattttgtgtatgatctaataagagattagagattatctgaatacaatctttatagttaatggagttaaatttttttatgacatctaattatattgagtatgcatgcatgttttgttcaacatagtcacaacaaataaaaataaccattttgggttgttagattttgttgtgcagtgttgtgattcattaagaaaccataggaggtcatttcagtcatcttacttgaggctaaatcattcatgacatacatgtgtttttttttttttcccccaaatgattaggtaaatccatgtccttatgtattagtccatactgtcaaaaaattcttgtatctttgtatttaaaattaaaattctttgaatattctctgctttcaaaaggtgatgacaaaaatcatttctggggtttagcaatgaaagaattattgacttgatgttgcaaatagggtatttatttagttgtaatgttagaatgcccatggctcagtctaatgtctaacataaatttactttacttttattgttggtctcactcactgagatgttaagttctatttaaaaaaaaattttttttttttaaattttaatcactgctatatcctcaatacctagaacagtacctggcatgtagtaagtgcttgacacattattgtggaatgaatgaatgaatgaatgagtgttgaagtaaatgacaagttgatttgggaaaacatttgtaaacaccagcttagtgtttaaaaagatcttttggctatcacttgaatatagtgctggtagtctgctgcagagtgctttatgcatatctgcagggttttgagctgtagactgagtgtgctagtcagtgagagattaggaaagatatttgatattgtgctaaattcagaatggatagttgataacttttacttaaaactatgactttttgggtttataaattggataggagcataattgcttctgagggagctttatttttatttagaaaatcattttaagaattgtttgcgtgaaccaaagaataacaaagtacgcttttgtttctaggtgaaagatttagagaactaatggataagttcctgagggttaacttcagtaaaggctgcccacccttgtttactactttgaaatctttatattacaatacagaaaaggtaaaatttggtatttattcagatttgctatagtcttttttactaaactgtagaaagatgtccatgtaaataatgtgctattacttaatcattttctttgtttcagtaatgttaccttactttcagtcatgtactgaaattacatgcctgtagtataagtaatatcaaagtaaagggtttatgaaagcactaagattataaaggttgtttatttttaataggtatacttttttttagtaggattttaaatttgacattgttaccaaaggtatatatttattttgtgattattattttatggtacagttatggatttttaaattagttatgcatgcttttaaagttagagcttggataattgagttagtgcaacagtaaaatgcaatttggtcaaattactggtacaaattactaggtttaatcagtaggctacattttaataaatacaggtttagctagttcttgaataaagaattgtctttctgctttttaaaattagaaaataggccaggtgtggtggctcatgcctgtaatcctagcactttgggaggctgaggtaggcagatcgcgaggtcaggaaattgagactatcctggcgaacacggtgaaaccccatctctagtaagaatacaaaaaattagccgggcgtggtggtgggcgcctgtagtcccagctacccggaagcttgaggcaggagaatggtgtgaacctgggaggcagagcttgaagtgagccgagatcgcgccactgcactccagcctgagtgacagagcgagactccgtctcaaaaaaaaaaaaaaaaatttcgaaaataggcacttaaatcttggtcttaaattagaaagataattaaaagttaatagaaagcaagttatacttttatttccaagtgttgcttcttattaaagtctaaaatcttgttgtcttttctatagtcagttttttaaagttactactggataaggaaaagattttattagaaatgccaaaaaaattttagttaagcttctgtcatatttatttagctttgattcataataatttgtaaatttgcagtaattgtgaataatacaatgttggaaacatcagttatagatatagctgattggcattttcctacctgtggcagcaggtttcataaacaaaagaaacaactgatgatatctagtacccagttagaaaaaaacatcatttatgttaaaaaaaacaaaaaaacccaaaaaacccttacaattccttaatgtctgttgtatggtctatttgactgcagtgtttctgttgtcagttttttgagagatagtgattgatttctgtgtaaacatgtacccggtgcctgccaataatttctctagattatttaacattgggtaaaattcttttgttctttttggtgagggtgacagagaagaaaggttagatgaaatgccagaaataaaaagaaatcttatgtatgtgaattagagtacttcttttataacagtattgcagcagctactgactacagtggacattaaaggatttgtttctcttaagctatcacggggctttcacagggtgttgttcataggcataggctttttactttttaaaaattcttctaatattgatccaaagttgccattacaaaaatgctaaactttttttttggtattttatataaagcatgaaaattatgtttttgaataaggcactgagaatacactaattcatacaggaaccatctctttagtgttaattttaaagcaagcaacaggaatgctatattattagaaatgccagaacaccaagtgtgtttgcaaaatgaattaaactgcagaaaattgagctccagttatctgaatttagtatagtgagaaaaaatttgcaagtctaagaactgtttctcaaataattttggccacatgtatctgtgatttactcatgagaccattttatttattttattttttaatatttatttttcaattaaattttgtaagttttgtgtttgactttttttgtagtttcaaaaaaattatttcaatagattttggggagtaggtggtgtttggttacacagataagttctttagtggtgatttctgagatttttggtacacccatcgcctgagcagtgtgcactgcaccccaggaagccattttaaaaactgcacatttctaagcagcagtaagacctgtttttagtagttagctggatttttaactttcgaggaaggatttcaaggaggtgaagtatgacaaacagctattgtttgtaagtttccaaatattaaagagtaattcatgttggtatcatgaaaatgaaattgtcttttgaagttagtttagaatgtagtacagttgcaagaaatgtatttcttgtttttgttgttgttgtttgtttgtttgtttgtttgtttttgagtcagagtttcgctcttgttgcccaggctggagtgcaatggcataatctcgcctcaccgaaacctctgcctcccaattcaagcaaatctcctgcctcagcctcccgagtagctgggattacaggcatgtgccaccacgcccggctaattttgtatttttagtaaagacgaggtttctccacgttggtcaggttggtcttgaactcctgacctcaggtgatctgcccacctcggcctcccaaagtgctgggattacaggcgtgagccaccgcgcctggccgaaatgtatttcttaaatgtctccagcatttaaatttttttggcaaactagagtttgggtagagtggaaggcaatgagtggttgtcagacaaattccataacttttttttgtttgtttgttttgtttttgtttttttgagatggagtcccactctgtcgcccaggctagagtgcagtggtgcaatctcggctcactgcaacctccgccttccgggttcaaacgattctcctgcctcagtctcccaagtagcttgggaatacaggtgcctgtcaccatgcccagctaattttttgtatttttagtagagacagggtttcatgatgttgaccagggtggtctcaaactctggccttaagtgattcacccactttggcctcctaaagtgctgggattacaggtgtgagccactgtgcccgactaagttgcataaggtttttaaaaacataggtaggtatttgaaatggcactcattttacttttgtcagtgaggttttggagaaatctttggtgaagaaaaggagaaattctcattttcccagctttctttaatgttgaaatagaatcttctataaactctgatatcaaggtgttcttgtcttttataaataagaataaaatattactaaaaatatatttatatcccttttaagttagattttgttaaagttaatattgttttgtttcttattatccattatataggtgtcctgtccataacagataacttgctgagatgatatacatttgcttacttgttttgaaaagtacttaaaaaaaattgccagtctttgagtgaggctttggggtctctccattttgttgatcttttcaaaaaaccagctcttggattcattgatttttttgaagggttttttgtgtctgtatttccttcagttctcctctgatcttagttagttattgccttctgctagcttttgaatttgtttgcccttgcttctctagttcttttaattgcgatgttaaggtgtcgattttagatctttcctgcttttcttgtgggtatttagtgctataaatttccctctacacactgctttaaatgtgtcccagagatcgtggtatgttttgtctttgttctcgttggtttcaaagaacatctttatttctgccttcattttgttatttacccagtagtcattcaggagcaggttgttcagtttccatatagttgtgcggttttgagtgagttttttttttttttttttttttttttttttttttttttttttttccgagacggagtctctctcattgcgcccaggctggagtgcagtggtgcgatctcggctcactgcaagctccgcctcccgggttcacgccattctcctgcctcagtctccagatcagccgggactgcaggcgcctgccaccgtgcccggctaattttttttgtattttttagtagagatggggtttcaccgtggtctcgatctcctgacctcgtgatacacccgcctcggcctcccaaagtgctgggattacaggcgtgagccaccgcgcccagcttgagtgagtttcttaatcctgagttctaatttgattgcactgtggtctgagagacagtttgttgtgatatgttttcttttacgaaatgctgaagagtgctttacttccagttatgcggtcaattttagaataagtgcgatgtggtgctgagaagagtgtatattctgttgatttggggtggggagttctgtagatgtctattaggtctgcttggtacagcgatgagttcaagtcctggatatttaggttgctgtatatagcatagagatttcagtatctttcatgctttactgaaatagtatcatttttactgaagataatgataagaatatttctaacttaattttttgtggatatcatctcattgaaaatatcagttgtgtatttataggtaataaccaactttaaatgttctggtaatatgtactgttttcttcttacaagtgattacaagaaaaaggggacaacttgccagccgtggtggctcatgcctgtaatccagcactttgggaggctgaggtgggaggatcgcttgagatcaggagttcaagacaagcctggcaacataacaggactccgtctctacaaaaaatgaagacaattagttggtcatagtggcatgtacctgcactcccagctacttggaaggctgaggtgggaggatctcttgagctttggaggtcaaggttgcagtgacctgtgatcaggccactgcactccagcctgtgccacagacttgagaccctatctaagaaaaaaataagaacatctcctacttttagagaataactgttaagtacttgaagtgcacagatgttttcatctgtcactttgtattgtagtctttcacatattatatcagaccaaacctttttttttttttgagacggagtctcactctgtcgcccaggctggagtgcagtggcgcaatctctgctcactgcaagctccacctcctgggttcgcgccattctcctgcctcagcctcccgagtagctgggactacaggcgcccgctaccatgcccggctaatttttttgtacttttagtagagacggggtttcactgtgttcgccaggatggtctcgatctcctgacctcgtgatccgcccgcctcggcctcccaaagtgcagggattacaggcgtgagccaccgcaccgggcctctctctctctcttttttttttttgagacagagtcttgctctgccgcccaggctggagtgcagtggcacgctctcggctcactgcaacttccgcctcccaggttcaagcgagcctcctgcctcagcctcccgagtagctgggactacaggcgcacactgccatgcctggctaattttttgtagtttagtagagacagggtttcctcgtgttgcccaggctggtctcgaactcctgagcgcaagcaatccgccatccttggcctcccaaagttccagggttacagacgtgaaccatcgcgcctggcccagaccaaacttttattatgaataattgcttactggctctataaaatagtgtccatttcttctaagtgtgaataaagaaccttgcctagtaatctttttgattgggtctcaatccttctgttcccgagttggcataacagcaataataaaaaatcaaaactagaaacaaacaactaacatagtattcacaacatctgtagcagcttaatgagaagattttatatgtaccatagtctgctggtggtctgagtcataatgccaacaaattatttctgtaacgcccatagataagttgtccagtgggacagtgagtgagatgtttgaccagccatttcatatggtacacaactaatgtgtgttgtgtattaccatttcacattgatgatatttataaggaatcttatctcctcacttttctgttggcatttgtgtaagtttgtagcactcttccatcagtttccgtgttctcaaatagtaaaagtgctgagtaacttggcacaaaagtttagaagtaatttttcatcaaaaaagtgctataattacaatatagaaaatttggaaaacagaggaaagatcttaaaaaatgggagggaagcccaaacaaaatccaattataaactgccacatgactatacaatttaagagcatttacacatttatttatttattttataaataagtgaaatagcatcttgatctgtctctcaggctggagagcaatgaatggcccaatcgtagctcactgtagccttgacttcctgggttcaagtgatccttccgtctcagcctcttgagtagacgcgtgccacgatgcctagttaattttttaatttgtagagatggggtcttgctgtattgttcacgctgatctcaaacttctgggctcaagtgattctcctgccttagaatcccagtgcactgcgattacaggtgtgagccaccacgcctagctctaagagcattttaaatgtaattcctttcacagtttttttttactgtgaatttaattgtgatgtatctatgcagctgtagtcattttgaccataaattttgttctttgttttccccctagcagtttctttttaaaaatttgtttttgtttttggtttttttgtttggagtctcgctctgtcaccaggctggagtgcagtggcaccatctcggctcactgcagcctccacctctgggttcaagtgattctcctgcctcagcctcccgagtagctgggactacaggcgcacaccgccacacccggctaattttattttatttttttgtattttagtagagacggggttttaccatgttgcccaggctggtctcgaactcctgagctcaggcagtctgcccgccttggcctcccaaagtgctaggattacaggcgtgagccactgcacccggcctagaaattttttttatagaggtggggtctcactgttgcccaggctggtctcaaaatcttggactcgagagatttgcctgccttggcctcccaaagtgctgagattgtag

SEQ ID NO: 646 - DNA, 32744 bp, Homo sapiens
  source 1..32744: mol_type = other DNA
ggggtcacgtggtgcagagcacgcagagtccttctgtcggttggtcctggagcggcgcagccggagtggggccgtgaggtgagctcgcggccaggcgaagccggccggccgggccgggttgggccgggcccgcgctgcgcgcgcgccgtgcgggcggggacggcgacggacgccaccgctgcttcggtcccctgcccggccccgctccccgcctggccccgctcgcccagcctggagggaggccctgggactgctgctgagagcgtggcgggcgtgcgagcggtgcccaatccccggggctacccgcaagagtggcggcggctgccgccaatcagcgccgcccgagggggctgggccgtggggtgcgggcccggggcgcggagcgggccgtgttgggggtgcgggtaagccctagggcccgagcctgagctgtgtgggcacctagagcctcatcagcagcctctgctattgccttgcgctttgggaatatgttttttaaaattggctttttttatcctattctggggagcacattcctttctcaagaccccaaatatgggagtgtcccttttctctatagttttgaaaactgggcggcacaccccctttcttaagctctagctctggaattttatctaaatttctaaaagccctcccccccccaaatttagggcgtaccctcttccgtcagcccccaaagtgggagcacattccttttttcgggcctccaatttgattctgcatttccgttccaatttagaggttcaccctgttatcgggtcctcagatctggggtccattagctaaagttttgggatactttcttgtatcccctctactccaaggaagaattccccttttccaggtcccaaatctgacagcatgccttctggaatttcttacatttaggggccacttcctttcctcagcccttcaaacctgaggttgggccgaaaacaatgtccaaattttgaagtttatgggtacttatttccagtttcacaaataagggaattcactgccttctcccgagactgtattattggggttacacacttttcacgtgttccccaaatcaaactaccttatttcctgaaggagactcattttcatatctgggagtatatttgtttcttgtgccccccaaatgtacgaggtgaaccccttttagttatacaactctcagagtgcagccactttccagatgcttcttaaatttggggggcacacctttttgtgagtcctctcatttccaggtggcgagtggtctgtggttttgagcatgccttcctaccctgtttagcttttctgtcatccaagacattttcattcctcagtttccttccctttttggagccacactccccttgaggtgctttccccagtctggtcagtgcacccatttcctcttcctctggcgagtgcgtatctttgttcagcacggcacttttctctgtgcttctgcgggcttttcttctgagcacacttcccagagtcacacctcctgaattctcctctcctcccagggaaggattcctctcctaaagggctaccagcacattgtttttgataggcctatcttttatctttccgctagcaggatctcttctctcttggcttgcccaatccccaaacatttttctggtttctgtctttctttggaattgttctgtttacctagtggctataaagattttccttgtgctggaggtggcctcaagtctaggactgcctgggcccccagcgctggattcaaagtggaaaccatttctttggttaatcacaggactctgaatcctcctggtggtttacttctagaagacctaagattctgtttaggtgcatactgttttctcctttgctttatctccttgtgctggaaaacaaaaacaaacaaaactctcagatttttccagcactgcttctagcccataaacttcttccctatattggctttcttactatcttttatgaagaaaagatgtcgtttggaggaatcccttggatactctttttgttcttgtccctggggtgtcggtggggaaatggatatttttctctcccaatcatcctcttgtcaatcttctttttttttttttgagacagagtctcgctctgtcgcccaggctggagtgcagtggcgcgatctcggctcagtgcaagctccgcctcccgggttcacgacattctcctgcctcagcctcccgagcagctgggactacaggcacccaccacaccgcgcccgtctaatttttttgtttttagtagagacggggtttcactgtggtctcgatctcctgacctcgtgatccacccgcctccgcctcccaaagtgctgggattacaggcgtgagccaccaagcccggccaacctcttgtcaatctttacccccaatcctcacattaaaatctgcaaatatctgggacctcctatctcttaagagcctcaatagttctttcttttgtgtttccttctgcctttacagatcttattcagggcttctcagcctgaacccccaaccagattaatttctccacagctggaattccaagtgcttggggataatgatacctctgacctttcttccttttgggaagtacttgagtgtgcagctgcatgaggcctcagcaggagagagattttaggtccaagaagctataccagtaggacaaggcaggaaaatactacactttcaggatcaagcccctctgactctcatttggaaactggatgtttgctaagcacctgcttcttaaggatgccgagggatttaatgatactcccagaaacctggagagattaatggggcctatggagaagtgctctgaactcagtgttgggacttgaataaaattaaccattgtcatgttttcagaacaactaagctgttttatatttcatgtgcatgaaagccctagaactaagttgtgttatttccagaaatgaaatagatcccacagttagatgatgtggccattaggaagtaccaaatttataaaaatcactggaggtctgtctgagcagtacctaataaaatatagtatactgaaagtgaacagatactttgtctctttctttggctgcttgatactttatctgtgtactgccgtacagtgcacccttaaagtattctacaccagtgcttctcaaacttgaatgtgcatgtaagtcacccaggggtcttgttgaaatgctgattctgatttggtagatctaggatgggacctgaatgcatttctgatttgcaggtgatgctgatgttactgaactacacttttagtagtgaggtttcatacacgaagacaaagtttctctgtgaaaataggaaggtggtggttagccttatatttttttattttatctttatccagacacacatcccttaaaagtttgtacaaggccatagtcccctttattagttatactcaattagttattctagcacatagctttttaaatattggccaaaactggctgggcacggtggctcatgcttgtaatcccagcactttgggagctgaggcgggcagatcacgaggtcaggagttcgagaccagtctggctaacacagtgaaaccctgtctctactaaaaatagaaaaattacctgggtgtggtggcaggcacctgtaatcccagctacatgggaggctgaggcagaatacttgcttgaacccgggaggcggaggttgcagtgagccaaaattgcaccactgcactccagcctgggccacagagtgagactctgtctccaaaaaaaaaaaaaaaaaaaaggccaaaacttctccaggagtttggtttctgtgtgtatatatatatattttgggtggggacagggtctcattctgtcacccaagctggagtgcagtggtgtgatcacggcttactgcagcctcaaccttctgggctcaagcgatcctcccctcagcctcttgagtttcagggaccactggcacgtgccaccacacctggctaattttaaattttttgtagagatgagatcttgccattttgcccaggttggtcttgaacttctgggctcaagcagtcctccaccttagcttcccaaagtgttgggattataggtgtgagctgccatgcctggctattgccaaatttaaatggttacatatttcttacttgaatgtgaacataattattgatatagaatcattctaataaatactgcatagccagcttgtctgtctggttcctcatcctaccatgagtagggagtctgtgataccccaaatcagtgggtcacaggtgttggaatttccaaagagtccttcttggttttctgggttctggaaatgggccaggaaaagccaggataaagctatgttccccgacctcgaatggaagcttctggctttctctaaatgggtgctccagaaagacaaatgctggggagaagatgatattctttgatggtgatcatgctttatgatgatctttctccttttgtacccacatgtctaatctattctaagtctcaagtgggtttttccttttttcaaaaaatttttttggagacaaagactacctctgaaagtgtttttcctttctaagtgtgttggatcatctgtacctatttccctggctgtcacctgtctggccctcttccacgtgatcctgttgccagccctaatcaggacaaacctgaatgactagactattttgtgtccctgtcctcctccaacccctattcctcacatgagtgtcagatcctattcagtaacggatttgatctggatttggctctagtcctagctcttccatttactgtgagacctcaggcaagtcacttaatgctatgggcctgcttctccccatttgtaaaatgaggggctgatgatctgcaatgtccaccctggctgaatcttggtcgctaccttgcttagaaaccccattgcctgtggtagcttgttgcagcagatctgatttctttcatgtgctcccttgggcagcctgccagttattcccttgtccaagtcacttctgccattatctttttttctagctgaggcagccagcttgttctcaacccaacttcagcgttcttcttgcttccatgtcttcttccagttccatgctgtatttcattcagaactacctgaaatcctcaaagaagtcttcctgagttctccattcaatgtttgtgacttctctgccttaccaagaaggagtctgtaccttatataccccgtatttacttgtcagttctcttatctaatgtatacttaaaaagggacttcatttcctccataccacagctttgttttttggtttgaattagcagggcaggtggcatgaaatttaaagaggaagcaagcaggttgtttgcctttggctgggatttggggaaagtatgagatgtaatgtttttagtccccttccccaagatctcctgtatctgtgggaatcagttgcctggtatgtcttcctggattgtaaaggtgcttaaacttcctttctgaagtttgaaagtgtatcctaagtgcaaataccatttgacaattactcgtggttgggtgggtgcagtggcttacgcctgtaatcccaacactttgggaggccagagtgggaggattgcttgaagccaggagttcaagaccagcctgggcaacaaagtgagattcctgtctctactcccccaccaaaaacaaaaaagtagtcaggcatggtggtgcgtgcttgtagtcccagctccttgggaggctgacgagggagttcagagtctgcagtgagctaggattgtaccactgcactacagctgggtgacagcacgagaccccattgcttccaagtgctcttctaggaacacacagccacaaaacccagaacaaggaattgttaaggataatgataagaaatctgtatttcaaataacttaacaaatgaataaaaccaacagttctttgagagcacctgattattgtcaaagacagttgctgagggggcttggaagtcaggacttaaaggtatatttaacctctggagttttcttctttcatcatcttcctaagaaataatagggaggatgtttacatttttcttgataaagtctttttattaattttatttatttatttattttgagaaagggtcttgctctgttgcctaggctggagtgtagtggcgcagtcttggcttactgcaacctgtgcatcctgaattcaagcgattcttgtgcctcagcctcctgagtagctgggattataggtgcgcaccaccatgcccaactaattttttgtagttttagtagagacaaggtttcactatgttggttaagctgggacatttttcttgataaacattctttaaaccaaaatgtatgcttagtcaagatccttgattggattatgagcctagagaaaaggagggtgatgtctttgtctaatccatctttgccagtgactgccccttacaggctattgactatagggtaacctaatgaaaattgagacaggcactgtggctcacgcctgtaatcccagcactttgggaggccaagtcggatggatcacctgaagtcaggagttcaagaccagcctggctaacacacagtgaaactccgtctctactaaaaatacaaaaaattagtcaggcgtggtggcaggtgcctgtcatcccagctactagggaggctgaggcaggagaatggcttgaacccgagaggcagaggttgcagtgagccgagattacaccactgcgcttcagcctgggcaacaagagtgaaactgtgtctcaaaaaaaaaaaaaaaaaattgaacccttaatttgtaataatgctttgacaactttgctagatcttgggctaggtcctacctggaccttcctctcttttgccaaataatggaactaatgagctggcagaaatcctgtacaattttagaagcctaatatgagtgactaaatgtaaataggacagttttaggaaagagtggtggagcctgaatcagtgaactttggggaaggagcaagaggaggggcttgggatttaaacaaagggtttttttttgttttgttttgttttttgttttttttttgaggtggagtctcacttcgttgcccaggctagagtacaatggtgcaatctcggctcactgcaacctctgcctcccggattcaagtgattctcctgcttcagcctcccaagtagctggtactacaggtgtgtgccacctcaccctgctaatcttttatatttttggtagagactggctttcatcatattggccaggctggtctcgaactcctgacctcatgatccgcctgccagggcctcccaaagtgctaggtttacaggtgtgagccactgcgcctggcctaaaccaaggtttttattcagtgatagtttattccatgtcaggaacataattctcagattttaaaggctgacttccaggtatcttagaaggatatttgggggtctctgtcctagtagagacctgattttcaagaggtctctttctcatatggaaaaagtccatagctggtggattgacattcctttctttctttttttttttttgttgaggcggagtctcactctgtcgcccagaagtgcagtggtgcaacctcggcacactgcaacctctgtctcctgggttcaagcaattctcctgcctcagcctcctgagtagctgggattacaggtgcccgccaccatgcctgggtaattttttgtatttttagtagagatggagtttcaccatgttcgccaggctagtcttgaactcctgacctcaagtgatccacccgcctcggcctcccaaactgctgggattacaggcgtgagccactgtgcccggccaatgcctttcttgcttctacaggtgcacaggtgttgggatttcgaggttgtggaaacttggtctggaaatgtgggcattttacaataatgataactatagctagcatttttggagcactgtcttaaatgtcattgaatccttacatctgacctattatcctgtcctaacagaggaggaaactgagatgagtaatttgtccaaggtcatttggctaataagcagggcctcgattggagtccaggtttctttgcctcctgtcccagtgctcttacatccctctctctctagctaacgtgctttttcccctagaaatttgagtaagtcattttaactacaaatcaaacaggtggcagcctggaaaccagcactgaggcactttgccaccctcaccccagatttcttttttttttttttttttttttgggacggagtctcacattgttgcccaggctggagtgcagtggcacaatctcagctcactgcaagctccgcctcccgggtttacgccattctcctgcctcagcctcctgagtagctgggactacagatgccctccacgatgcccggctaattttttgtatttttagtagagacaggggtttcgccatgttagccaggatggtctcgatctgctgacctcataatccatccgcctcggcctcccaaagtgctaggattacaggcatgagccaccatgcctggctcattcttttttcttttttttcttttctttttttttttttgagacagagtctgactctgtctcccaggctggaaggcagtggcatgatcttggctcactgcagcctccgcctcccgggttcaagtgattctcctgcctcagcctcctgagtacctgggattacaggcgaacaccaccacacccggctaatcttttatatttttagtagagacggggtttcaccatgttgcccaggctggtcttgaactcctgatctcagatgatccaccagccttggcctcccaaagtgctgggattacagacatgagccactggtgcctggcccttttttttttttttttttttttgagatggagtttcaccttgtagcccaggctggagtgcaatggcacgatcttggctcactgcaacctccgcctcccgagttcaagtgattctcttacctcagcctcccaagtagctgggattacaggcatgtgccaacacgcctggctaattttctgttgttagtagagatggagttttaccatgttggtcagtctggtctcgaacccctgacctcaggtgctccacccacctcggcctaaagtgctgggattacaggcgtgagcaagattttattcttttttttttttctgagatggattcttgctctgtcacccaggctgaagtgcagtgacacgatcttggctcactgcaacctccttctctggggttcaagtgattctcatgcctcagcctcctgagtagctgggattataggcctgcaccaccacatccggctaattttcatatttttgatagagacgggtttcaccgtattagccaggttggtctccgcccgcctcagcctcccaaagtgctgggattacaggcgtgagccactgtgcctggccttcattcttgaccatgcaaaacatcctttaattgtagaagcccagttctcccaactcaagctgcctttctacatttttctttcttcttcaatttttgttgttgttgttgtcgtggtcagatacacataatataaaatttgccattttaaccatttttaagttatatagcttactggtattaaataatgttgtgcaaccatcaccactctccatctccgtaactcctcaaaattgaaactctgggccgggtccagtggctcatgcctgtaatcccagcacttcgggaggctgaggcaggtagatcacttgaggtcaggagttcgaggccagcctggccatcatggcaaaaccccatctctactaaaaatacaaaaattagctgggcgtggtagcacatgcctgtgatcccagccactagggagcctgaagcaggagaactgtttgaacgcgggggcgggtggaggttgcactgagccaggattgctgcactgcactccagcctaggtgacagagcgagactccatctcaaaaaaaaaaaaaattataactctgtacccattaaacactgactccctctttcatgaacctcctcccagccccagcagctaccattctactttctgtctccatgtttttgaatacttttctgccttttttgaggctcctgggcatgactggtttgggttgcttgactgtcccttggttccatggagtattgaattctgtgtaatgtgctttgatgagtaggaaattggtcgtgctgtgacctatatgataattagacatgtgcaacttgtaaaggcaaggtaattaaagaggccacttttctttttcttgttttgttttttttttctttttttcttttttttttcttctctttttgagacattctcactctgttctccaggctggaatgcagtgacatcatctcagagctgactgcaacctctgcctcctggattcaagcaattctcctgcctcagcctcccgagtagctaggattacaggcggatgccaccatgcccggctaatttttgtatttttggaagagatgggttttcaccatattcgccaagctagtcttgaactcctgacctcaagtgatccactctcctcggcctcccaaagtgctaggattacaggccactgtgcctggccaagaggtcacttttcatgtccaggctgcatggtatgtggtggtgaggatgtaggatttggaggtggaatgcctgagtttgagtgcctgtatttgccactctcttggggccaaatgtaatttgggcatatggcttaaacctcttgaacctttcattgtgttatgcacattggaggcagaactttccagcctagcaagttacttaacctatatgagcctgtttcctcacccaagtattatcataactgtctgacatcagtcattggaaatatcagtaaatgttaccctttccctccatttcctaatctgtaaaggaaattaaagaaacctggtttggctgggcacagtggctcatgcctgtaatcccagcactctgggaggccaaggcaggaggactgcttgaagccaggagtttgagaccagtcctggccacagagtgaaacctcatctctataacacagaaaaaaaaaaaattagtttggcatggtggtgcacgccttgtagtcccagctccttgggaagctgaggtggaaggattgcttgaacccaggagttcaaggctgcagtgagctatgatcctgccactgtactccagtgtgggtgacagtgagagcctgtgtttaaaaataaaaaaaagaaaagaaaaagaaaacatagtttatagagttttcctggcttgaagatttatgaggagttgagtatatgttaccattattacttttgttttattcctctcagaaaatgtgtgtaaaattcctccatgggcccttcagtgggccttgttagtttgtatttcatccataactttatcagtagtgtatgccaaagaaaaagactcttactttttttttttctttatgatggactctcactctgttgctcaggttggagtgcagtggcacaatcacagctgtcttgcagcttcaacctcctgggttcaagggatcctcctgcctcatcctcgtgagtagttgggactacaggtgtatgccaccgcgcttggctaattttttttttttttttattatttatagagacgaggtcttgctatgttgcctaggctgatctcaaactcttgggctcaagtgattctcctgcctcggccttccaaagtactgggattggccgggcatggtgcctcactcctgtaatcccagcattttgggaggccgaggtgggcggatcacctgaggtcaggagttcgagaccagcttgaccaacatggagaaaccccatctctactaaaaatacaaaaaattagccgggcatggtggcacatgcctgtaatctcagctactcttgggaggctgaggcaggagaatcgcttgaacccaggaggcggaggttgtggtgagccgagatcgtgccattgcactctagcctgggcaacaagagtgaaactccgtcttaaaacaaaaccaaaccaaagtactgggattataggcatgagccactgtcccgcccttacgtttgtttgtgtgttttttttttttttgagacagtgtatcgctctgtcccccaggctggagtgcagtggcacaatctcggttcactgcaacctccacctccagggttcaagcgattctcctgccttaacctcccgactagctgtgactacaggtgcctgccaccacgcccggctaatttttgtatttttagtagagatggggtttcaccatattagccaggctggtcttgaactcctgaccttgtgatctgcctgcctcggcctcccaaaatgctgggattacaggcgtgagccactgcacccggccacattttttttcccctcattttcacacacacaaaactaacagtaatcccttaatatttttaatgttgaaatatcccaaagactttttttttttttttttttttgagatggagtctcactgtgtctcccaggctggagtgtggtggcatgatctctgcttactgcaacctctgccttccgggctcaagagattctcctgcctcagcctgccaagtagctgggaatacaggcgtgtgccactatgcccagctaatttttatgttgttaacagagatggagtttcaccatgttggccaggctggtcttgaactcctgacctcaggtgatctgcccacctcagcatcccaaagtattgggattacaggcatgagccactgcactcagtcccttgtttttaaaagcaataaaggttagtgggggccgggtgcggtggctcacacctgtaattccagcactttgggaagcttaggtgggcagatcacttgagctgaggagttcgagactagcctcggcaatgtggcaaaaccccgcctctataaaaaatacaaaaatgaggaaggggtggtggcacgtgcctgtagtcccagcactgggggagctgaggtggggaggatggtttgagcctgggaggcaaaggttgcagtgagccaggatcatgccgcttcactccaacctgggccacagaaacagaccctgtcttaaaaaaaaaaaaagagggtagtgggttttggaggaaggaggtcttgcttctgaagtcccagctcttctatctagccaggtgactttgggcaagttgtttattgtttatactccttcgtaaaatactgctgacttctctgcattgttgggaatgagatgtttgtcaaggatttagcatgtggtgataaatcagtaaatgttgaatatttcctggtattaataataaaggctaggaataaaaattcatacttaaaggaaaatggacttttatttatttatttatttttgagacagagttttgctcttgtcacccaggctggagtgcagtggcacaatcttggctcactgcaacctctgcctcctgggttcaagcgattctcctgccttagcctcccgagtaggtggtgctacgggctcctaccaccatgccgggctaatttttatatttttagtagagatggggtttcaccacgttggccaggctggtctcgaactcctgacctcaggtgatcctcccgcctcagcctcccaatgtgctgggattactggtgtgagccaccacaccctgccaagataagggaattaatgaattgtctcataaatatcttaggtatttaaaactccataggcatgaaaatgtctctcaaggccctgttgagtaatgatttcatctccaaattgttttcctttgtaatatggtgatatttcaattaagaaattctgtaagaataggccgggtgtggtggctcacgcttgtaatcccagcactttgggaggctgagaccagcctggccaacacagtgaaatcccgtctctactaaaaatacaaaaaattagctgggcatggttgcaggtgcctgtcatctcagctacttgggaggctgaggcaggagaatcgcttgaacccgggaggcggaggttgcagtgagctgagattgcaccactgcaccccagcctgggcgacagagcgcaactccatctcaaaaaaaaaaaaaacaaaaaaaaaaacaaatcttgtaaggatagctggtcaggtgtgtttaaaaaaagacttcccagctgggcgtggtggctcacgcctgtaatcccagcactttgggaggccgaggcaggtggatcacgaggtcaggagatcgagaccatcctggtcaacatggtaaaaccccgtctctactaaaaatacaaaaaaaaattagttgggtgtggtggcgtgtgcctgtaatcgcagctactcaggaggctgaggcaggagaatcgcttgaactagagagttggaggttccagtgagccgagatcgcgccactgcattccagcctggtgacacagcgcgactccgtctcaataaataaataaataaataagacttcccctaggctgtgagcagtggctcatgcctgtcatcccagcagtttgggaggccgaggcgggtggatcacaaggccaggagatcgagactatgctggccaacatggtgaaaccctgtctctactaaaatacaaaaaattagcccagtttggtggtgcacgcctgtagtttcaactacttgggaggctgaggcaggagaatcacttgaaccaaggaggtggaggttgcagtgagccgagattgagccactgcactctagcttggcgacagagcttgactccgtctcaaaactcactccagagctatagactatatcactcagagagtgtagagtattgatagattggagcccccagtgcctgaagaaatggatacagcttttcttaagccccagggataaaactgtgatcagtcttcagttgcttcattccgcatgctttgccttcctctgcacgcaaggagtaataatagttcccacgtttacctgtggataacactcttcaaagaacctccatgtgattatcttcttgaatctatatacccattgaggtggatgatattgatctctttcctgttttttttttttttttttggagacagggtctcttgctctgttgcccaagctggagtacggtggtgcaatcatagttcactgcagccttgaacccctgggctcaagtgattctccagcctcagcctcctgagtagctaggacgacaggtgtgtgtcactgtgcctggctaattatttatttatttatttatttatttatttatttatttcagacagagtttcactcttgttgcccaggctgcagtgcaatgatgtgatctcggctcactgcaacctctgcctcccaggttcaagcgattctcctgcctcagcctcttgagtagctgggattacagggatgcaccaccatgcccagttaattttgtatttttagtctagacgaggtttcaccatgttggtcaggctggtctctaactcccgatctcaggtgatctgcccgcctccacctctcaaagtgctgggattacaggcgtgagccaccgcgcccagcctatttttttatttttatttttactttttgagacagagtttcgctctgtctccctggctggagtgcagtggcacaatctctgctcactgcaatctccgcctcctgggttcaagcgattctcctgcctcagcctcccaagtagctgggattacagggaagcaccaccatgccagttaattttgtatttttagtctagacgaggtttcaccatgttggtcaggctggtctcgctctgtgcccacctctgcctctcaaagtgctgggattacaggcatgagccaccgcgcccagcctatttttttatttttatttttactttttgagacagagtttcgctctgtctccctggctggaatgcagtggcgcaatctttgctcactgcaacctccgcctgggttcaagtgattctcctgcctcagcctccctggtagctgggattacaggcccttggcaccacacccggctaatttctgtgtttttagtagagtcagggtttcaccattttggccaggctggtcttgaactcctggccttaagtgatccacctgccttggcctcccaaagtgctgggattacaggtgtgagctacctagcgcagctctatatttttatttatttgtttatttatttattttttgagacggagtcttgctctgttgcccaggctggagtgcagtggcgcgatctcggctcactgcaagctccgcctcccaggttcatgccattctcctgcctcagcctcctgagtagctgggactacaggcgcccgccaccacgcccggctaattttttgtgtttttagtagagacagggtttcctcatgttagccaggatggtctcgatctcctaacctcgtgatccaccctcctcggcctcccaaagtgctgggattacaggtgtgagccactgtgcctggcctattttttttattttttgtagagttgagatctcactatgttgcccaggctggcttcaaactcctggcctcactcaagtgatcctctcaccttggccttccaaagtactgggattacaggtgtgagcaattgcacctggcctcttttctgtttttatttccattttgccagtgagaaggctgaggttacctctttttttttgagacgtagtctcgctctgttgcccaggctggagtgcaatggcatgatctctgctcactgcaacctccacctcccatgttcaagcgtttctcctgcctcagcctcctgagtagctgggattaccggtgtacaccaccacgcctggctaatttttgtatttttactagagatggggttttgccattttagccagggtgttcttgaactgacgtcaggcgatccacccaccttggcctcccaaagtgctgggattactggcgtgagccaccacgcctggccaggttatatcatttaacaaacatttgaccaccatgttaagggcactgcttgttagatgctggggatgcctatgaggagttaattgcctcttgggagagatctgcttagataggcagtttcagcatagagtgatgaatgctgtggcccagagggtaggttaggttgccatgggagaatgcaggtgtgaaggaagtccttcagggaggttccaatggctaatcctggtcatgaaggaccaggaagagaaagcagcttgtttggccaggtgcagtggcttatgcctttaaccccagcactttgggaggcttagtgagggagggggcagatcacctggtcaggagttcgagaccaccctggccaacatggtgaaactagagactagcccgtctctagtaaaaatacaaaaattagcctggcatggtggcttgctcctgtaattccagctacttgggaggctgaggcaggagagtcgcttgaatctgggagacagaggttgcagtgagccaagattgtgccattgcactccagcctgggtgacagtgcaagactccatcaaaaaaaaaaaaaaaacaaaagcagcttgtttatacaaaggccctggaggtcggaactgcagggtgtttggatgtggcaggagtatgggtggtaagaacagtaataacccttttttctttttctttttctttttttgtgacgcagtcttgctctgtcttccaggctggagtgcagtggcgggatctcggctcactgtaacctccacctgccgggttcaagcaattctcctgccttagcctcctgagtagctaggactacaggcgtgcaccaccatgcctggctaattttttatatttttagtggagacagggtttcaccatgtcggctaggctggtctcgaactcctgacctcatgatccgcctgcctgtgccccacaaagtggtgggattgcaggcgtgagccatggcgcccagcccccgcccccccccccccctttttttttatacacagttttactcttgttccccagtccggagtgcagtggctcgatctcagctcactgcaacctccgcctcccgggttcaggcaattctcctgcctcagcctcctgagtagctgggattacaggcgtctgccaccatccccagctgatttttttttgtgtttagtagagatgggttttcaccacattggccaggctggtcttgaatttctgatctcaggtgatccgcccgcctctgcctcctaaaatgctagaattacatgcatgagccaccatgcccagcaagaacagtagtaaccctgcaagcttattgtgtgccaggctctgctaaataacttttttttttttgacggagtctcgctctgtcatcccggctggagtgcaatggtgtgatcccggctcactgcaacctctgccttttgggttcaagcgattctccttcctcagcctcccctgtaggtgggattacaggcgcatgccaccacgcctggctaattcttgtgtttttagtagaggcgggatttcaccatgttgacaaggctggtctcaaactcctgacctcaggtgatccgcctgcctcagcctcccaaagtgctgggattacaggtgtgagccaccgggcctgacctgtgctaataacttttatcttcacaacacctatatgatggtttgaagtaggtgctggtgatatcctcattttacagatggggagcctgaagctcagagaggaaatgacttgtgcaagtttatctggaaagtggtggggctgaggtccaaactcaggcactcttattccagagttctggctcataaccgctgtgtcccacagcccctctgctaaagcttgcctgcttctctccttttaagctccaaaagagagtttcttttggcttggttataatggctaactcactaatggcccaaatgctgcgctgagtaccttgaatatggttctgtaggggagccgctgaactgttttttttgtttgtttgtttttgttttttgagacagagccttgctctgttgcccaggctggactgcagtggcgcgatcttggctcactgcaacctccacctcctgggttcgagcgattctcctgtctcagcctcctgagtagctggaattacaggcgtgtgccaccatgcccggctaatttttgtatttttagtagaggcgaggtttcaccatgttggccaggctggtcttgaactcctgaccttgtgatccacctgcctcagcctcccaaagtgttgggattacaggcgtgagccaccgcgtccggcctgaactgttttaaaatagaagtcttatgatcatacttacattttagaaatatcactgtagcagcagtgatgaagattggcaacagtgtaattaactggagtcagccttacctcggttcaattccttgtcccaatacctgactagccttggtatttgggaaacttactttgtgaacctcagttttcacatccataaaatgggaataatcctcattacaaacctaagaggtagacactaaatgggctgatatagtttttatatatatgtatatatataccagaatagtatctatctatctatctatctatctatctatctatctatctatctatctatctatctatcttagaatagtatatacatatatatcttagaatagtgtatatatatatatatatatatatatcttagaattgtgtgtatatatgtatcttagaatagtatttgtcataaaataaccactgagaagatgtcatctcatgagacagtattgatttggatctggggaaggtatagctggaggattggagctctgtcaagagctgctggagtaatcaagattagaactgatgcagggctgaactgggcatccacttggcaatggctgagacttagaagcaggtcctacaaaatgttgtccgagtgtgggaggtgagggaaggagaaggaggtaagggaagtgcccatgtttctagtttggcacacttgccaatcttgagggcttatttgatggggacaaaaggagaaggaacttgtaagggtaagatgattagctcagtgaaattgagtaatatgcgaaaggtcatacagcagatacattttagggccaaccctggcacaggccctttccactgcttctgggaaaatccactgatttaatcgactcattctcagtagtttggaatgagtaaactcaactcatgtttgctgtctctttgcattttaattatggaaggcaaagcttgactcttgcagaaagcatttcaagtatctgggaagaaagtgggtgaagttttgaggcctatttctttcttcactcttcttttttttacgacagagtcttgctctgtcgccaggctggagtgcagtggctcgatcttggctcattgcaacctccaccttctgggctcaagcaattctcctgcctcagcctcttgagtaactgggattacaggcacctgccaccacgcccggctaattttttgtatttttagtagagacggggtttcaccatgttggccaggctggtctcaaactactgaactctggtgatccgccctcctcgacctcccaaagtgttgggattacaggcgtgagccaccgtgcctggcttcttccctcttttcattcttgcctgcccttccttccttcctttctttttcttcctccttacctcttctgcctttcctccctccttccctaccttgtcaagtaaaagggactaattccctttcttctagtgtgacctgggaagaggtcctacttgaaccaatttgtcacttccctacgactaaagatacgctctttatgcactttagtatattggatactgtttgttaatttttaataatattgactataattctttgtgtctgatgtcctttttgctagtataccaccattgccatcaccagtaccatttagagtttgctatgctaagcacttgacatccattagctcacttattcttcacaacaaccctaggaaattggggctgttgatcccatcttatagctgggcaaacaggctcagtgatttttcttgtcgtcgctcagccaacaatgcctggagccagaattggttagaatctgagtctaaaacctgtctgtgcacccatccctaggcattccctggccttcctccacggcagaactttggcaaaaggtcctcttggaggcttcttcctgggagacccaggtatcactggaccggctaaaattgtttatgctttcttgggacagcagcatgggctgtgggaagtctcaaccttctaggttcaagctgtgtgtggggaaagctcctttctgccggagattctttgcctgtagtagttgcctttgcttagaagtcacttcctttagatctccttcttgtcacctagttctctgcttagacctcagttcctcagagagtcctttctttttctttttttttttttttgagacaagagtctcgctctgtcacccaggctggagtgcagtggcatgatcttggctcactgcaacctccacctcctgggttcaagcaattctcctgcctcagcctcccaagtaggtgggactacaggtgcccaccactaagcctggctaatttttgtatttttagtagagacggggtttcaccatattggccaggctggtctcgaactcctgacctcaggtgatccacctgcctcggcctcccaaagtgctgggattacaggcgtgagccattgtgcctgtcttgagagtcctttctaacagccgtatctaaaatagtcctttccatgtcgctggttcacattattttgttgtttttcccacaattacttatctctgtcagaaatgatctttatatgctcgcatggcgcagtggctcatgcctgtaatcgcagcactttgggaggctgaggttggtggatcactggaggtcaggagttcgagaccagcctggccaacatggcgaaacactgtctctactaaaaatacaaaaattagccaggcatggtggtgcacgcctgtaatcccagctactggggagggtgaggcaggagatgcttgaacctgggaggcggaggttgcagagagccgagattgcaccttgcacgctgggctgggcgacaagagcgggactctgtctcaaaaaaaaaaaaaaaaaaaaaaggccaggcgcggtggctcacacctgtaatccccagcactttgggaggctgaggtgggtggatcgcctgaggtcaggagttcgagaccagcctgaccaatatggagaaaccccttctctgctaaaaatacaaaaattagccaggcgtggtggcacatacctgtaatcctagctaccaggaggctgaagcaggagaatctcttgaacctgggagatggaggttgcagtgagccgagatcgtgccactgcactccagcctgggcaacaagagcaaaactctgtctcaaaaaaaaaaaaaaaagaaaaaagaaatgacccttatgtatgtgcttatcttgtttcttagctgccttccccactagagaacagggtccgggtgccttgtcctcccattgtctatttccagtacctggcacacagcaggctctcaatgaatatttcttgaatgaggggggcataaagatttaagctggtctttcacctgaagtgtccctcaatttaaagtggttgtattgagttaaaaggcactgtcaccctttaatggaggttgaatcccagccttgtggtgagcaccattagattatcccaaagcctgttctgtagtttctggtggttggcattttattccttgagagtcccagagacttttttcctcgaaagttccagagtttatttccctctactcctgtcccagagctgattcactgaaaggtcttgttccatacccatctatcacttttaattctttgttgtccctcttttccctgagcacaaagggattgctgagggcaagacttccagttaccatagcgacagtactcttttgcctctcccaaaataaaacccagagtctttgtcagtacattaactgtaaatgtgatatgaattcagaaaatatgggcgtggtggctcacacctgtaatctcagcactttgggaggctgaggtgggcaaatcacctgaggtcatgagtttgagaccagcctggccaacatggcaataccctgtctctactaaaaatacaaaaattagctgggtgtggtggtgtgctcctgtaatcccagctacttgggaggctgaggcaggagaatcgcttgaacccgggaggaggaggttgcagtgagctgagattgcaccattgcactgtagcctggggacagagcgagactctgtcttaaaaaaaaaaaaaaaaggaagaaaaatctgctatcatttattgagtacctacttgtttttttttgagacgaatctcactctgatgcctgggctagagtgcagtggtgccatcttggcttactgcaaccttcatcccctggttcaagcaattcttctgcctcaccctcctgagtagctgggattataggtgtgtgccatgatgcctggctaatttctgtatttttttagtagagacagggtttcaccacattggccaggctggtctcgaactcctgacctcaagtgatctgcccactttgccctcccaaagtgttgggattataggtgtgagccactgcgcccagctgactacctactttgtgttagatattttaataggggttttgcagacctttctcatttaattctcatagcacccacgataggggccattatccccatatcataagtgaagaaacagagctcaacaatgtagcttgtaaataaacttggggtaagaatctgaactcaggagctactggactgaggttcgattgctggctcagctccttactatgtgagtgtccttaactttctttttcctcatctttataatggggattaatatagtacttctgtgatttttgtaaggattaaattggttaatatatgtaagtttaattattataaattttttttttgagacagtctcactctgtcgcccaggctggagtgcagtcgtgtgatctcagctcactgcaacctccacctgcagggttgaagtgattgttctgcctcagcctcctgagtagctgggactacaggtgcgcaccaccatgcccagctaatttttgtattttttagtggagacggggtttcactatgtttacctgggtggtcttgatctcttgacctcatgatccgcccgccttggcctcccaaagtgctgggattgcaggcgtgagccaccgcacccagactatacattttttttttatgcgggttttgttagtttggataaggttattttacatctactctctgtaaagttagtttatatctttatcatagtagtagcttaatagcattctttatttaatttattacatatttgttgagtttataatgtagtcctactgtaatgaattttgattaaatattctcttgttttttaatggatgaactacatccagtttgcccagaatcttatgtaaagagctattggtttttctcattttcacaaatgatttatttttatcctggactgtattcttcagcttgaaatggctgagtccaagagtataagcagttccacaggttgttctttgcttctagattaaggtataaaaagatggccatggtcaggaccccaggaggtgttctagtgtacctgtttccccacagctggaccagtgttaggttttgtcttttctaaaaaattaggtatttctgcttgttatataatggtgtgataattttgacacaacatttgaaaagcatccagttgctttatcttcctgtattcaagttatgtttatatctaaagatatgaatataagcatagcaacgactttggtcagagaaagaggaaggacctttgagaagtactttgtctacttctgcgtacatcctgttacttttgataagagggatttctcctgcctcagaggaccttgaaattggctagcacctctgcatgtcagtttcctccctgtaacttaattttacttgtataccatggtaacattacattagtcctaattatataatctggcagttgtgaagatccagtaaatagtaaaatagtgtaagaattaaattcttgcatttaaaaaatttgcaggtttttttttggattttttgtagagatgacatttcaccaagttgcccaggctggtcttgaactcttagattcaagctacctgccccttggcctcccaaaatgctgggattacaggcatgggcctatactcagcctcccaaagtgctgggattataggcatgagccagtgtacctggccaaaaatttgcatatttaaataaccttaaaagaaaaaaatgggccgggcgtggtggctcatgcctgtaatcccagcactttgggaggccaaggtgggtgcatcatttgaggtcaggaattcaagaccagcctggccaacatggtgaaactctgtctctactaaaaatgcaaaaattagctgggcagtagtggcatatgcctgtaatcacagctactcaggagactgaggtgggagaattgcttgagcctaggaggcggaggttacagtgagctgagatcgtgccactgcactccagtctgggcgacagagtgagaccctgtctcaaaaaaaaaaaaaagaaaaaaatatgaagaaacataaagaagcaaccccaccaccagaataaaataaaattttatcatctagataattcctgctgacaattacttctttggtggttttttttgtttgtttttgttttttggcttttttttttttttgagatggaatcttgctctgtcacccagactggtttgcagtggcacgatgtcaactcactgcaacctccgcctcctgggttcaagtgattctcctgcctcagcctcctgagtagctgggattacaggttcccaccaccatgcccggctaatttttgtatttttagtagagacggggtttcaccatgttggctaggattgtctcgatctcttgaccttgtgatcctcccacctcgacctcccaaagtgctgggactacaggcatgagccactgcgcctagcctggaatgggttgtttaatagatagcttattgtccttcacatgtataatcctttacattatacacttgtgaaaaattttcattgtgaaaaactaaaatttaggaaagtatttaagaagaaaggaacaatcaccaataacctataacttatttttttcttcctgtctttacaaaagaatcagtggctgggtaccatggctcatgcctctaattccagcactttgggaggctgagtcaggaggatcacttgaacctgggagtttgagaccagcccagacaaacacatagcaagaccctgtctctaccagataacaaattagctgggtgtggtggcttgcacctgtagtcccaggtgcttgggaggctgagtaaggaggatcacatgagcccaggaagtcgaggctacagtgatccaggtttgagccactgtagaccagcctgagtgacagagtgagcaagaccttgtctccaaaaaaataaattcatatgagtttttttcttttcttttcttttcttttttttttgagacagaatttcactcttgttgcccaggctagaatgtaatggtgcgatcttggctcactggaacctccacctcctgggttcaagtgattctcctgcctcagcctcccaggtagctggaattacaggcatgtgccaccatgcctggctaattttgtatttttagtagagacggggtttctgcatgttggttaggctggtctcaaactcctgacctcaggtgatccggcagcctcggcctcccaaagttctgggattataggcatgagccaccatgcctggccttttttttttgtttttgttttttaaagagacaggttcttgctctgtcactcaggctggagtacagtggcacaatcataactcactgcagtctcaacctcctgggctcaagcgatcctcctgcctcagccttttcagtagctgggattataagcctgagccacctcatctggctgtgtatgagttttaatgtgagctccatgtggtacaattttgcatcctgcctttttatgtaatatattgcaagcaaattcttcataaaatgtgctgctattaaacattagacatgtactcacttctgtgatttttttccatactcatttattgcaaagaaagtgttctggtaggaggcaggcattgctctggcagtgctctggcattgcttgggcagtgtaggctgtcaagagccaaagtataaggctggatgcagtggctcgtgcttgtaatcctgtaatcccagcactttgggaggcccaggcgggaggattgcttgaacccaggagtttgagatcagcctaggaacatagatactctctctgcaaaaaaaaaaaaaaaaaaaaaaaaaaaagctgggtgtgctgacgcatgcctgtgattccagctactcgggaggctgaggcaggagtattgcttgagcccaggagtctgaggctgcagtgagctatgatagcgccactgcattccagcctggacaacagaatgagaccctgtctaaaaaaaattttaaaaagtccagagtttagtgggaggaaagagttaggctggggtaagtctgctgtaaggaagtggcctgttcaagtgcccttagagttcagagtggctacatgtccatcagaaccaccactagctcctccgatagcatttaggaccctgcagattagtagattaattacctcagtgatcacaagaagtgttctttttttttttctttttcaagatggagtcttgctctgtcacccaggctggagtgcagtggcgtgatctcggctcactgcaacctccgcctcccaggttcaagctattcttctgcctcagcctcccaagtagctgggattacaggcgcctgccgccgcgccccactaattttgtatttttagtagagatggggtttcaccatgttggccaggctggtctcaaactcctgaccttgtgatccgcctgcctcggcttcccaaagtgttgggattacaggcttgagtcaccgcacccggccggaagtgttcttttatgggggccacttttcttgtaaatggcctaatccagtacaccttttttttccatcaaaaggaaattggctttactgtttggttctgatcataaatataaattttattcattgcagcacgagtacacgagacaggattgagaaaggagagattcaaattgtgacttcagattcaaaggcaattaaaggaattaaacgtgaatatttttactgttttattgttctatgattaaaaaaaaatctgggtaaaacttataggaaaatacaaatgatcagaatggactcaagaagtaggaaatatagctgggcatggtggcaggtgcctgcaatcccagctacttgggaggctgaggcaggagaatcacttgaacccgagaagcagaggttgcagtaagccgagatcatgccattgcactccagcctgggcgacaagagcgagactcctcaaaaaacaaaccaacaaacaaaaaaagaagtaggaaatatacatagatcaaagaaagtataaacaattctgggcgcagtggttcacgcctgtaataccagcactttgggaggttgatgtgggcagatcacttgaggtcaggtgtttgataccagcctggccaacatggtgaaacccaatctctactcaaaatacaaaaattagctgggtgtggtggcatgcgcctgtagtcccagctactcaggaggcctaggctccagaattgcttgaacctgggaggtggaggatacggtgagctgagatggcaccactgcactcagcctgggtaaaagagtatgactctgtctcaaaaaataaataaataaacagacctcgtacagccttccaaaagtagcaccaagtattaatatctcaacttttgtttgcttcgtttttaattttttttgtttttaagagacgagcgtttgctatgtttctcaggctggtcttgaactcctgggctcaaagaaacaacttggctctgccttccaagtagctggggctataggcatacattactgtgcctggcatttgtttgcttcctttgtaactctttaaatttcattgcaattacagtttgcagttatttatcagtttgctggctaaatttttgtgtttccccggtagactgaagggttcttgagggcaggagctgtgtctcttttggtcttgattgtttccttaaatagtcgctgagcaaatatttgttgaataatgcatcagcagatgactgaatttaactgtgaaagcagttgtttttttgtagttctgaggggtggcccttggcccttgtaggtgagtggtaagcagtgttgagggagggtcttcttagttccagaaaccacaggaagctgcacgatggaggaataggaaccagtggaagacacacctgtgttagaatgaggacaccaacagggtttcatggagctttgtgttttgaataatgcctgtttttttatgtgtagtgaatgatgctacactctgggtggactttgcctaagtttcataaatatttaattggctttttcaggagaataaaggcagccccgttgatgactgaaaatgacaaagcatccacctaacagacgaggaatcagctttgaagtgggagcccagttggaagcccgggaccgtttaaaaaactggtacttttacatttttctgttaattaaagcccttcagtaaaggatttttgccagcactgatagagtggtagcttaggctttttttgtggtgtttttctacttcctgactcttggaagatgtgaggaaatgtcagtcttttctctttgatgcagggatcccagtgtcagggtgactgtcctgtaaccccctgtatatatttgtttcccccttttgcctgttcatctgaaagagttctgggaaaaagaagcaggaatggctacagggaagggaagagttaatagtggcagctctcttgctcctggctgcctgtctgaaaaaagaggaaagatcagggatggaatagtgaagaaaaaggggttcgattggagcagctcatgtgttgtgaacaccccatcctattttctgggcatgatcttgtatgttgaaatacagtcatcatgtaagggcacactgtcagggtgattaggttcagaagctgaggggttatagtcccagctgtgtcattgacttgtgacctctggctggtaattagctgctttgtgcattggcttatctataaatgtgggtattggtaatattgacctcatagggttattctgagaatcaaatgatagaatatgtaaggaaagaccttatagactgtgaagtgattgttgtggttgagggcatcctagaatttggtcattttttggtgctcaaggtgagcgtggggttttcagaacttatacctctttaagggtttttgttttttttttttagacagagattcgctctgtcacccaggcagatcttggctcactgcaacctctgcctcccaggttcaagcagttctcgtgcctcagcctcctgagtagctggtattgcagatgtgtgccaccatgcctggctaattcctttttgagctaaagaaggaagagtttaaccctttttgagattctttcaaaatagattgatcagctcttcaggtgtaggaagataagacaggagaagagaggcatagaagcagctggtacagaaaactgtctttgctattagaattaggtacacttggctgggcgcggtggctcacgcctgtaatcccagcactttgggaggccgaggtgggtggatcacctgaggtctggagttcgagaccagcctggctaaagtggcgaaaccccgtctctactaaaaatacaaaaaattagccgggcatggtggtgcatgcctgtaatcccagcttctcgggaggctgagccaggagaattgcttgaacccgggaggtggaggttgcagtgagccgagattgcaccactgcactccagcctgggcaacagagtgagactcggtctgaaaaaaaaaaaaaaaaaagaattaggtacacttggccagttgtggtggctcacgcctataatcccagcactttgggaggctgaggtgggcggatcacgaggtcaggagttcaagaccagtctggccaacataatgaaaccccgtctttactaaaaatataaaaattagccgggcatgatggtgcacgcatgtagtcctagctactcaggaggctgaggcaggagaatcacttgaacctgggaggtggaggctgcattgagccaagatcgcgccactgcactccagcctgggtgactgagcgagactccgtcccggaaaaaaaaaaaaaagaaaaaagaaaaaataattaggtaattaggtacattttcaacacagttgtttttgggctattttttttttttggagacaagagtcttgctctttcattcaggctggagtgtagtggcgtgatctcggctcactgcagtctttgcctcctaggttcaagcaattcctctgcctcagccttctgagttgctgagattacaggcatgcaccacgatgcccggccaattttttgtatttttagtagagacagggtttcaccatgttggccaggctggtctccaactcctgacctcagatgatctgcctgcctcggcctcccaaagtgctgggattacaggcgtgagccaccaagcctgcctgtttttgggctatttgtattatctataattagttccttttttggtttcagtatatatatatgtgtgtgtgtgtgtgtgtgtatatatataatatactgcgtgtgtgtatatatattatatattgtatgtatatatattatataagtagtatcatacaacttgttttttttctgtgtctttgttttttatattcaatatgtttttgtgatttacccatacttaactccgcaccctcctcgcccacccctgatatagggtcttactctattgctcaggctggagtgtaatggcacaatcatagttcactgtggcctccaactcctgggctcaagtgatcctcctgccttagccctccatgtatctgggactacatcttaacttctgtatagagttttattgtatgaatataccacattttgtttatctagtcccctactaatggacgtttgtttgtttgtttatttatttatgatggagtctagctctgtcacccaggctggagtgtggtggcacaatcttggctcattgcaacatccgcctcctgggttcaagcagttcagcctcagctgggattacaggtgcccaccttgccaagctactgtatgttttttttttttttttttttttgagacgtagtcttgctcagtcgcccaggctggagtgcagtggctcgatctctcctcactgcaagcactgcctcctgggttcacgccattctcctgcctcagcctcccgagcagctgggactacaggcacccaccaccatgcccaactaatttttttgtatttttttagtagagacggggtttcacggtgttagccaggatggttgcgatctcctgacctcgtgatccaccctcctcggtctcccaaagtgctgggattacaggcgtgagccaccgcgcccagcctaatttatgtacttttagtagagatggggtttcgccattttggccaggctggtctcaaatttgtgacctcaggtgatccacccaccttggcctcccaaagtgctgggattacaggtgtgagccaccgctcctggcccgtttatttatttattattttttattgtatttttttttaaatgggtgcttaaattccagtttttcacctgagac

SEQ ID NO: 647 - DNA, 8253 bp, Homo sapiens
  source 1..8253: mol_type = other DNA
ggttgcccatgcggccctagggctgggagcgcggcgccgctctccgctgcgggggaggccatggcggaaccttcccaggccccgaccccggccccggctgcgcagccccggccccttcagtccccagcccctgccccaactccgactcctgcacccagcccggcttcagccccgattccgactcccaccccggcaccagcccctgccccagctgcagccccagccggcagcacagggactggggggcccggggtaggaagtgggggggccgggagcgggggggatccggctcgacctggcctgagccagcagcagcgcgccagtcagaggaaggcgcaagtccgggggctgccgcgcgccaagaagcttgagaagctaggggtcttctcggcttgcaaggtgggggcggggcctggggtgaaggggcggggcttggggcatcccagggctctggtgggaatggggtcaaagctctggctgcggagcggctcttgccccagaggtataggtcattgactgatccttccacctccaggccaatgaaacctgtaagtgtaatggctggaaaaaccccaagccccccactgcaccccgcatggatctgcagcagccagctgccaacctgagtgagctgtgccgcagttgtgagcaccccttgggtaaggcaggcagcgcccttggagctgggggcaggtgctgggtcctgcttggacagggtgacaagtgccacaaagcttcatctctgaaaaaatcaaagatgcctcgaaggagggattgggttgggggggggtgtgcaccaaggggggagaaaggaaatctctcagcccagaacaggcccaggcaacccaacggttgatatcggagcagtcagtctcactgttggtcacactggttggaggaacagagtgtgtatcttgcttggctgtgaagagggtcaagaagccttgttgatttcttctatcaatttttcctaactctgccatctgtcttgcagctgaccacgtatcccacttggagaatgtgtcagaggatgagataaaccgactgctggggatggtggtggatgtggagaatctcttcatgtctgttcacaaggaagaggacacagacaccaagcaggtctatttctacctcttcaaggtgagcttccactaaaggagggtgtgagtgaaggaggtggggccttgaggggttgtctgcagctctgcccccctcccctctatgcccccttcctcttctctctagctactgcggaaatgcatcctgcagatgacccggcctgtggtggaggggtccctgggcagccctccatttgagaaacctaatattgagcaggtgagataggggaattggagatagcggataggagaattggggacagcttggaggagtggggagcctgtgttctccattctcctcaagctgagaacactggggaggttcagagaaggaagggtgttttgtgctaacctcagggtgggcatggtggtagggagggggcagagcttttctatagagagcacccgagagagagaggagaaggagaaccttgtccctggccagggagcatcttcctttgtctaagaaggccctgcgggctgctcacacctcattcctggttttatcccccacccaccccttctcagggtgtgctgaactttgtgcagtacaagtttagtcacctggctccccgggagcggcagacgatgttcgagctctcaaagatgttcttgctctgccttaactactggaagcttgagacacctgcccagtttcggcagaggtctcaggctgaggacgtggctacctacaaggtcaattacaccaggtaggcccagccaggggcagcttcgggggaggcttgcaggcccagcctgggttcagtggtttccgccctcacctgtctccccctcgaccccctactccagatggctctgttactgccacgtgccccagagctgtgatagcctcccccgctacgaaaccactcatgtctttgggcgaagccttctccggtccattttcaccgttacccgccggcagctgctggaaaagttccgagtggagaaggacaaattggtgcccgagaagaggaccctcatcctcactcacttccccaagtaaggctccttctggcctaccaggatttggccccaagttcacatcctccctgttgtccccttttttccaggaaggcttcctggattggtccctcctctccctccatgggccttttgggatctgggcgtctacctggcagacttgcccatggcccagaagcaacttgctagtactagtctggggatggcaggtacatagcccaagctaacgctgcccccacccgaccctacgccccagtagatgttactaattgtttcccatgggggcctggacacagcctcagactccttccctgcacaactctccaagaaaccagaccttaagcttgaagtgaaaccaatttctactcctgttctggtcttttctgtaccattttcttctgttcggccacaccttttaaaatctaggccataactcccctgttcaaaaaaccctgactgactaatcctggctctctagtgccccctgccatcaggtgggaacaagagatggcaaggtggggtggagtctgagcccattttgatactgagggcagtgagggggctcagggtgacaaggtgccctgcctggccacacagcacaggatgacatcagctcagacctgtctccctgtgccacacagcgtggtgaaactgagcctgtttgatctctgtcctggatgtgtcctgtcctcttaccttcaattggaggctcccagaagacaggggctgtcccctctctcaggtccccagttccctaagagcagggtctgtctctgaccagcctccagtccctctgctgcctggcccaggctgcaccctggagaacagagttgtgggacagactgtgtcctccctacagattcctgtccatgctggaggaggagatctatggggcaaactctccaatctgggagtcaggcttcaccatgccaccctcagaggggacacagctggttccccggccaggtatgtgccatggtacgctctgtagggtgtctggcctgcctggctgagctaagcctcctgggtggaagagagctcacctgggccggaggccctggatcccactgagggacctgccaccggcttcagcccccccagtccctgccttctctctctctctcctcagcttcagcacccccgtccctgactctctctctcctcagcttcagcccccgtccctgacttctctctctctctcctcagcttcagccccccatccctgacgtctctctctctcctcagcttcagtcagtgcagcggttgttcccagcacccccatcttcagccccagcatgggtgggggcagcaacagctccctgagtctggattctgcaggggccgagcctatgccaggtggatacttgacccctgacctctgaccctcattcactccttcccaaaccttttttactgatcctgagcaaccttgcctgcctccccaataggcgagaagaggacgctcccagagaacctgaccctggaggatgccaagcggctccgtgtgatgggtgacatccccatggagctggtcaatgaggtcatgctgaccatcactgaccctgctgccatgctggggcctgaggtgggcagcccgacctgctgaccagttgggggacccccaccaacctgagaccccggctcaccacccctcttctgtgcccagacgagcctgctttcggccaatgcggcccgggatgagacagcccgcctggaggagcgccgcggcatcatcgagttccatgtcatcggcaactcactgacgcccaaggccaaccggcgggtgttgctgtggctcgtggggctgcagaatgtcttttcccaccagctgccgcgcatgcctaaggagtatatcgcccgcctcgtctttgacccgtgcgtcccccagagagcccctcccccagggcagcacacccagttcccttcctcctcggcctcttcactcctcaaaattggggatcccctgctccccacttctgaggttcatcctttgagcattcttacttctcactgcccaaccctgactacagctcagacttccagggctctggggacctgaaggggacagtcaggggctatgacatgcccccctctctcttaggaagcacaagactctggccttgatcaaggatgggcgggtcatcggtggcatctgcttccgcatgtttcccacccagggcttcacggagattgtcttctgtgctgtcacctcgaatgagcaggtcaaggtgagcgcggctccccggccccagccccagtccacggcccactcctgagtttgggccagttcggagcagcaggatgtgtggcatgcagcagcccgttgctcttctcttagttagcggcccgttcctcacatccccacaaggtggcagccgtactttgataactgtggattaggaaaccacctgttgacagacggagcccaagcagcagccacactttggtggacctgtggacttgggttttctgcatcacaagaacatttacatacatgggggaattaattactttactttttattttttatttatttttttgaaagagggtctctctcacccaggccgcagtgcagaggcatgatcagggctcactgcagcctcaacctcccaggttcaagtgatactcctgcctcggcctcccaagtagctgggaccacaggcatgcaccactacgtctggctaacttttgtattttagtagagacagggtttcaccatgttgcagggtttcacccaggctggtctctaactcctgaccttaagtgattcacccacctcggcctcccaaagtgctgggattacaggcatgagccaccgcgcccagccaaactaatcattattacagtagccctatgctgatagttttggcttctgtcctttgttacaacagacccactcgtagggtctctggctctgtgtgtcgcatacctcagatctgtgtggtgcctcattggccctgacgtgtgggaggcattgctcctgctgctcagacctctggtgactccctctcccgcttctcccaactctgaggcccagggactgggaatcagtggcctgtgttgggtttggacccggccctgccacggctggcagcctgaccttgaacacatttcctaacgtagctgagtttcggttttctcttctgtaaaataaaggtggtaatactcgcctctggggttaatttgagaatcggtctgtaaaacaggaagcactgcacctagcccagagtgagcttagaaagcccgcacccttcactttctccccataagctccccttcctctgtcagctgcctttcttcctctttgcctggatgctctcgctctctctacctcctttccaatctacccgctcttctctggtctctgagacctctccagcaccaggcccatcctcagctcctggtgagtcctgcttccctcccccgcagggttatgggacccacctgatgaaccacctgaaggagtatcacatcaagcacaacattctctacttcctcacctacgccgacgagtacgccatcggctacttcaaaaagcaggtgacccgtagcctcgtcccacaccggtcctttgcctggaggctggggtaattctgtccagcccctctgtggatggagtaggagtccctttgcgtcccctacttcacctgacacctgccaggagagtctccatgcctatcttctttcctctgctgccattgccccaggggagaatgagggcctgtggggccagtagagcaggccggaggaactgggggtcagtagagcatcctggaggaactagggggccagtaaagcaggccggaggaactggggggggcactagagcaggctggaggaactggggggctagtagagcaggctggaggaactggggggccagtagagcaagctggaggaactgggggccaagagcaggctggaggaactggggggccagtagaggaggctggaggaactggggggccagtagaggaggctagaggaactggggggccagtagagcaggctggaggaactgggggactcttcgggatgagtcaggagtgggcagctgacctgggacctttccagggacagtttgaaccctcacagtgccccaggaggaggttcaggagcaggaggtggcaagtggcacgtgctactcctctggtgctcccaggtgagggacgacagaagttgggaaatacttatggatggactgggtcatgaccatccaccccccagggtttctccaaggacatcaaggtgcccaagagccgctacctgggctacatcaaggactacgagggagcgacgctgatggagtgtgagctgaatccccgcatcccctacacggagctgtcccacatcatcaagaagcagaaagaggtggtgtgcacacatgcgcatctgtgggatttttcatgaatgggcatgcagagggcgagcacacgtgtgtagacctgttctacgtctacatgcatatatgtgtgtgagtgaggaggggcaggccaggatcttggctcttgctctgctcccttggggaagttatgaggggaggtgctggattaggtggcgttgcagctgggtgggtgcagccagtggctccgactgtggccctgggaggggttgttgttggggctggagttggcccctcagtcccttccttccctcagatcatcaagaagctgattgagcgcaaacaggcccagatccgcaaggtctacccggggctcagctgcttcaaggagggcgtgaggcagatccctgtggagagcgttcctggcattcgtaagcaggggtctcagttgcagggtagtgggggcacgatgcttggggtgtggactggcattcttagagacattctcccacttcccactttgcaggagagacaggctggaagccattggggaaggagaaggggtgagtgtcaaaggagccgggttgggggtggggcagagggacttggagcctcagacttggtgtctctcgccccaggaaggagctgaaggaccccgaccagctctacacaaccctcaaaaacctgctggcccaaatcaaggtggggagaccaggtttcctttccagggcccctgcaccaatggctgtggcctcttgatgcagtgtggggtgggtagtggtctcgggctggcgtgggcgcagcagggctgtccccagcccggctcttctctccagtctcaccccagtgcctggcccttcatggagcctgtgaagaagtcggaggcccctgactactacgaggtcatccgcttccccattggtgaggaccttccattccatccccttccctcctcttctgtccccacacctgctcctgccctcactgcgccctgcagccccagggggcccaccctggtggacagccctgccgtggtcttcagcctcttaaagctgtgctccgtctcctgctgccccagacctgaagaccatgactgagcggctgcgaagccgctactacgtgacccggaagctctttgtggccgacctgcagcgggtcatcgccaactgtcgcgagtacaaccccccggacagcgagtactgccgctgtgccagcgccctggagaagttcttctacttcaagctcaaggagggaggcctcattgacaagtaggcccatctttgggccgcagccctgacctggaatgtctccacctcggattctgatctgatccttagggggtgccctggccccacggacccgactcagcttgagacactccagccaagggtcctccggacccgatcctgcagctctttctggaccttcaggcacccccaagcgtgcagctctgtcccagccttcactgtgtgtgagaggtctcctgggttggggcccagcccctctagagtagctggtggccagggatgaaccttgcccagccgtggtggcccccaggcctggtccccaagagctttggaggcttggattcctgggcctggcccaggtggctgtttccctgaggaccagaactgctcattttagcttgagtgatggcttcaggggttggaagttcagcccaaactgaagggggccatgccttgtccagcactgttctgtcagtctcccccaggggtggggggtatggggaccattcattccctggcattaatcccttagagggaataataaagctttttatttctctgt

SEQ ID NO: 648 - DNA, 32746 bp, Homo sapiens
  source 1..32746: mol_type = other DNA
gagagaggacctatttctacctaaggacattcccggaaggcaatgggtttcaaacaatatcctgaagagactcatctcggggaactaagcaggtaggaatggaaaggaggaaatgggaggggagaggaagtcaatctgggaccctcatcccggcttcaaccaaaagcttcactctcatctgcctgatggatggagctacaatgtttttgaacaagagattccatttgaacaaagagctctgggttctgtaactttaagagtttgggtggtttttttttcttttcatttgtttgtttgttttttgccacatcagattttatagagaatttaagagttttaaaactacaattaggccgggtatggtggctcaggcctgtaatcccagcactttgggaggccaaggcgggctgaggtcaggagttcgagaccagcatggccaacatggtaaaaccccgtctctactaaaaaaaattacaaaaattagccaggtgtggtggtgcgcgcctgtaattccagttactctggaggctgaggaataagaatcgcttgaatcctggaggcagagcctgcagtgagtcgagatggcaccactgcactccagcctgggtgacagtgagacactgtcgtaaaataaataaaataaaactacaaatatagaggagcagagagtggcaaagcagattgaggacagacttcagaaggccttgaactctaatgtaaagcattcagattttcacctcaggccagtggggactcgccaaaagcttttgtggaaggaacagaatggtgaaagcaatgctgaacagagcctaacttggttacagtgttcaggatggagaccagagttggaagataaaacagaggcaccaactaccaggtgttttctacaataagggcctcaatcaggtttttttaaggaaaagatgcattccatgaagtcaaatatccaagaagaggtatacattgcacacaatactttatttgatccttttctacattccccaggggtgtattcctgtcaccattggagatgaggaaataaggccctgaggctcaagtcatttgtccaagattacatagtgagcaaatgactaaactgtaattcaatgccaagtctgttttttgttttttatttgagacagagtctcgctctgtcaccaggctggagtgcagtggcgtacagtcttggcccactgcaaactctgtctcctgggttcaagcgattctcctgcctcagcctcctgagtagctgggactacaggcatgtgacaccacactaattttttgtatttttaatagagactgggtttcaccacgttggccaggatggtcttgatctcttgacctcgtgatctgccctcctcggcctcccaaagtgctgggattacaggcgtgagccacagcccccggctgtctgttaaactgtttactgtattgtatgacctccagccatccaaatcccttacctgggcattcaagaccttaaaaaatcagacttctaaaatgtgtgcattttatcatatgcggatagtacctaatttaaaagttaagctgatcctcaaaacacttgttattttctgatttttttatagttgccatcctagtgggtgtgagataatatcttattaggaaacctcatttgtttttaacttttttgttaattaatgtatttaagactataaatttgcctttaagtactgctttagatgtgtacaaattcaatcatgtagtattttattcagttctattttttttagtccaaatgttatttaatagtgtgctatttagtttctgaataagcaggactttattttagccatcttttaaaaaatattaattctgtgatggcattgtagttggaaaacattgtcagaatgggattgattccttggaacttactgaaacttcctttatggcctaatatgtgatctattattgcagatgttttaggtataatcaaaagaatgttttctgtttgtgttgtgtacacacacacacacacacacacacacacacacatatatatatatatatttgagacagaatcttgctctgtcacccaggcatgatcttgacttactgcaacctccacctccagggttcaagcaattctcatgcctcagcctcccaagtacctgggactacaggtccgtgccaccatgcctaatttttgtatttttagtaaagatgggttttcaccatgttgtccaggctgatctcaaactcctggtctcaagtgatctgcccaccttgtcctcccaaagtactgggattacagttatgagccaccacacctggccatatatttttaattgtatttttgcccattcatatcaatgaataaacatttccaaatgcaactgttaatttttgaattttttctatgtatctgatatagctcaagattgtattggtaggtgttatatgtttatgatgattattttgattttatactgttccttaaacatttttaaacagtgaaatataacttacatgaataaagtttataaatcttatatgcatatttaaagcaatacttacagacatccatataaccaccactaaggtcaagaaataggctgggcacagtggctcacacctgtaatcccagcactttgggaggccaagatgggtggatcacctgaggtcaggagttcaagaccagcccggccaacatggcaaaatcccatctctattaaaaatacaaaaattggcatgtgcctgtactctcagctgcttgggaggctgagacaggaagaatcgcttgaacccaggaggcagaggttgcagtgagccaagatcatgtcactgcactccagcctgggtgacagagtgggaccctgtcttaaaaaaaataaaataaaataaaataaaatattgttaacttttttttagttaacagttttaaaaataaactcacctttctaaccttttctggcactaatccaccttctccaccaacccttccatacacctcatgcttcttagggataaggctgtttgtcactatgcactaattctgctattcattgcacccagtcattttgcttgtttgagacagggtctcactttattgcccaggctggagtgcagtggccccgtcttggctcactgcaacctccgcctcctgagttcaagcaattctcctgcctcagcctgccaagtagctggaattaaaggcactcaccaccccatgcccggctaatttttgtatttttagtagagacgggatttcatcatgttggtcaagctggtcttgaacttctgaccttgtgatccgcctgcctcggcttcccaaagtgctgggattacaggcgtgagccattgcacccagccgcccccagtcatttttatggcttctcttacacctagtgatgactgtcatgtgagggtcccttcccccacctcccctgccaaaaacctccccaggcttcaaactgcagctaagtggtacctctgtagagtgtccttcactctctcctcaagagggaacctctgtctctctattctctatatctttacacctttttaaaaaattacccttaagtcagctttcatattcttctcatattgtggttattttgtcacctattacatataaactccttgaagacaggacaaaggtcttaacctctgattttccttagcttgattcggtgtgaggcatatggtaagtgctcaaccaatattttaaagaaatgaatagaatctcttctttaattcagctatgtttcattattcaagatagctagcattttttccccttaaaacatctctttggccaggcacggtggctcatgcctgtaatctcagcactttgggaggccgaggcgggcagattgtctgtgttcaggagttcaagaccagcctggccaaaatagtgaaaccctgtctctgctaaaaatacaaaagattagctgggcgtggtggcatgcacctgtaatcccagctactcaggagtccgaggcaggagaatcacttgaacctgggaggtggaggttgcagtgagctgagatcatgccattgcactctagcttgggcaacaagagtgaaattccatctcaaaaaacaaaacaaaacaaatctctttatgttcatttcttttccattttgattgctgctctgcagaaagagaaagaggaaggatcgaaagaagaataaaaggaaagaaaggaggaagggagggagaaagggagggagggaaggagggagggagggagggaaggaaggaaggaaggaaggaaactacatttagatcccctttccagaccaattacatgagaatttctggagaatgagtccagcatccttaattttctcatgtgccaccaggattgagaaccactgcttttttggtcccttttaatttcaccagttttatctctaaacctctaaaacagggagggagggagggaggaacccagtggcttttagggcctcgtttcacaggcccatccaatctattcagctacttcttccaacagatgcctctgctccaaggctcatccaggtcccacaggcacgctgtgctcccgtctttattctctgctccttgtacctggatgtttcccttctcccctcccctactcacattctaaccatccttccaagctattccctcctcctcaaagcttcccagaccactactatcatccctttctaaatccctgtggttgaaataagcatgctgaccgtagctaataacactgtattgaatgctggaaattggcaaagagtgtagatttcaggtgttctcaccacacacacacacacacacacacacacacaaaggtaactgtcaggagatggatatgttaatttgcttgactgtagtattcatttcactatggatatgtactgcaaaatgccatgctgcacacttcaaatatatactgtaaaagaaataagaccttcgagtcggcacaaaatccaacacaatggacttatccccaccaccagtccatgcacttgtctctctaagatcacaaataccctgagaacagggaccatggctaagattctgtggccatgaccctggcctctaacgctgtggagacatggtttgctaatggaatgctttttccagaggaggccctttaacctaaccctctcctgccacagagtaaaggaagaaacaagaagtttcagtgacttacgggaagtcgtacaccttgacccgaatctagcaacctcaaggctcttctctggttgtttattcacagccatctgttttcctcattctctcctctgattccccctcaggagcgacagaaggccctttaccctcacctttctctcttagtcttatgaactgtgtctttctcagtgataggtcactcagctgctgtatttggtggcagagcccagagaacagcacagaaccacagccctcagggcaattcagatgctggggtttttttctgaaagtccttccctgaagagttattccttgtgagggaggggggaggaggacatttctggacttattgctgacatacacaccaaaggctgagtttgtcttctgggttaaacagaggcactatggctctaaattggccaggaagaggcttcagctgaggctacaggagggcagaccaccaagcgagtataaaagaaaaaagcaggctgggcacagtggctcatgcctgtaatcccaacattttggaaggctggggtgggcagatcacttgaggcccggagtttgaaaccaggctggccagcatggcaagacccagtctctacaaaaaatacaaaaattagcgcggtgtggtggtatgcacctgtagatccaggaatttgggaggctgaggtgggaggatcgcttgagcccagaaggtcgaggctgcagtgagccataaccacgccactgcactccagcccaggtgacagagcaagaccgtctcaaagaaacaaaaatgaaagaaaaagaaaaaatatataacagttaagtagaagcagaagcttccaccaatttgagggaaaagcaacctttataaaccaatgtcaagccaggacaggcagaaaagagcacctcttgagtagacaggctgacaggggccctggaattcaggctaggagcacatgttcatgagagaattagaatactgcactccagcaataatcccaaatccttggcagatgttaaagtgatttccatccccatgaggtgcagagatactaggaatcccccctggatttcttcctgggcaaggctgttgccaaggtccccaactgaaggtagaaagggtgacagtggccagcggagtgagaaagacagcaggggctgggcccacacaggtggccgccgttcccaccggcagcagttaaggctttgattagcagcccacagcagccatggctggggagggccacctcccacccgggcacaagccgaaggacacttgtgacaggacagctgcggatggtgggtactctcatgccctgtgtctttccacactgggatattcactatcacgtatacccccattcacacctggaaccactctgctagtccccaagaggagattcggactgttagaacgagataatttcagagctttaaatggctcccatttatgagaaactggatgagagagcaaagcaaagcattcacgactcacgtgctacagatgttcaagccaggagaactagcaggaaggggttctttccagccttcactctgccatttaccaagtatgtaccaagtatgtgagcctgggcactgtggatgtggctcaccattcctgcatctggggtgggcagatcacttgaggccaggcgtttgagaccaggcttgccaacacggcaagaccccgtctctacaaaacatacaaaaattagcgaggtgtggtggtatgcacctgtagatccaggaacttgggaggctgaggtgggaggatcgcttgagcccagaaggtcgaggctgcagtgagccgtgaccacatgagggggtcgagcaaaatgactctttgaaaatggccctgacaattctctagttacaaaccctcatttcacaatcattaagtgagggctccaatcacacagccagttgggtcagagcagagctggaatctgcctccctggatctcgtgcttctctgctctacccggcatctccttcctcccacctgtgattcccagtcatgctgtcaataggagtggcgggaggaggatcctggagccataagctagaaaggtccccaagacgcaggccgcaggctacgtgggaaatttccagatgctaagagaaggccgctctgctctttgtcagggctccccgtgaaactgacgaaaagtcaaattccatggaggtgactaaagacaactcgactctatctgtattatttgaatttcatacaatcaagcaggtatttcagtatgacttaattaaaaactgaatacagagtcttaaaacttctatcatttagattctttttttttttttttggagacagaatcttgctgcgttgcccaggctggagtgcagtggcacaatctcagctcactgcagcctctgcctcctgggttcaagaagttctcctgtctcagccccccaagtagctgggattacaggcatgggccaccacacccagctaatttttgtatttttagtagaaatgaagtttcaccattttggccaggccggtctcaaactccagatctccagtgatctgcctgcctcggcctcccaaagtgctgagattacaggtgtgagtcaccacacctggcctagattcatttattttggcttaactaatatctaataggtaaatcacagatatcccactggaggaacattctcacataactccttgtggataataatcacagctaacattgagaggatgccgtgtgccaggagttttgtagatgtgatatcatctcatgcttacgggacgtgtggctgttaccagcaccttacagatgcgaacacagagggttggagagttaggtcatttattcatccacacaggggaggtttggggccaggatcaaacccacgtgtgttggatagactgactccacagtccatgtccccgatccctgcaccacactgcctctcggtgggtatttacacctgacactaatatgtctctctaacgccattactgaagtcaagttctgacagagtaaggaagataagagacaacatcagagcacctgggctcaaggcccagctccaccacttattacttaggagaagttaacctttatgaactgcagtgtctcatccaaacaagaatgattctagatgattgctcacagaactgttgtgaagactaagtctgagaacccatgaacaatgctcagtgcaatgcctggtatataataagctctcaacagaaacacataatcatggttcaggacaccaaagagcacctgggcccccatcacagcactgctgctggccagccctggattgaagcaccatgctcccaggctgccagcttctgcagatttcagctaccctgaacattccctgccttaaagtcagcttccagaagagcacatttgatcccaagttaaattgtgaagtagacgaccagctgccattcatatggagcccagtgtggatgcgtaggtaagttagaggatgaagcgctgccttcagggtcacaccaacaaacttgaggactgactactacagaatccgtgagtgttctggctggtttagaggcctcggttatcccagttgtctgtattgacaagcagcaatcttgatgcgccacctgagtgagggttccactcagctgtaaatgacatgttataatagttttaaatttatatgtgactttttcacttttgtgtcttaaaagccaaaggaaatgacctcagttgttttttatttttccaaaacaaagtccaaaaggtatagactttccagcaccatctccaatggcatgtttccataaaccctctgcataggcacgcccaaccactcgccactctgaaaatgcatcgtgctttctcgtgcctctgtgccttgggctctcaccctccctacctgagaatgactcacttccttgtctccattaaagcatttggttacttcttcctgctttcagaccttttgtataagacgtcagttatgtcttcctaccagactgtagaccacatgaggacaagacgcgcctccttgtcatctgtgtccaccagtctactagaaaagctgaaaaaaggaaaggggatggtccttaagctgtaatgcagacacattttcatgactgcaaatgatagccttccaacctcatgataagtatcaggccacttggcttacttactcttccatgtattgtaatacgtcattataaattgcaggtaaccaacatattgacatatattgtggtgaagaagagcaagtttgactactttaaacattgctttttattccttatcattttaaatgtgttgctacttttgatgcactgcttactgacatttattgcttcctctgcacaagcacaaaatgctggctcactctcagattcaatgtagaactggtgaaagtcattaaatgccatgagccttgggttttttcccatgtactgtagtaaattcctcttgttgggattgtaattgcaggtggtcatcagagaacacagagcccccggaagaattttatgacatttcaggcaagccacaggtcagcctggggaaaaagcaggaagaaaaactggcaatacgagggcccaacccaaaagttattcctgaagagaaacaacggtaagaacttgcaggaatcaaattagttctgatgcagtaggcagaattcttagagaggccccttttatttaaaaatgattttactggccgggcacggtggctcacgcctataatcccagcactttgggaggccgaggcgggcggatcatgaggtcaggagatcgagaccatcctggttaacacggtgaaaccccgtctctactaaaaatacaaaaaaattagcctggcgtggtgtgggtgcctgtagtcccagctactcgggaggctgaggcaggagaatggcgtgaacccgggaggcggagcttgcagtgagcccgagatcgcgccactgtactccagcctgggtgacagcaagactccatctcaaaaaaaaaaaaaaagactttaccaatatgtagtcagaaattgttcaacataagctttctggtattccagtcataatactctagctgttcggacaacgccttctctctcgcaagctctcctcttttttcattctctttaaatctcctatctggcttccctaaataaattttttgtagccagaacttccatttcattgcagtggttagttttgtgtctcccattgctctttagtaacttttaatgacctgagacatcgttggcttcctttccttttccacttcctccaagtcaattgatagcacaccctacactctgtgtttacaagcgtcagagaaggcagcaataattttttttttttttttttttgcctcatcttcactaagggatgcctgaattcttgacagggccagatagaatgcaaaagtggttttctacattgctaagaaataacaggcaagtctagataccacgagagctagcaacctgaagaagtcatctgttcattctttcatttatttaccgtatacggtgttgggtgcacaaaaagcatggagcaaggtgcttcagggtgtttagcaatgagcaagacaaagacactgacaaggagctttcattctgcaagccgaaaaagacaggagctcaaattgataccatacaagtagcatgaaataggcaccccagagagggacacagctatggaaaaatcaaatgagggaaagattacatctcattgggaaagacttggtggaggttcaggtcagttctgggaatgatgagtctgaagtcattggggcattcaagggaagcatgagcaggcagtgggaacctgggaccacaatcaggaagaaaagggtgggtaggatataaggggtccaaagtcacttggaagaggttgtcgtggctggagcagtgaggggctcacacctgagactccagtactttaaagaggctgaggcaggaggatcacttcagccaaggagtttgagaaagaggttatcctcaattccctaattcctgttccgcctactgggatgcttccactcctacagcttccagagcctggtgcagctggggcttttaacttaccaacagatgttctgctgcagctggctcatccaggatccaccataagggacttccgcttaggcaaaattgcatttcagtttttaaaacaaaagagggtcaggcacggtggctaaaggcctttgggaggctgaggtgaggggatctcttgaggccaggagttcagcaacagcctggccaacaatgtgaggctccatctctaaaaaaaaaattaaaaattagctggacacagtggcatgtgcctgtagtcccagacactcaggaggctgaagtgggaggcagaagcatcacttgagcccaggagtttgcggctacagtgagctatgatcaggtcattgcactgaagcttaggcaacagaacaaagaccctcacaaaaaaaaaaaaaaaaaaaaaaaaaaaaaaaaaaaaattaaaaattgaaagggatttttgttgttttgttaggtttttttggtttttgttgttttcttattttttacattgtcttcacagacatcaccctgttagatttttttttttctttttccttttttgagacagggtctcactctatcacataggctgaagtgcagtggctcaggacggctcacaagagcctcaaccccctgggctcaagggatcctcctccctcaacctcccagatagctgcgattgtaggcacatgccaccacacccggctgattttatattttgtagagatggtgtctcactatactgcccaggctggtctcctggcctcaagcaatcctcctgcctcagcctcccaaagtgctgggattataggtgtgagccactagaccaggtcccagacattctttttgaatatacctaagacatttgcaataacagattatgtattatgccatagaccaggaaataatttattatttcattttttctcatttttaagaatgcccagttttttgtcattggtggtggtggtggtggtttttttctgtttttcgtttgtttggttgttttttgttgcccaagctggaatgcagtggcacgatctcagctcactgcaacctctgcctcctgggttcaaatgattctcccacctcagcctcccaagtagctgggattacagcgtgtgccatgacgcccagctgatttttgtattataagtagacacagggtttcaccatgttggccaagttggtctcgaacttctgatctcaagtgattcactcacctcaaccttccaaagtgctgggattacaggtgtgaaccaccatgctcggcccccatggtttccttaatctgaaaagtataaaaaaggttttttttaatccagattcccactagccagaagtaatatcatttatagtaccaaacttttctatttgattaatgcaattaaggcaaattaatatttgtgtgttgattcttttatttgcatttttttaaaaaacaaaacttggatgttgtaattttgttattttctttttcactcgattatgtatcatggccttttttgacatatgcatctacattatcattttagattcctgcaggatattccagtttattgataggcattcaggttatattgatagacattcaggttatttccactggtttttttttttctttttttctttcttttcagacagagttttgctcttgttgcccaggctggagtgcaatgtaacaatctcggctcactgcaacctccacctcctgggttcaaacgattctcctgcctcagccttcccagttgctaggcctacaggcatgcaccaccacacctggctaattttttgtatttttagtagagatggagttttgccatgttggccaggctggtctcgaactcctgacctcaggtaatccacccgccttggcctctcaaagtgctgtaagccaccacacctggctgtttatttccacttttaaattgcttttagataatactgtgataataaacatcttcatatgtatactcttgtgcatgtatctgggtgtctctccttactatccatttatagaagtaggattactaggtcgaaagatgtggttaacggtattaatacacattgtccttaaatttaacatcacgtcatctaaactgtggcctcaccttccctcccctctaagtacttcccactcatcatgtggtacctctttcccagctctacacctatcttgacccccattcctgcaaggcctaagctgcctactagctgcctattagctaatcaacagaatattcactttttagagcttttaaaattattactcattttcatgaagattaaaatgacttccagagccaaggaatgaagctataatgaagacaacaaagacaggagaacgatgatgggggttgatccttggctgatagacttcaaagtcaaccattagcacccaggatgagtcattttgaattagaatcagatactctgcccacctataatgagagatcttcttgatctttaatgagtaccatctcttcattgaaacagtcaccagaatttgcatttccaagatctcttgccactttccccaaaataccttctatggccattacacagaaaaaaacttatctgtgcctgcaaagaaaactcagctttggaccaaattatccccactgtgtacaacaaaatcacattcctctggcctctgtatttctctccgtagtccatttcaacgcttatagcaaatcaacattgtgacccaataattattaagtccattaatctttactgcattattaatcgcaaatctcaccaactaaccttgcaaagtgcatatgtgggtaagccatggaagctagaaagagtttcctgggaaaatctgggatcttatttcatgtcctcacatttctctgaaggaaaaaaacttgtaaacattgagtcaaaaccttacaaattttggagggaggaggagtgcaaaaaattcttacaaatttcacaaggttacaaagcaaaaggggaatgtggtcttgaaaaattcttaaaacttaaccagaatgaatgacgactgatctttctttccaatagtttgatgtttggattagtgcatttccgttgtgaaatccgattttctattatccagttacacctagtaggcatgaaataaatgtttgttgaaatgaattaaatgtaatatgctcaggtcaatgtctttcacattctttataaggtcttatatttggaaaataatattaacaaccatttccatgaataacatttacttcatccatagaaaatgtaaagatactaccaaagggagccatcctaagatgcctgaaatgagttattaaattctaacttaaccacaaccaatattactaatttgttttaaataacttgtccaactcctagaaggaaacaaggatttggggagcagaagtagatcaagaaaattagtattaaatggcaggagtaaagggataacatttgaaattctggcttcctggagtgatcagtcaaaagctctcctgctggaaaataatatcttgaattgaaaagcattcggatcatggtcgatttttaacccaattaaatttccttctcctaggtagcctatttactaaagcagtatgatagctgttaatattatcatttaataaacatattgctagtaaaaatgaactctattccaactattaccacagcataaataaagattttttctcaaaatgttagcttggtttgggattgctgctttttctttccaattgatttgcctctgcccagctgatctgcctctgaggagctaaaaaataccaataaatagtaacacagactattaaagtatgcttttcataatatgtcaatatctttctatttctcaggataaccatatgcaggaaggatagggaaacaataaactattattttaactgcctaacagcgttttttcaactagaaaccacattcaaacaaccttatttttcactatgcagcacgtagtccttctcttatttcctttttcttaaaaaaattgaatgtattttgctaatcttctctgtatctttccaattttaccctgtgtgctgccgaagagagcacttttctgggggaggggaggggaggggtgttgtttttctatttttgtttttaagacagagtcttgcactgtcacccaggctggagtgcagcggcatgatctcagctcattgcaacctccgactcccaggagtcaagcaattctcatgcctcagcctccctagtagctgggattacaggtgtgtgccaccacgcttggataatttttgtatttttagcagagatggttttgccctgttggccaggctgctatccactcctggcctcaactgacccacccacctcagcctccaaaagtgctgggactacaggcatgagccaccatgcctggcccagaacttcctaagaaacacttacacgtcactgcttgctgtctcacacttccttgggtgaattccctggagagtgaaaagattcaaacagacacaaaatggcaatacatgctctgtccacttcacaggaatttacctgaatagtttcagacacagactttatcataattaagaatttttgttttttggggtttttttttttagatggagtcttgctctgtcgcccaggctgaaatgcagtagcgtgatttcggctcactgcaagctccacctcccgggttcacaccattctcctgcctcagcctcctgactagctgggattataggcatgtgcctggctaatttttgtatttttagtagagacgggatttcatcatgttggtcaggctggtctcaaactcctgaccttttgatccgcatgcctcagcctcccaaagtgttgggattacaggcatgagccactgcgcccggccagagaaatattttttaataaacaacttcagaggccaggcacagtagcttatacctttaatcccagtactttgggaggccaatggggggaggaacacttgaggccagttcaaccagcctgggcaacacagcaggaccccatctcaacaaaaaaattaagcactttgggaggccaaggtgggaggatggcttaaggtaaagagttcgagaccagcctcagctacttggcaagaacctgtctcaagaaaacaaagaaaaaatttaaaaaaacacaaaaactaattaaattatgattatagaaatcttccgaaagataagaaaatgttcgtcaaataccaagtaaagatttttaaaaagagtacgtgccacagtgaccaactcatcctggttaatctagaactgctacagttttaaaactaaaactgttttaaagtccacagttcatgccaggcacagtggctcatgcctgtaatcccagcactttgggaggccatggcaggtagatggcttgaggccaggagtttgagaccagcctgaccaacgtggtgaaactccatctctactaaaaatacaaaaattagctggatgtgcaggtgcatacctgtaatcccagctactcgggaggctgaggcatgacaattgcttgaacccagggggcagaggttgcaatgagccaagatcgtgccaccgtactccagcctgggtgataagagtgagacattgtctcaaaaaataaaataaagcccacagtcctgggaacaccccacagaccaaactgaggcaactgattaccctagcataagcaatctttgaatgaaaatatcaaaatcatcaagaccactccctttaactgaattaaacagcctttattgaatgccttctgtgtataaagtacaggcagcccttcatacccacaggttccatatccatggatacaaccaaccatggatctaaaatatttgggggtaaaactgcagtaaaagtaatacaacaatataaataatacaaatttaaaacccatgtagtataactatttacatagcatttacatggcagtagatattaagaaatttagcgatgatttagagtacacaggaggatgaagttttatacgcattgactatgccattatatcagggacttgagcatctgtggattttggtattcctagggtcctagaaccaatccccaacagataccaaggatgactgcactgtgctgagcaggaatcagtcagggtccaggcaggagacggacagtacagccaaactgggcgatctgacgacagtgtcacaaagaggctatttacagaggtgtgggcatagttagagaaaacaatgaacagagaagcatcctgggctagcaagagtgggggctgccagcacctgaaaaggcagaggaggctgtccaacctgaactcaccacgacccagcaggaggcggcaagccctcccctcctccaccctacagactagcactgtgcctcccactgggtaaatctgactacaaggcagaggaagggggcttgttgatggagtcctcgcctgtcagcaccccaagccacagagcagggcagagtgagtctgaaggcacacaaacaacacataagcctggcccctgctcttggcaacttaaaaatctaagggaaacatcaagtcgttattttaggcacatactgagacaactcactagtgccaaaaactgagtgtttaggtctaaccggtccctgcagaattaaatcaaaatcaagttattcattccttatggctcctgatctgctttcggttagaatgaatgagccctggggattaaaagagagatttatgtatccgtgaaattattttactcatcccacatacctgtgctagtttgagtcctgcatctgtcccctcactttttgtgcgcgtttgagagagtcttgctctgacacccaggctctggagtgcaggggcatgatcttggctcactataaccttgacctcctgggttcaaatgattctcctgcctcagcttccgaagtagctgggaccacaggcatgtgccatcacacccagctaatttttgtattttttttttttaagtagagacagggtttcattatatgttggcccggctggtctcaaactcctgacttcatataatccacccaccttggcctcccaacgtgatgggattatagacgtgagccaccatgccgagcctgtcccctctttataattccaaaggtgagggtgtctttcgtgtaacatgtcagggcttaccttgatgggtttatgctgcagtactgtgccaaatgtctataccctgaagcaacctgctcgcgtccggaatcggtgggttcttggtctcactgacttcaaatgtgatgccgcagaccctcgctctgagtgtcacagttcttaaaggcagcgtgtccggagtttgttccttctgctgctcggatgtgtttggagtttcttccttctgatgggttcgtggtcttgctggcttcaaaagtgaagctgcagaccttcgcagtgagtgttacagctcttaatgcagcgcgtctggaattcttcgttcctctcgttgggttcgtggtctcactggcttcaggagtgaagctgcaaaccttcgggtgagtgctacaactcacaaaagcagtgtggactcaaagaattagcagcaacaatatttattgcaaagagcaaaaaaataaagcttccaaaccgtggaaaaagaccacagcagattaccgctgctggctcgggcagcctgcttttattctcttacctggccccacccacatcctgctgattggtccattttacagagagccaattggtctgttttacagagagctgattggtccgttttgacagggtactgattggtgcctttacaatccctgagctggacacaaaagttctccacatccccgctagattagctagacacagagtgtcgattgctgcattcacaaaccctgagctagacacagggtttgtgtctagctgattggtgtgtttacaaaccttgagctagatacagagtgctgattggtgtatttacaatcccttagctagacataaaggttctccaagtccccaccagaatcaggagcccagctggctttacacagtggatcccgcaccgagggtgcaggtggagctgcctgccagtcctgcgcctgtgcgcccacactcctcagcccttgggtggccgatgggactgggcgccgtggagcagggggcggcgctcgtgggggaggctccggcggcgtaggagcccacagcgaggtggggaggctcaggcatggcgggctgcaggtcccgagccctgccccgctgggaggcctggggaggcagctaaggcccggcgagaagtcgagcacagcagctgctggcccaggtgctaggcctctcactgcccggggcttgctggtggacctgcacctccggggcttgcgggcggacctgcccgccgagcccacgcccacccggaactcgcactggcctgcaagcaccgcgcacagccccggttccgcccgcgcctctccctccacaccttcccgcaagctgagggaagcagctccagccttggccagcccagaaaggggctcccacagtgcagcggcgggctgaggggctcaagcgtggccagagtgggcgccaaggccgaggaggcgccgagagcgagcgagggctgtgaacaaactccggacacgctgtcacctctcactcttatcaaaggtgagcatctctgtgcttttccaaaatgtgtccatttttgtcaaagccaaaaacaaaagagcaaattaccaagcagcgtttcactgcatttatctgttgtctacaactcctgacttgctaagggcgactgaaatttacaggaggaacatcacaggaaatcatcacgaatgtcagctccaaaatggtccccatgtcttattctttccatcaccattaatccaagatttagaggttaaaattctaataaatgggcccggcacggtggctcatgtctgtaatcccagcactttggcgtacacaggcagataacttgaattcaggagttcaagaccagcctgggcaacatttgtctctacaagaaatacaaaaaaattaggccggcgtggcggctctcgcgcataatcccagcactttgggaggccgaggtgggcggatcacaaggtcaggagttccagaccagcctgaccaacatggtgaaaccctgtctgtactaaaaatacaaaaattagccaggcgtggtacgcacctgtaatcccagctactcaggaggctgaggcaggagaattgcttgaacctgggaggcagacgttgcagtaagccaagatcgcaccattgcactccagcctaggggacagggcgagactctgtctcaaaaaaaaaaaaaaaaaaaattagctggatatgctggcacacacctgtggtcccacctatttgggaggctgaggcgagaggattgcttgagcccacagtggttgcagtgagctgagatggcatcactgccttctagtccagcctgggtgagagagtgagacctgtctcaaaaaaaaaaaaaagtcgaataaatgtatcataaaattagatttcattctgttagcattaaactgcagaaattcctcacacaatgatatcatcatggcagctaatgtctcatgaaaagacaagtctccatgtgaagggtgcttatgatttttggaaaacaagttagtctgagactccattcttctctttgtaaaatgtgggaaataatgggtgactcattgattgttgtaaggattaaataatataatttccaaaaatacctaacactaagtaggctctaaaattagtctccccaccctcaaactctctaccttaccctaagtgcatatatacatttaaatacatagttttagtcactttgtttaacaatgttacattttagtaatttaaaaaatatattttccccaaaaccagaaactccaaatgtatctccacttccctgacacaaagtagctatctgccaacacaaggaatggggtgaaaggaataggacattccattgaaccaggagtttccagagaagtgtgggtttcttcctttcaacctctttgatgtaatctaaatcaataagtaatgacagtttgtccaaaagtgtcatacattcaggtgaggaagaagggtaggaagctcatggatgtatgcagaggaacttaagaactcctctcaaacactgtaaaacaggttttctgtccatacatagggtggatttgcaacacagccttccacaggctcaagcccatctgttgtaaggagcatgagttaggacagaacaaggaggaaaactaccaagtcatctctcttcacacaagtccagccaagtattgattgtttattcaaagctttcttttctccctccctctctctgttcagtcactatcccctgcctcccacccaccccctccctccaccaaatgaaattaaatttctcaactacctctatttgatgctgtgtttagcataagccctgagtagatatggattctgtttcttgaattttccctgacaaaccgcttccagctgccctttggggtgggatgccaccgtgataaaatacagtgtcatgtttgctgaggatttcagctgccacctgggggctcatgcactcaatgagtgctctttagcaaggctggtggtgacatggtgacaaacggtatgttgacttttttctttctgtggtttaggactggttggtttcagtcttgctggctctttctcctgggttaccaacattttccacatttagagcctgtgactgcctctcctccaggattattgcagcaagctccttgctgtcgacagaagccatttgttggttagagggtttacaactgagacgacctacaagtgcccatttgatagttaacccatgcttcagaatttgcttattttttttcctttttaaggactctttcttcaactaaacagtttctcttcagagtgttatcactccgctcccatgaaatgactgggactgttacttcttttatctctggtcacacccagcaaaattaagcttgcttgtggatgattagccgtaggctgatccacatctgagccaattgactggctgcttaggaggactttgcctcgggctcacccctgaagccaccacccctgaggccactgcctgtgccagggcattcccaagcctctatccccagtgtgggcttccctgctgcatgtggctcttcagcctcaggttcctcctcttcactcccccatccttgcatgggcttcctcttccgtcccgcttgcttctagaacatttccaattattgcttccaggtcctgaacactagtggctgaactgaaaaatggaaaagatgatgaaagccaggcactgagaaatcagttaattaaactcttcagaggtccccagaaaggacagattcccctgcacacctgatgaggaatcttggactcttgcttattaaagggaaaggaagtccattttactggacacttgtcgaggaattccagcaagcccctggacagagggcttcagtgaccagggtagctttctgcttttggttgtaaagagatcagaaagtgtcatccttcaaagcgatgtcatgggctcagagccctttctgtgcactttgccatattgtgcccactccggttctcaaggtcagttggccatctgaagtggaacaatgacttctctacaatccagctttaactatttgcacagttccatgccattccactaatttagtacataccagggtgtacccaggcttcaggctggtctgggttctacttcccaagcccagtcccagcacatgccttcccaaagatctttcctcccaggtcccagtctccctcttaggatcaaaccaattcaacttaacccttatttaatgtcttctctctgcctactcagcccagtgtggtagtcaggcacagaaactcatcaattacagcacagagtcagcaggtcaacaacagagtgggataaaattccctcttctccaaacacacaaacccagctctgtagcatcttttttccacccctgaaattcccccaaacagactatcccttgtgctggcatccggcaaggtcctaaagaggccctacagcctgtttttgctcaggctgttttcaagcctttttccgatctattttctctgaaactttgcgtgcatatacacacaccagaatcaacaagtcgactgagcatgcaaaagccacatccacatttctagaccttgataccttctcagacctctggcaaatctaaagcccagaccaactgggattactcccaggttatacattgctttagagaagagaatatttgtcacacctaggcatggatccgagaagtcctcacatgctcacatgcagaaggcccattccttaagtaattagaaatccatcatctaaaaaaaacaatgaccaaatcacattttgattaggattaaaaggtggaggctgggcatggtggctcatgtctgtaatcccagcactttgggaggccaaggcgggtggatcacttgaggtcaggagtttgagacctgcctgggcaacagggtgaaatcctgtctctacaaaaaatacaaaaattagctgtgcatggtggtgcatgtatgtggtcccagctactcaggaggctgaggtgggagaatcacttgggcctgggaagtggaggttgcagtgagccacgatcacgctactacactccagcctgggccataaagtgagactgtgtctcaaaaaaaaaggtagagacaatagtacaggtaccttgaaacatccaaaaacccaaaagcttttctattctgaaaggatcagacaattttcttataagaaatatattttttctgatgaggctttgctggagatattaccagaacaagtgtctccaaccactggtagtctggaaaatgataaaggtgggttctgggtggcacagtgaaaccagcctgagattacaaacctttgctgggggtaaactacagaagcaaccatggagacttaattctgtgtttttctgagattctataattaggtaatgtcatttacatgcttccaagtgagggaaggaaattctttggaggcaaagcgtaacggttccagtactggcaccaaatgtcttcctgctcagcaagtccattttaaagtcttgttcatgagctaagctgagttctcctacagaagcagagtgaagagtcaaggaaatgtgaagactggccaggcacggtggctcatgcctgtgatcccagcactttgggaggctgaggcgagcagatcacaaggtcaggagttcaagaccagcctgaccaacatggtgaaaccccgtctctactaaaaatacaaaattagcctggcgtgctggtgcatgcctataatcccagctactcaggaggctgaggcagaagaatcgcttgaacccaggaggcggaggttgcagtgagccgagattgcgccattgtactccagcctgggcaacaagagcgaaattccatctcaaaaaaaaaaaaaaaaaaaaaaaaaagaacatacctctttcagcatccccttgcagggtcctccctatctctgtgattccaatagtattctctgaaacaacacagaagagttggcctccctccctcgcctgacatagctctttacacagttgcaattccatgcctcactcaccaccccgttctggtgactttcctctgcacacattccgccttgctctccctcttagtttttaacacctatttagcaaatatcctggaaaaatatttccaaaaaaagttaaaagtggttgtttggaatgatgagattaccggtccactgttgtttgctgcttctttgcatgttttcaacgtctgggcctggaacaagtgcaggtattcctttgctcattccgtaacgatgctcagcattgagtgtgctatcctgactagtgcgaatactccattgcttgacttctcctgtgtccggaacgttacacttctggtaatacattgtacgattgtatttgtctttttcaagaccacttaacaccttcagcttatataaatctcgtagctaactgaagcctccaggttttttcacatgaagtgttcacataaatcatggatctcccaacctattttcatctttatgagtagttaagacataaatccttcttacagtattaaagggtgctagtgtattaaactacctaaatagccagcatgccttttaaaggggctatcatgatctaattcaaatggtaagaattccagggtctatgtcaggtgcccctggctccctctgtgtctcatccccttccattatggatccaaaaaacatgtcttgaaatgttgcctcctggccgggcatggtggctcatgcctgtaatcccagcattttgggaggctgaggtaggcagatcacttgaggtcaggagttcgagaccagcgcctggccaacatagtgaaaccccatctctattaaaaatacaataattagccagatgcggtggcatgcacctgtaatcccagctactcaggagactgaggcaggagaatcacttgaaccccagaggcagaggttgcagtgagccgagatgcaggttgcagtgagccaacatcgcaccactgcactccagcctgagtgacagagaaagactctgtctcaaaaaaaaaaaagaaatcattgcctcctgcaaaaattaatatgcaagaaaattcaagggactagtaatctgtggaaggagggggaagatggtaatgttttatttcttttcggtgtcaattacatgaggtcattttattttataatatattctcttgtatgtgtgaaatacaaattttaaatatgtgataatttaaaagtaatatgtagagttgatttaaaataggaaaaaatgactgggcatggtggtccatccctgtaatcccagcactctgggaggctgagacaggaggatcacttgagccaaggagtttgggactggcctgggcaacatagcaagatcctgtctctacaaaaagtacaaaaattagctaagcatgatggtgcatgcttgtagttccagctactcaggaggctgaggcgggaggattgcttgagccccagagattgcaaatgtagtgagctctgattgtgccaccgcaccccagcctgggcaacagagccagaccctgtctctaaattaattaattaatttaatttaatgggaagaaatgtctgggcactgcggcttatgcctgtaatcccagcacattgggaggcagaggctggaggatcacttgaggcaagaaattcaagaccagcctgagcaacatagcaagaccccatctctacaaaaacattaaaaaataaaaaattcactgggcatagtggtgaatgcctgcagtcatagctactcaggaggctgaggtgggaggcttgctggagcctgggaggttgaggcagcaaatgagctctggttgcaccactgcactgcagcctgggcaacagagagagatcctgttttttaaaaaaaaagagggggggattgggggggaattctcagtatcccttcaattttgaggggaaaaaaggtaataagaaaaaacaaggagaaagcaatagataagcaaatgaaagggaggaaaacagattcaagtttgaaaaggaaaatgaaagaaaagatagcggcctggaagacaggcagagataggaggattagatggagtatttggctgaacagggacaacagaggtggtgaggagtccctgcggcgctgcagagtgggagagagcggaacagtgaaagctacttcggatcctccaagaaacgtcagcaaatccatcctattcctcagcattctgcttcagccacctaaggcagtcagcctcccactgccgttcagcctgtgtggcccagagccaggaagcacgttccctcgcagctctgggtacagattccctatacacatgagtgtctccctcccggtgactcagctgctgtgctttcctctccttccccagggcctgagcagtagcctgcctgatgatgatcaagcagagccctgcaagtttcaagaggaatgtcagtgactcttcactgaaaccccccaggtaggcatgcagtgacaatccagggctttcctggacacattgcaatcctaacctcagggtaaaagccatgtccctgttccgccacagcatggcaaaatcaattccagttggattaaaaagttacatgtttttaaaaaaatgaaaccgtaaaaatgtatgtgactcagataaagtaaaaaaaaaaaaaagaaaaaagtgagtggttatgtgtttttaaaaagacagagatcaaatggataaatattacacaagactagtctaaattgtttggtgtacaccatgaaatacttttttcaacctctggctccaaatctccaaacttttgtccccttccttactccttgtgctgaacagacagccttttagtcactcagttttaagagaaacttcattctggtcattaagactccatctcaggtatgaaaatttcagtaagtgaaggcaaagattaattttatattcgtttaaaggcttttcccgtccacctaaggccaggcttgcagtccctgttctggaaggtgggctgtttgctctttctgcattttactcctcttctcctctctctctgcagtttctttttctttttcttttcttttcttcttctttttttttttttttcttgagacagagtctcactctgttacccaggttggagtgcaatggcacaatctcgtgtcactgcaacctctgcttcctgggttcaagctattctcctgcctcagccacccaagtagctaggattacaggtgatggctaatttttgtattttttagtagagatggggtttcaccatgttggccaggctggtctcgaattcctggcctcaggtgatccatccgtctcagcctcccaaagtgctgggattacaggcatgagccaccacgcccagccctctctctgctgtttcccctctggcgttgtcgggaagggaggggaaaggactaggggaaaggtgcctttatgtaagtcatgcagctgtcctgacagtcaaactctctctctgggagggtccccttgtgtgggctcaagagacctttgagggtctctccagggcactgttgtctgatgcatactgggtcatctcagagtcccactcctaggctcctgccagctctccccatcacagcctggggcacatgatgcagggggctccccaccagacagccagccaccttgggcgggtcaccagccagatggcctgagtcactgtctgctgcattcacttggcccacagcacatccttccactccacattccagatggggagagtgtagctgctctctctgtctgctttctcttcatcccgctgggacgggctgctgcagcaagacttttgcattcagaattctctagatgaaaaggagagaccagtttctatgttcagttagactcctaattcaggaaggggagggcacagggatgggaagttgggggatggggatggagggaagatggggatggggaagaggatgggtccacctctctcagaaactttctcattattctgtgctagtgtcagcaccagatgggccttcagaccccagcatctccgtgagcagtgagcaaagcggggcacagcagcctcccgctttacaggtaggtcttggtttctcccagtggcaagcttggagtccatctggcaaggaagagcccataggggaatcgccccacaccacactctccctttacatctgtcctgtgcttgggtccctttggtggtctggtgaagctgtggactccttagaatgatgtttttggccgggcacagtggctcatgcctgtaatcccagcactttgggaggccgaggcaggcggatcagctgaggtcgggagttcaagaccagcctgaccaacatggagaaaccccgtctctactaaaaatacaaaatttgctgggcgtggtggcgcatgcctgtaatcccagctacttaggaggctgaggcaggagaatcgcttgaacccgggagatggaggttgcggtgagctgagattcattacatcgttgcactctagcctgggtaacaacagcgaaactctgtctcaaaaaaaagaaaaaaaaaaggacgtttttaagtttataaaataaaatatacaggactacaaaggttatcaattacattgaaatgcagttatcacaatcatttgaaaatgtgtactctagtaataatgcttctttttaaaaaaaatcactttattaggatataattgacatacaaaaagctgtacctattcaggccaggctcagtggctcatggctgtaatcctagccctttgggaggcctaggtgggtggatcgcttgaggaaaggagttcgagaccagcctggccaacatggtgaaaccccatctctactaaaaatacaaaaaaattagccaagcttggtggtgcacacctgtaatcccaactactcaggaggctgaggtgggagaatcacttgaacccaggaggtggaggttgcggcgagctgagatcgctccactgcactctagcacgggcaacaagagcgaaactccatctcaaaaaaaaaaatagttgtacatatttaatgtatacgtgcacccccatgaaactatcaccacaatttatgttataaacatatccatcatctccaaaaggttcccccgccctctgtatttatgtgcatgtgtgcacgtgatgggggggggtgggatgagagcacctaacagttaagatctaccctcttggtaaatgctcaagtatgcaagttctgttaactatagacagcatgctctccagtagctctttagaacttgtataagggaaatgttgtaccctttgaccaagccctcctgtttcccactcccccagcccctgtcaaccatcattctgctctttgcttctatgtgtttgactattttatatttctcaagtgaaatgatgtagtgcttgtccttctgtgtctggcttctttcacttagatgatgctttattaaaacatagtataacaaggtctaacagtgatttctaactagtgatgagtataaaggtattttgctatatctgcaatagctgtatgttatatgaaaacacgtgtgctttctactagagactaagttacagttgttgctggtactactatagtttgttgcgtacattcataattgggggaaatgcaacatttcagctagaggatagtgaaaataaggatggaatatttttcccattgatgtttgcaacctgccaaggacagacaaagaacccttgcactagactgactactgcctgctccagggaatcctcccacagccttcctggcctctgcttatataggtcaggagggtgcaggggacatggctgcagggctggtttggtggcctcttggtgaggtttgcagaatcacctggcaacttccctaggagtggagagacatgaaagccaatgctactcagcttttttttttttctgctacgcactttattagcaacttagctttttttttccctcataacccatagacttagcaggaggagcatagacattaagagtaagtgcacatgaaacattgaaaaggagtaaacatgaatcctctctttgcaaaagacagtctcagaaatttctcatctgctaattcacttaattcaacaaattacatctatcatgtttcaagtgctttgtttatcgatatagtggtaaacagaatacactgatgggacaagcaactctgagatgacagaacgagttccctaaatagtctgttactgtgactcctgtttatgcttgatattcacaaaatattctggaattgatacccgagaaactgctaacagtgattacctctggggagtagagatggaaattgagaggaaaagaagggaatgtcttttcatgttaaactcctttgtactgtctttaaaaataataataaacatctttttatatgatgaaaaacaagttgtaaagacaactttaaaagttttcctaaaggaaaccatatgtgactttaactgatttgagacagtagaagctttctaagtataaaagtaatagaaggaacgatgggggaaattgatagatttcactacacacacaaaaaaagatgcaaaacacgtcacagaccaaaaataacaaacttaagaaatatttgcaacaaaaattaaaaggggccaggcgcagtggctcacgcctgtaatcccagcactttgggaggctgaggcgggtgaatcacctgaggtcaggagtttgagaccagcctggccaacatggtgaaaccccgtgtctactaaaaatacaaaatcagcatggtggcacatgcctgtaatcccagctactcaggaggctgaggcaggagaatcccttgaaactgggaggtggaggttgcagtgagccgtgatcatgttgcaaaactccgtctcaaaaaaaaaaaaaaatagcctcagcctcccaagtaggggggactacaggcatgcaccaccacgcctggctaatttttgtatttttagtagagacagggtttcaccatgttggccaggatggtctcgatctcttgacctcatgatccacccactttggcctcccagagtgctgggattacaggtgtgagccatcgcaccagctggaaatggtttcttaaataagacccaaaacggacaaatgtttaaaaacgtaaattgaattacatgaaagttaaaaacttcaacacaataacagacatcttagaaaaaatgtaaaaagtcaaaagcctaaaagaaagtgtttgcaacacgaaaaacaaagcattaatatacaaaacatgctaaaattattttaaataaactttaaagaaaatacaatagaaaaaaatgagtaaatgatacatgcagtaattcacagaagaaactgctatagtcaaaaaatacaggctgggctctatggctcccagcactttgggaggccaaggcaaatggatcacttgaggccaggagttggagaccagcctggccaacatggtgaaaccccatctctactaaaagtacaataaatgagccaggcatggtggtgcacacctgtaatcccaactactagggaggctgaggcacaagaatcatttgaacctgggaggcagaggttgcagtgagccaagattatacaccattgcacctcagcgtgggtgaccaagtgagactctgtctcagaaaagtagtaataagtaaaaataaaacaaatgcaggaaaagttgtacaactttaccacaaacatgtaaatgcaaataaatccacatttcactcccacaaatcatttcactttcccatatgattagaaaaactttaaaattttgacaaaaccaagtgttagagaggatcgtgggaaaccaaagattctcatgcactattagtgggaatgcaaatttattcaatcactttggagaaaaagttggcattatccagcaaagtgaaaaatgagtacaacctctgacccaattctgcttctgaagaaacacttgtacatgtgtgcaaagagacaaataaagatgtttactgcagtgttgctctatagtagagattagttggaactagctcaaacgtctgtgtgtagaagaatggataaataaactacaatggaacaatatgtgcagtataaacaaaggaaccagatttatacgtagcgacatcaaggaattattaaaaacaatgtggccgggcgcagcggctcacgcctgt

SEQ ID NO: 649 - DNA, 32744 bp, Homo sapiens
  source 1..32744: mol_type = other DNA
ccgaggaggaagaggttgatggcggcggcggagctccgagagacctcggctgggcaggggccggccgtggcgggccggggactgcgcctctagagccgcgagttctcgggaattcgccgcagcggacgcgctcggcgaatttgtgctcttgtgccctcctccgggcttgggcccaggcccggcccctcgcacttgcccttaccttttctatcgagtccgcatccctctccagccactgcgacccggcgaagagaaaaaggaacttcccccaccccctcgggtgccgtcggagccccccagcccacccctgggtgcggcgcggggaccccgggccgaagaagagatttcctgaggattctggttttcctcgcttgtatctccgaaagaattaaaaatggccgagaatgtggtggaaccggggccgccttcagccaagcggcctaaactctcatctccggccctctcggcgtccgccagcgatggcacaggttagtttcggcagccccggccttccacgttccctttaatcttttctactcggtgcgcctttattcttccattttttttttcttcctctctctctagttccctgccccttaattaattttaaaggtatttgaatgagctggtcgaagacgtccagtagcccaaccattttctttgcctcctaatacattgattgcaacactatgtcatatcggtgtgtgttctggaattagagctcgtaagtgggtgctatatagaaatggcctgtattgttgctctcatgcaatttaatttgggaaatgccaatgcatttgtgtgtaagagctcctatgcaatttaagtttcattttttttgttcttggcaaatgaatttcgaatcctttctctttactgtacttactgtgtttcctctactttccactcttcgaaattttctctcctttgcagaatattttctgttgaggaatagggtgtaaaaaaatcttgattttgtgtgtgcgaggtccaagatttcaggttagaggtgaagtttaacaattcttttatcttacctaccattcttagcttttttttcctttttcttcttatttgctttaagaatcaatatggagcgcagttcatttcacatctcccagttctttggtgtgagaccaaaatgtctgaaactctgggtttttaggttgggagaacaggggcatgttctttgcagtttgcagtcactttctcattttaggggaaataagataaacaattttgtggagttacgtacctggaaatcaaggttagaagttgaaagagttccaatcatgaactacaaacgtgaactgattgtacaaaagtttaaaatgtgcattaggtttggtgtttgtgtgtgtctttgtctttttacacttttaaacatacttggagatcaagattttcgtttaaaagctttacgaccagttcattcagttgtggactagctcctttgtcaggagaagttcagggagacttcttccatcatcccttcattcttttcttacagttagtttaatggtgttatcctgatgggtaaggaccttttctttgctgggataatgaagatgaagaatggctggccatctgacagtccacaagatgttcccctttactacggagcatctctttaactccctgagagcaggctcagcgtcatccctccatctgccagtgagagtgcataatggagttaaatgtaccctttgagtttgtagagaacttcgagagcatgtttctaaataggcttcatttcagagggtgaaaatgggaagacagagctaatgctttgaattcgttgcttttataagaaagatgtgaaatgaatttaagttaacctgcaaaaattgagaagtaggaatcttgcgagttcctctacctaaggcttgtaacattgattatgcatgaactttgatctgtacctattctatgaaggtactgtagtctccagggatttttttagctggttttttccttcagaattcatacacatacacaaacgtcgttgtattcctttgcacctactaaagtgccattcagaaacattttttagatcatctttagagacttaatcacctgtagatttttgtggtgtttctttcgtatttgtgtaatgtggtagtttttgctttttagttttggtgtaacgtggtagtcgattttacattggagttagccagtgacttggaacgtaggggaaacttttttgtgtactttgagtagtcctgatttgagcagtttcgtcttggagctgtattgtttaaatacttctgttcaggtgtgctactactttctccatgtcggtctgttttgctacttgaaatatctttgaataattacaagagttttaaatgtgttaagtgggcttttatagtttaaaaaaaaactcaacattgagattaattcattcactcataatgctaagagtttatcttagttacttttctaaattttgtaatgagggttaactttacccccctccccaaatcaagattctactccaggaattctttggtgtacggtttttaattgtaaccagtctgggtttgggggaggggagaagtgagtataaagaaaatactgtccctctgttaacttacttcaagttgggtaccattgtaatttttttttttttttttttttttttgagatggagtctcattctgtcacccaggctggagtgcagtggtgcgatctcactacaacctctgcctcctgggttaaagcagttctgtctcagcctccctagtagctaggactacaggcgcagaccaccacgcctggctgatttttgtatttttagttgagacaggatttcaccatattggtcaggctggtctcgatctcctgccctcaagtgatccacccaccttggcctcccgaagtgctggggttacaggtatgagccgcccggccagaggtaccattatatcttgaattttttttttttgacattctgcagtttgtaatatgtttgcaggtaacttttattggaggcacatcacctcttaaaacttttaagtttcaaacttgtaacttttgatttttgagttgtcacttgggtattttataaatgtgaaagaaaattatttcttgatattatggtttttgtctagaactggttgaaataagcccgaaattctagcacctaaaacttttttaaaaaaagtgatttaggcttgcaaatttcgtgatgtaaatatatccaccaagagcgttctaatgtcagctttaaaggaaagaaaactggaatccaatgggatgacatgctaaagtgttacaaatcaaattattacttaaatctcaacctctgaattgctgtttaatactcagatattctcctaaaaaatttccaggttgattcaaataacttaggttaaactcaacttttacgtgttgggatggggaagagaagacttatttgtagccttcacacctttatgttcctgtttcagtatttgcatttgatccattgaaatttttatttcatttggtatggttagggtaaaacaaatcatttgagaaatgacattttgttctccctctccctccaaaaaaaaaagattatgaaagccacttgtaaactttttttgtaaaaatgaccaaaagactggaaaagttaatgttaggcaaatcctggaaatatcttttggagctgtttctgatcatcttgagtgatggaaatgatgagggtcatctgttgtcttcattactcagtgaacacgttttgtcactgcttggtaaacgcttaatgccgtatgcacttaaaaagcacctggaaagataggattttaggatctggcatataattaagtagggtaaagatccttctggtcttggtacagttttgtggccctgggttttgtgcttttttgttttttgagtttttcccccatttcaaagacacagggcagatagtgtgtaaagtatacctgctttttgaccagtagattaatgtacacagtggagaagtggtaaggctttttaaaatgtcagctctactttttttttttttttttttttttgagacagaggtttgctctcgttgcccaggctggagtgcagtagctcgatcttggctcactgcaatctcaacctcccaggttcaagcgattctctgcttcaccctcctcagtagctgggattgcaggtgtccacaaccatgcccagctaagttttgtattttttagtggagacagtatttcaccattttggccaggctggtctcgaactcctgacctcaggtgatccacccgcctcagcctcccaaagtgctgggaatacaggcgtgagccaccatgcccggctgtcagctctattttcttaaaatgccattgtgttagtggttcgtcatcctaaccaaaacattttgatcaagaccatttattttccagctctgtaacttgtgatatgctatgttttattttattttggcttgaatgtttacataagagtttgcttctggagtcttgcagatatagctcctgatttagtgaggcatttctctcctcagtattaaattgcaaaacattttactaaagtgctttaagtttttctggcaattattctcaaggccttgtaagttcatttataggacttcaagaaggttgtctctggttgatagtgagataaagtgacttttaagttgtaaatcttgaatgcgttacaatatgggggtcttattccagcaggagttcatcttctatagcagaggttggaattgtattggcatgtccagtgaatggataatagggaggagggaggaaagggtttctgccttggtggccttttggcattattttgtgtttttctttgcttttctctctcttctttatttaataaaaacaaaaaaatggaaacagttgaaaattaatgcaaagtggtatttgtagggacattaagtggtaaataggaaagagaaaaagagtaggaagagtgttgcagatacaagtgggagtgtaaaatactttttcctggtatatttacaaaaacaatttgagagttattctgccaattcatatacccagcaattaatggaaaagtaaaagatgctagttttatgtttgtccagattttagggtttccttctttgaagatttctaaagttgaatatttttttaagtgaggcaagcagtaaaattaatgggcaaatgaaaccaattataccaagtctaaaatttttcttttttttttgaggcagagtctcgctttgtagctgggactacaggcgcctgccaccatgcccagctaattttttgtatttttagtagagacggggtttcaccatgttggccatgatggtctcgatctcctgaccttgtgaacctcccatctctgcctcccaaagtgctgggattacaggcgtgagccaccgcgcccagctaaaaattttttttttttttaatacttttaagttttaggatacatgtgcacaacgtgcaggtttgtcacatatgtatacatgtgccatgttggtgtgctgcacccattaactcgtcatttagcattaggtatatctcctaatgctatccctctcccctccctgctaaaaaattttttaacattgaacttcgcaggtgattttttttcgcttaatagacggtagtttcattttgaaattttcatgggaaattactgctcactttcccagaagcgcttaagaggataaataataattgaggtgttaagcctcttctgagcaatttggatataatttgtttttagatctagattcttttttataaatgtcccaaagcaattagaagtgattgttttttttgagacggagtctcgctctgtcgcccaggctggagtgcagtggcgcgatctcgggtcactgcaagctccgcctcccgggttcaagccattctcctgcctcagcctcccgagtagctgggactacaggcgcccgccaccacacccggctaattttttgtatttttagtagagacggggtttcaccgtgttagcaaggatggtctccatacactgacctcgtgatccgcccacctcagcctcccaaagtgctgggattacaggcgtgagccatagcacctggccctagaagtaattttgttgagagagagagagtaaaactaaaagtactgaaaagagtaagagagtagctaagagaatgagtattggagtcagactgctagagttcatagcccaggcttgtatttattaactgtgaactttgggccaaatacttaacctggctcaacctcctcacatttattcctaaccacagccctgtaaggtgggtgcgcaccttataggaatccaccttacttacccaccttacaggattgtggttaggaataaatgagaattctctttatcagatgcttaggactatgcttgcttctgtgtagtatgtgttcattgttaactgtttttaactttactgctaaatatatcagaaggaaagcagtggtagatggtttgggggttgtttttgtttttttgatttgcaacgaagtcttgctctgttgcccaagctggagtacagtggcgtgatctcggcctatgacaacctccgtctcccggcttcaagcgattctcctgctcagcctccggagtagctaggactacagctgcgcagcaccatgcccggctaatttttgtatttttagtagagacagggagtcctgacctcgtgatccacccacctcggcctcccaaaatgttgggattacaggcatgagccaccgcgcccggcctgtttttgtttttcgtggatatacagtagtccccccttatccttgcgggatacattccaagatctccagtggatacctgaaaccctgtatagtagtgaatataattgtcatcagtcagaacacgtttctgtccgtgtcttccacacacaaatttaatgccttttccatcttaactaatcacttgtcatgcactgtggctgtgatgtttgcagtttgaggtacaacagcaaaactatcacgaatttttttccttcacaatttcatgtatagatttgatctttgtaacctccgcatacaattttttttcattccttattaagtcaagaactttcaccttcaagcaatttacagcttctctttggcatatccatatagctgtcattgctacttttggacttagggactgtcattaagtaaaataagggttacttaaaactcaagcattgccctgccccatagtcagtctgacaatctgataactgagatggctactaagtgacaaatggctggtagtttatacaggtgaatacattagacggaggggagattcactacccggtcaggtgagatttcatcaggctactcagaatggcgcacagtttaaaacattgttgtggctcacgcctgtaatcctggcactttgggagattgaggcaggaggattgcttgaggccaggcattcaagaccagcctgggcaatgtagtgggaccccccatccccccaccatctctagaaaaaaaatttaaaaagtcagcaaggcatggtggcatgcatctgtagtcctagcttcttgggaggcttaaggtgtgaggatctcttgagcccaggagttttgaggttacagtgagctatgatgacaccactgtacactccagcctaggtgacatagcaagactctgtttctaaaacaacaaaaattagtgtttatttctgcagttttctttgtaatatttttgtaccacaggtgtttgaaatggcagaaaatgaaacggggtaaggatgaactcctgtatagatagactggataaagagaaagccaagtgcatgatgttcatagaggagtcttaagagtaagccttatgtcatctatccaaatgttgttttctaggagtataagaatataggaacagagcttaaaatggaaaaatactgtacagttagccttccgtatctgagggttccgtgtttgtggagtcagccacagattgaaaatatttaggggaaaaaaatccatggttgcatctgtactggacatgtacagactttattttcttgtcattattccctaaacaatacagtgcaccaactatttatgttgcatttacactgcattaggtattgtaaataatccagaaagaattcaaagtatatgggtgggtgtgtgtaggttatatgcaaatactacatgtcccctttatatcagggactggagcatcctcagattttggtatctgcagtggagggagtggattctggaaccaattcccagcagataccaagggacaaccatatatatatagtatcatgacatcttgtatcatgtcacgtatatatatatcatatatattatcatgtcacgtatacaagacatcttatatatcctatcatgtaagatgtcttgtatacgtaagtaatagaaatgaaaatcagcagatagttaaggcataatgagaaaatggaaaacattgttcttgttagaaatgtttaagaatggcttcttgataaagaactgtgttaagcatattctttcttctttttagacacagagtctcactctgtttcctagacaggagtgcagtggtgcaatcctggctcactgtagcctccatctcctgggttcaagctattctcctgcctcaacctcccaagtagctgggattacaggcacctgctaccatgcctggctaatgtttgtatttttagtagagatagggtttcaccgtgttggccaggctggtctcgaactcctgacctcagtctgcccacctcggcctcccaaagtgctggtattagaggcgagagccacagtgcctggccaattaagcataattttttctatttttcattttcttacatggatctttttttttttttttgagacggagtctagctctgtcacccaggctagagtgcagtgacacgatctcggctcactgccagctccgcctcctgggttcatgccattctcctgcctcagcctccctagtggctgggactacaggcacccgccaccatgcccggctaattttttgtatttttagtagagatggggtttcaccatgttaggcaggatggtctcgatctgctgacttcataatctacccttctcggcctcccaaagtgctgggattacaggggtaagccaccgtgcccagccacctgggtcttaaagaataaattttcttgagatggagtcttgctgtgttgcccaggctgaagttatcctcctgcttcggcctcctgagtagctgggattgcagatgtgagccactatgcctgcctctaagaaactttcttataaaggaggaagaagaaaagtagcagtgcagtgctccaaagaatttttttacaacacttaaggaagaactacctttaacttgtagcactagagactctgtttcaaagaatgcacaagaatacttacccttattacttgtaatatactctcatattttctgttgcttttttttcttttctttttttttttttttttagtactggttgcagcctactatattgatttttatgacccactgttggcttttgagccataatttgaagaatactggcgtagaagagttgacaagatggcagttattctgtattaggccaacattttctgtatgccaggaacttatcctctgtacattgttccttctttccttcctggagtttatagataagggaagaagactggcattcacggagtctggtgtgatcagcattgtatttgggaagtacgtatatagtgggaggaacaggagaacctaacccagtagttatcctggtggctgtctttgaggaattgtgtctgattttgggatctcacagatagagataggattagtaaaaatgagcccaggctagaaaggagactgtgtgaggccaggtatatcctgttctgggaacctgtgagtgctgtctgactggtagaatagccaaaaacttgactgtagaggtgagcaagggggccaatcatggagggcttataatacaggaatttagactttccattttacccatttaatggatggggcagaattgtgctttaggcagttaagtaaaaggaggaatagtttgggaagaacagggaaaaacaggaggcagggagaccagtgaaacagctgttttagggttccagccacccttaccacagaagatggaaagaagtggaaagatttgagggaagatggatgatcagcagaacttggtgactgattagaagttaggtagtaagatggacaaatcaaggataattccccagtttaaagtttgagcaacttgttgggtgatgatttatttattatttatttatttattttgagacaatctctgacccaggttggagtgcagtggtgtgatctcagctcactgcaacctccgccttccgggttcaagcgattctcatgcctcagcctcccaagtagctgggactaaaggtatccaccaccacgcctggctaatttttgtatttttagtagagatggggtttcaccatgttgatcaggctggtctcgaactctggcctcaagtgatctgctcgccttggcctcccaaaagtgctgggattacaggcatgagcagctgtgcccagctggataattatttaataaattggggagcataggaagcatagtatttgtgaagtgggtaggcaggtgtgatgggggtagtgatgttacatttggggcattttgaagttggtggttcttctgagttgagcagtcagtcactcttcatttgctgcacctttatctcattttagccaacagacattgaatacctaccaagtcttaggtatttgcaatgtaaagacaaattaaggtgccttctgctgtcagagacttcagagatacagtggggttggtatacatgtccacacagttttcccgtaagttatgctttaaaaggttttttaaatgttatatataaaggcaggggatgggttgcttttgacagagtaggtttggagcgttgatggaaaacttcatggagaaaatgtatatttgaacagggttggtggaaattaacataccttagaagtagggaaagttggaagggtttttcagatgaagctaacatgtttctgatgtggctagaatatacgctgtgtgatagggtttttcatgggagagagatgggaaaggatgttggggttctattgtggaaagagaaatatgctaaggaatttgccatttatcttagcatcaggataagaattgtatgagcaggggagtgacatggttggggaaagactaattctggtaacaccgtacagagcagcagtaggtagaacctatggcaggaagactaggagtacattatttacctcttttgaaatgagtttgtcatttgccttggaagtttttggtacattgtaattaacaaagtgaattgtttattttgttcaagatccatgcttggtttgccagttgttataaatgtagaaaatataccagataccaacttagaaaccattcactctccttgttatttacagatatgcaaggtttttttgttgttgtttttgttttgttttgtttttaaagggtatgtttctccatctaggattccctgtaggccttcccttgtaacaaatctcaaggtttgctcaaaatcaagaaatgttcagtgacagttaagttagcacacaatttaggcttactataaaacatgtccttgagttgattcttaaggtgggattttaataaataatagtgtcttcatcatgtagtttttttggtttttttttttcatacagagtcttgctctgttgcccaggctggagtgcagtggtgtaatcttggctcactgcaacctctgcctccccggttcaagtgattttcctgcctcagcctcccaagtagctgggattacaggcgcccgccaccacacccagctaatttttgtatttttagtagacacagggttttgccatgttggccaggctgacctcgaactcctgacctcaggcgatccgcccgcctcggcctcccaaagtgctggggttacaggcgtgagccaccatgtccggcctcatgtagttattttcacaagaagtgtcactatattaatacattgaaaaagagcaaggtgaattgtcaatgtgaattttctaaacatggccccaggtcacattcttgatcaattaaagcacttcacctctttaaaattcaagacttaaggctgggcgcagtggcctacacctgtaatcccagcactttgggaggctgaggcaggtggattacttgaggtcaggaattcaagaccagcctggccaacatggtgaaaccccatctctactaaaaatacaaaaattagctgggcatggccgggcacggtggcttacgcctgtaatcccagcactttgggaggccaagacgggcagatcacgaggtcaggagattgaaaccatcctgggtaacacggtgtaaccccgtctctactaaaaatacaaaaaaattaaccccgtctctactaaaaatacagaaaaattagccgggcgtagtggcgggcgcctgtagtcccagctactcaggaggctgaggcaggagaatggcgtgaacccaggaggcggagctagcagtgagccgagatcgtgccactgcactccagcctaggtgacagagcgagactccatctcagaaaaaaaaaaaaaaaaaaaaaaagccgggcgtggtggcaggcgcctgtagtcccagctactcgggaggctgaggcaagggaatctcttgaacccgggaggcggaggttgccatgagctgagattgcacctgggccacgagagtgaaactgcatctcaaaaaaaaaaaaattcaatattgaaatgttttgggtttttttgtttgtttgtttctttttttgagatggagtctcactctgtcatccaggctggagtgcagtggtgcagtctccactcactgcagcctccgcctcccgggttcaagcgattctcctgcttcagcctcctgagtagctgggactataggcacatgccaccacagccggctaatttttgtatttttagtagagatggggtttcactatgttggccaggctggtcttgaactcctgacctcatgatccacccacctcggcctcccaaagtgttgggattacaggcgtgagccaccacccctggcgtgttggggtttaaaaagaataaacttcaagttaatctcttcccaaagtataagtataccttttgatgtcatgatagcaggaccatgtgaagagtacatattttgaaatttgcttgcacttttgccctttcactctattggatttcaaaattcaacagctgtcagcatttgtagctgtgtaatcctgtataattatcatcttttatccaaatttgtataaaacttacaagttttcctaatttttttggagtattagagatcttgcctgtctttccagcatggatattttattttaattttcttaatgttccttcaaattacgtagtttgaaatgtttgtacatctttatttccttgctagatgggttgtttatatgattagataattcttcatttacagagggttaaagtaactttttttaaatgaagtactgaatagaggttaggaaagttgttggaacctgataaatttgtaaaatttacaaaatttctcattttaaaagctacagttttaaaatttcatgctttttaagcatccattgtaagagtaggagtgtccaaaagcaataagaacaagaaatctttgtaagattggtagtttcagtgtttagccaaaccattatcagaattagaatgactaatgttatgtaggtttggttttcaactccattctttttttgtttcattttttaaaaaattccaaatctctaacctggccttggcgctctgagtcttctgatctctgcccacctcatcactcactttgttctccccattttgtttatttcaattgctgaactggctgagcttttactctccccaccttaggttgttccactcttcatctgtcaagctcctactcatcctgtggactcaaccactgggttagatgaaagaaaagtttgacgtgtccactctttaaaaacattaagtgttttttgttgtttgtttgagactgtcgtccaggctgtagtgcagtggcgcaatcttggctcacggcagcctcgacctcctgggctaaatgatcctcccacctcagcctgtagctgcaccaccatgcctggctaatttttaaatttttttgtagaggcagggtcttgctatgttgctcaggcttgtctaaaactcctgggctcaagcagcctgccttggcctcccaaagtgccatgattacagttgtgagccacctaccaggtctggcctaaaagcatttttttatttttattttttgaggtgggatctcgcactgtcacccaggctggagtgcagtagcgtgatctcggcttactgcaacctccgcctccaaggttcgggtgattctcaagcctcagcctcctgagtagctgggattacaggcgtgcaccatcacccccggctcatttttgtatttttagtagcgatggggtttcaccatgttggccaggctggtctcaaactcctgatctccgccagcctcggccttccaaagtgctgagattacaggcatgagccacggtgcctgacctaaaagcattttaatgccacagagaaagccagctaaagggaggaggagcagtagatggattctgtcttctaagtgggatttgagaattgactggattttaaataattaataaaggtgttttacttaatgaacacagtttaagagaactgagttgattttacttcattttacctaaagtacaaaggtaagtgtgtttactcaaataatatgtgagccttttaagtaaaaaaaaaaaaaagtgtaactgtgagagatactaatatagtagaattagattttgagccaaaattgttttaattttaaattacattttgtgtcatagttaagtaactagaaaattgtctgatttatgttcatagtacagtgtttgggattatatttttaatggttctaattttgaaggttatgcttcatttatatataatacttcatttgttcaatttctcacgtatcattgaattattttgatcctttgatttttggaaaggctaaatgaaccgagattattttttatttatttatttggagtttggcttttgttgcccaaactggagtgcattggtgcagtctcggctcactgcaacctctgcctcctgggttcaagcgattctcctgcctcagcctcccaagtagctgggattacaggcatgtgccaccacacccagctaattttgtattttttttttgtagagacagagtttttccgtgttagtcaggctggtcttgaactcccgacctcaggtgatagcttgcctcggcctcccaaagtgctgggattacaggcgtgagccaccacgcccggccaccgagtttattttataagggattatatggttacatctgttgcaaggagcaaaccacaagcaatatagaagacaacaagggtgatctacagaatcagtatgtgataatgaaaggatgttttgactcaacactagtttccacgtgtttaatccaaactcagttgttgtttaaattgttaaatttctaatacacggtccactgggtaaaccatgtattaggctaaacttttctttttctttttcttttttttttttttttttttttgagacagggtctcattctgtcgcccagtctggagtgcagtggcgtgatcatggctcgctgcaacctcaacctcctgggctcaagcaatcctcccatctcagcctcccaagtagctgggactacagatgtgcaccaccatgcctggctaattttcgtatttttttgttgacactggtgtccttctacattccaggctggccttgaactcctgcgttcaagcaaccctccagccttggccttccaaagtggtaggattataggcgtgagccacggtgcccaacctatgctaaacttttcacatcagatttatatgtgtcctgtcccgttttacttcaccatgattggactcagtgtacactcagatgaagaaacttcaaaaaaaaaatactgctccttgtgaagcagaagaaagattttactgaaagtgatgtttgtattggagcatcattaaaggcataaaggaacttgtgaacaaactacttggtagaagcagcctggtgatgttgattggttgatactttaggaagcgggaaatgtcttactggagatagttccttcatttcaacagtcatttgtgatactgttttttaatatttgccataggatagttaaaaggtaatggaacaaacttcagatttataagtttttaattaaatataaagggggcaaaagtagataaatatcttaagagctcaccttactgtctagaaaaaatacttgctggcccagcgccgtggcacacatatgtaagtaatcccagcactttgggaggccaaggtgggaggcttgcctgagcccaggagattcagaccagtctgggtaacatggtgagacccccatctcaacaaaataaaaaattaggtgtggtgatgtgtgcctttggtggcagctactaaggaggattgcttgagccaggaggtgaagctgcagtgtgctgtgatcccgtcgctccactccaggctgggcgacagagcaagaccctgtctcaaaaaaaaaaaaaaacaaaaaaaaacggaaaacataagacagcaatcaaatacaatagatttggcttcagtaaatgaaaaccctcactgtaggccctagaataacaagacttctatattactaaagctgattactgcttgatgaactctgtacatgtgatgtgactagtatgaacttctgaggttgttgagatgaatgagaataaacgtgaggtgccaagaaaaatgcctgacacattgaaagtgctggataaatgtatgctgtcatcattgtaagctgggctatctcctaatagtgtaatgagtccattgaataacaataggtaacatgtttatagtgcttagtgtgtgccaggtactgttctaaacactttacatttattcactcatttaatcacaaataacatgaagtaggcactttgctgttatgcagagatggaaacaaggttatccctgcatcttttttttttggcagggggaggaggacgggaacggatggagttggtttttttttttggagcttctgagacccaagcttcaggccatgctcccccaagcacctccccaccaccaccccccaagatgtagtcttgctctgtttcccaggctggagtgcaatggcgtgatctcagctaaacggaacttctgcctcccgggctcaagcaattctcctgccccggcctcctgagtagctgggattacaggcgcctgccaccacgcccagctaatttttgtatttttagtagagatggggtttcaccatcttggccaggctcgaactcttgacctcaggtgatctgctcgcctcggcctcccaaagtgctgggattacaggtgtgacccactgtgcccatcctgttccctgccccccccccctttttttttaagttattgagacagagcctcacttggtcacccaggctggagtgcagtggcaggatcatagcgcactgcagcctcaacctcctgggctcaagcaggccctttgagtaactgggacctgtaggtgcatgccagcatatccagctaattttttttttttttttttttttttttttttttttttttgagacaaagtctcactctgttgcccaagctggagtgcagtggtgtcattgcaacctccacctctcgggttcaactgattctcctgcctcagcctcccgactagctgggactacaggcatgctccaccattcccggctgatttttttatttttagtagagatgggatttcactatgttggccaggctggtcttgaacacctggcctcaagtgatccacccgcctcggcctcccaaagtaaagtgctgggattgcagatgtgagctaccacatccggcctatatccagctaatttttaaaaataatatttttgtagagaggtggtctttctcccctcggccttccaacgtactaggattacaggcgtgagccacccttctggctgtcttttcctttttattttttcacacttccagtggtccttgggatctgtgtatactttagaatcatcttgtccagtttcttgacaaacttctagaagtttgattgatactgcattgaatctatagatcagtactggggaatgatgtttttaatactgaggatttctaagtgtttgagatattctgtttagtcagcctttacttttgagtttacacctgttttatatacattgtcagtttttccctatgttataaatctttttttttttttttttaaatttgagatagagtctcactcttgtcacccaggccggaatgcagtggtacaatctctgctcactgcaaactctgcctcctggatgcaagcgattctcgtgcctcagccttctgagtagctgggactacaggcatgtgccaccacgcgcagctaattttggtatttttagtggagaccgggtttcaccacgttggccaggctggtcttggctggtcttaaactcctgacctccagcagtccacctgtctcagcctcccaaagtgctaggattacaggcgtgagccactgtgcccggctctacattatttaaaaaattatttgtaaccatttgttgctggcatacagaaattcactttgatacgtttatatttatggtataaccagtcatcttgctaacctctcacaatttccagttgtatgtatttctttaaaattgacaacagttgtgtatattcatgggttatagtgtgatgatatatgtatttgctttgaactttctatgtcaacagttatattatctacagacaataagttttgtttcttcctttttcctttttctttctttccttcttttttgttttgagacggagttttgcttttgtcacccagggtagagtgcaatggcactatctgggctcaccacaacctctgcctcccaagtcaagcgattctcctgcctcagcctcctgagtagctgaggttacggcctgcaccaccacgtaccgctaattttgtatttttggtagagacggggtttctccatgttgctcaggctggtctcgaacacccgacctcaggtgaacgcctgccttggcctgctaaagtgctgggattacaggtgagaaccaccatgcccggacttttttctctttttttttcttttttagaacttgtaacctttttttttttttttttttttttttttttgagacagagtctcactctgtcgcccaggctggagtgcagtggcgcgatgtccactcactgcaagctccgcctcccgggttcacgccatcctcctgcctcagcctcccgagtagctgggactacaggcatccgccaccgcgcccagctaattttttgtattttttagtagagacggggtttcactgtgttagccaggatggtctcaatctcctgaactcgtgatccgcccgccttggcctcccaaagtgctgggattacaagcgtgagccaccatgcctggccacctatttttttatgtgtgtgtgagacagtctcgctctgtcacccagcctggagtgcagtggcactgtctctgctcactgcaacctctgctcccctgggttcaagcgattccttgcttcagcctcccaagtagctgggactacaggcgcctgccaccacacccagctaattttttgttttgttttgtttttagtagagatgtggtttcgctatattggccaggctggtctcaagctcctgacctcaagtgatctgcccaccttggcctcccaaagtgctgggattacaggcgtgagccactgtgcctggccaagatgaatcttatattttctttatcctttgttactatggcgaatgacagtttatagatgttctggtgtcccctggattcctgggattatcccaacttgatgatgatttttgagcctttggtttgctctttttaaagagtcttgtttctgtgtccatgaagaagattggcctgtgtttttcttatattggccatgtgtaatttttatattgttttttttttttagaagtatttgtgttagcttgaattgtattttccttgaaagtttggtgtagggcatgcctgtaaacaattcggatatggtgctttctttatggaaagattaaccaagggcttattttctctagtagcagtaggattacagtggtctggcttcccatgtgcctattacccagcttcaggtttactagtatattatactacccttccccccttttttgctggagtattttaaagcaaatcctagccatgtcatttcaccagaaatatttcaatgtatatctttcagtaaaaaggatttattttaaaataatgccattgttatagtcaataaagttaatgatttcttaatatcacccatttctcagtctgtacctaaatatgtcttactctcatttcaaaatgtgtgtttatagttggcttgtttgaatcaggattccaccccccccccaacttatgctatggatttgttggagaaactgggacattccatatcctatatgatttcttttttattaaggtttgagtattttctccggaatttatttattttgtatgttttcttcatttgtataaagttgatagtattgctttatcttttaattttctttttttcttaaccttcttgaagttcgtcttttgttactccaaaaaactaacttctagttttggtaatgctgttacattcctatttcctgtttcgtttatgcttttgtctttgattgtcttcttcatattaatactatttttctaatataatttggatacttaattcattattagcaacctcaggagactcactggagagttcattaatttgtaactttatttattattattatttttttgagacggagtctcgctctgtcgcccaggctggagtgaagtggcgtgatctcggctcactgcaaactctgtctcccgggttcatgccattctcctgcctcagcctcctgagtagctgggactataggcgcccgccaccacgccctgctaattttttgtatttttagtagagatggggtttcaccgtgttatccaggatggtctcgatctcctgacctcgtgatccgcccacctcggcctcccaaagtgctgggataacaggcgtgagccactgcgcccggcctttttaactttattttctaacataggcctttaggttttgaaatatattttttattactcaatttcctttgtgatttcttttgtaatttatcactgcctgtttttaaaatttctaaagtggagatttttttgccctctatgttcagtatgctaatgataaaatattttcttggatactccaggggaaaagtaaaaattgcaaataaagtatgatctcagttttgtaaatcacgtaagtataaggaaataatgaaggaactatatcagtatattaagcaggcatttttgaatagtggttttaggtcagttttgttacacatttgggtatttgttgttgttgttgttgttgttgtttgagataggatctcgctctgtcacccaggctagagtgcagtggtacattcacggctcactgcagcctcaacttcccaagctgccgctatcctccttcctcagcctccctagtagctgagaccacaggtacaggccactaggcctggctaagttttgtatttttttgtgcagtttggttttctccatgttgcccaggctggtctgctgagctcgagccgtctgccctccttggcctcacaaagtgttgggattacaggttgtgagccaaagtgctcagccttgtggcacatttttgatggaggagcccatatgatatttcaaaaggaaagagtaattctgtaaaactctggactctaaattatgccctgagatcttgggatacaatttgacttagttcatatatgaccacatgttggtttagttaatatatgaccatgtgcttactatgttgccagtaggcaaggagctggtatataagtggtaaaacatgtccttcgcgaagaatgcatggttggagtgaggggtggtcacaagggatggcaaggggaggagaggaggcaaacccagagataatttcagtgacatgataaaatgctaaaagatacagaaggagcaggattgggaagaaaaaaaaaaactacaagaagaggaagggcacatacaggaagagttatacttaggaactaagattaattggatcaagtagaccattaaggcaatattttgtcttcaagggatggtccattttttaagaggataatagctgtggaatttttgttgttgttagtagacaaggtctcacagtgcccagacttgatgtgaattcctgggctcaagctatcctcttgcctcagcctcctgagtagcttggactatagatgtgtaccactatgcccaacacccagtaatgcctttttaatgtgaaaactactttagagaattgaaaggaaagaaaactcaaataatttttatagtaggttaatactgtcaataggtcaatcaggagtaattttcttcccccaggggatgtttggtgatgtctggagacagttttgattgtcacaattgggatatgggtgctactggcataagtagaaagaccaggagtctcctaatgataatagagggcacaagacaatcaccctccacccacaacaaagaattatcacatagctcaaaatgttaatagtgccagggttgagaaaccctgcattaatctatacttagcacccagttttgtttgttcttttttgagacaggatcttgctctgtcacccaggctggagtgcagttgtgcagttaaagctcactacaacctcaaattcctggactcaagtaatcctcccaccttagcctcctgagtggctaggagtatagcctagtgccaccacacccagccgactttattgtttgtagagacagggtcttgctgtgttgacctgggctgaagaattcctcctgccttggccttctaaagtactgagattacaggtgtgagctaccagggctggtcttgcaccctgtttttggtaggggtggtttgtatggtgaaggagccagaggcatggtgttgtaccctattctggctagactttggttaaggaaagctattctgtaggctacaggtcaaaaactccgcctgttaaaggcctactttgaggcaggtactatataggaacttggtaaaaaatggtggatagccctctgcttaactggagcacacactgagtgttccacaaatgacaggtcttttgtatcagttgtgtgtctttatgtattacaatatttaaaatgttttctttccatcctgagtttagtttgtgtgtagatattttaactgttcttctaaggaacttgggaatattaatacagcttaattgcatttcttttttccatgactgtggatacaaacctttagctagcaactcatgtaataatgggtgttgcactttttttttaacaaaaaataaaattttatttcaactattatgctaattctataacattatttagaatgtttttctttttttaattatcctttaagttttgggatacatgtgcagaacgtgcaggtttgttacataggtatacatgtgccatggtggtttgccgcacccatcaatccgtcatctacattaggtatttgtcctaatgctatcctctcctagccccccatcccccagcaggccctggtgtctgatgttcccctctctgtgtccatgtgttcgtatttaactcccacttatgagtgagaacatgcggtgtttagttttcttttcctatgttttctgagaatgatggtttccaggcttcatccttgtccctgcaaaggacatgaactcatccttttttatggctgcatagtattccatggtgtatatgtgccacattttctttatccagtctgtcattgatggggggtgttgtactttcaatcccttttttccttggtcttattttaggtatagttcttaagtgtttaagtttgttgatataaccaaatatcccctcaatttaaaaaatctataaaatggttttagtatgacctaaaaaactaccatacaaatagtatatatatagggctgtgtgtggtggctcacacctgtaatcccagcactttggaaggccaatgcagacagatagcttcagctcaggagtgtaagaccagccaggtcaacatggcaagctccgcctctactaaaaatacaaaatttagctcggtgtggtggtgcgcacttgtagtcacagctacttgggaggctgagatggtagaatcacttgaacctgtggatagaggttacagtaagccaagatcgcgcaccactgcactccagcctgtgcaacagagtaagaccctgtctcaaataaatagaaaaacatggagtgaggttgggaaatgacatttaatgcttattgagaacaatatagagcagttttttattttggttttgtcatactttgacctttgtcttttccctttgcttttagattttggctctctatttgacttggagcacgacttaccagatgaattaatcaactctacagaattgggactaaccaatggtggtgatattaatcagcttcagacaagtcttggcatggtacaagatgcagcttctaaacataaacagctgtcagaattgctgcgatctggtagttcccctaacctcaatatgggagttggtggcccaggtcaagtcatggccagccaggcccaacagagcagtcctggattaggtttgataaatagcatggtcaaaagcccaatgacacaggcaggcttgacttctcccaacatggggatgggcactagtggaccaaatcagggtcctacgcagtcaacaggtatgatgaacagtccagtaaatcagcctgccatgggaatgaacacagggatgaatgcgggcatgaatcctggaatgttggctgcaggcaatggacaagggataatgcctaatcaagtcatgaacggttcaattggagcaggccgagggcgacagaatatgcagtacccaaacccaggcatgggaagtgctggcaacttactgactgagcctcttcagcagggctctccccagatgggaggacaaacaggattgagaggcccccagcctcttaaggtaagtacagttttggtttgtgtgcacaatcggcatgcatgtgagtattgtcatgatggatggagggtttgccttacattgtatagcagtttccactattacacgccaggaatttactgtgctgtcataagttttaagaagtgcctgtatttaagtaaaacgtttattttacagctggtattctataacttcatacttccaaatgattgctggctaatgctggttctctctggcacaagtattggaatgtttttatctcatttccaagtccagtttagccttgtagcctccttataaaattacagttttgagatggctggcattacactgtcttcagatggatactccatttgttcctattgctttgaatgtccctggttttcaagagatacatttattctgagaaatgtattaactgttatttttctttattggttgatggaaattaaggtgcatttgttcatgtgaaacctcaacagtgtagatgtttcagtgaaccagaacttggccaaagacttctgttagctttattaactagagaatgctaagtatattaaaaatattttaaacttttaaatgtggatcctgtatacataaataaggcataatcacacatactttagtgcttatttcttcatatttttctttacatattttatctgtttttcttaaaatgggatcacactatggttgccagtgcctggcatgtagttcgtttttgttgaatgagagatggcttcacttcgaagatgaaattggagataggtacgattttcacaaggagtcaagagcaagctttctctgtaacaggaataatttgagcagacatcaggacttctgtgttcctgagaatcttgggtgcagtggctcatgcctgtaatcccagcactttgggaggccaaggctagaggatcgcttgagcccaggagttaagagaccaaccaggtagcattgaccccatcttctatttaaggggaaaaaaaaaaaaagaaccttgatggtgacagagaatgcaagtgtgaattgaagacagatggacaaacttgtgttggggggaactgaggtgacatgtaggaattcaaaaaccttaaatttttttttgctgcgagaatattgacaagttaggattctgttttagcattcctttgtagattctccctttctgcccctcacccccgccaccttttttttttttttttgagacagggtcttactctgtcacccaggctggagtgcactggcctaatcatggcttactgcagcctcaacctaccaggcttaaacagtcttctcgcctcagcctcctgagtagctggaactgaaggcacataccaccatgcctggcttattattattttttttttttttttttttttttttaagagatggggtctcactatgttgctcaggctaatctcaaactcctcttgggctcaagtgatcctcttgtctcagcctcccaaagtgccaggattacaggtgtgagccactgcacccatcctctgacacttttagattgccgtgtcagtgtagtttacttagaatatttggagtgagaaccaaaaacaaggtaaattattaagtacctcttctaggatctaggaacatagctatgaagagagaaagtccttgccaccgatgtttatattctgttacggagaggagggatgacttacaataaaccctcactggtggacaaaatactttagggttaaagtagtgaatgaacttattttatgtaacctactttctactgtgcacataagatataaattttagagtatgccaggtaagtgctatggagaaaaataaggaaaggctcattgacatctgcttgggggtgtgggactattatggttataatcttaatttctttcagaaactgggtttatatagaagtgagcaaaacaaaaatccctgtccttgtggagcttgtattttgatgagaaggaggaattcaaattttaaacttctgttaaacgatattttatttccttatttgatttttattttgagaccgagtcttgctgttgcccatgctggagtgcagtggcgtgatcttggatcactgcaacctctgcctcccgggttcaggcagttctcctgcctcaggctccaagtagctgggaccacaggcatgcgccaccaagcctggctaatttttgtatttttagtagagaaggagtttcaccatgttgcccaggctcgttgtgaactcctgacctcaagtgatctgcccacctcggcctcccaaagtgttgccaccgcacctaggcctattttcttattttaaatgaatccacctatattgatattttgtagagtacttatatcagtgtttgacaaatgagggagctttaaatgtttaataaatttaacaaatgttttaagttatgtaggtttaggataagataaccacttaaggctggatgcagcggttcacacctagaatcattccagaccagccccagcaacatagtgagacccccatctctaccaaaaacaaaaaattatccttgtgtcgtggcacacccacgccagcagttgcccttccactgtaccaagtcctaaaattatcttgtagagcgaattatactcattacatttcttaaactcctaagacttgtgatatttaagaattaggatttaaggtgtaagaaagttttcagtaagatttgatgactgtaaccctgttggcaaatgacatcagcttttgcacaccgttcttgtcatggatgaatctgtggttcaggaggtgcaggcaggtggtgacattactactacagctgtcttccaaaagtctgacctatggtgatttataggaagaaacttggatcatactgccttttaccccaatctttagattcagcataaactaatcaaagccagaatgttttaagttacttttgtttttgagacaggatctcttcctatcacccaggctggagtacagtggcaccatcacagctcacttgcagccttgatctcccaggcttacgcgatcctcctacctcagactcctaagtagctagtactacaaggactgtcatgccctgccagttatttttatttttgttgagacagggtctcactatgttgtcttggcatcaagcaatccacctgccttggtcttccaaagtgctcagattacagacaggggccactaagcctggccacatttttttcaagaagaaaaaataggcatggctcagtagttcacatctgtattcctaccgctttgggaggctgaggcaggaggatctcttgaagccagaagttcgagatgtgcctgggcaacataatgagaccccatctctacttttcttttttcttttttcttttttttcaaaaaagaaagaatagttgtctgcaggacgcatttcttgtagctgcctagaactttgtgtggcttcctcaccctctcctttttagtttaggtagctatttgtatggtggtgggtaattggacatctggagcatattagctatggagaaagaaacaagatcaaataactatagtgtagcagaaattaagtacaaaatcttccttattacatttagtgtggggagtaaagaagcagggctcaggagatagaaggggcagtgatctggaggttggttggtattttattttctaattcctcagcagatctgtgtgggagatggaaaaacaaaagctagagaatcttttttggtcacagtgaccaaaagtgtcaggaagaaattactgccagctgatcagcaatcagtgtagtctgtgtatttaaacccatagtctgccatagaggagcttggagtttccaggtaatgcatcgtgatcaagggaacaagcagtgtcaggaattggttgaaattcagttggtctaggcaggcaaggcatgcaatcatgaaggaccagattgtttggggaaatatttggataaagacattacatttattaacaagagacaacaacacagcttagaaattccaacattttgttgattcagataataggactcttgagggcataatttattgtcttagtcttttattgtttgtcatgcgggttctgtgatagaatgactttcatactatatctatcatgaattttcatgctaataagaaacaggttaaacaactcccccatgtataggtatggatattattggagccacataggataaatactagtagtttaaaaaaaacataggtagcagcagcacttgcagtcagatttgtaactaccaaaagtagcctggacttgatttaaacctgtttctgcattctattgcccctgcaatcttttggccatatttacatagaatcaagaaggtttttttctttcttcttcttcttttttttttttttttttttttttggagacagagtttcgttcttgtcgcccaggcaggagtgcaatggcccaatcttggctcattgcaacctctgcctcccaggtttaagtgattctcctgcctcagtctcccgagtaggtgggattgcaggtgtgtgctaccacgcccagataatttttgtattattagtagagacagggttttaccatgttggccaggctggtttcaaactcctgacctcaggtgatccatccaccgccacctctcaaagtgctgggattacaggcgtgagccaccgtgcccgaccaagaaattatcttctctgaatgcttctcatttcaggccacctcattcttttatgcttccatcaaactgccacttgtaaattacttgtaaatcattcttgtaaattacttaccttagtctctgaatttcatctggaaaatgaaaatgttctttaacttttttttttcattttttggtaatagtataaagaagattaatttacatttttttgttttttttaatagaggcaaactgctgaaccaaaaaagatgtcatattcatagatttgcagagtatagatattgcatatgatttaaagaacgaattttaggccaggcatggtgggagatgcctgtaatcccagcacttaggcagaaggattgcttgaggctaggagttcagtcaactcctgggcaacatctctacaaaaataaaaacaaaaattagctgggcatggtggtgcaagcttgtagtcccatctgcttgggaggctgagatgggagaattgcttgagcccagaggttgggaattataatgagctatgataatgcaactgcactccaacctaggcaacagagtgagaccctgtctttttatataaaaagtaaaagaaaaattttattaagagctttgtacctgtccaaaacagatgcttcacagaggtagtaacatttgaaattacaaggatgagtagaatctgcaggtgtttcttagttaggttgtactatctaaggaaccaacagaaaatgcctctctgtgaacttggtgtttatttccaggttggcattaaggagtcaaataggaaagaaaatgtgctactgttcagttgtagggaaagggaaaagcttgaggcaaatgctggaggctcaaggagcgtgatactttcagactttaagaaatcagtacaggaaatatataagataccatagataggtagtcagacttcataaaggctttggtatacgtactgtggggttgatttttttcttttatagaggcaggtgaaaacagaagacaggcaaacctgttgtccacagtctgtacaagcactgtgataggtttgagttaagacagtcacagtaggtaggaatacatgggaagggttttagtgtctatgtgtgcttttagaggtagaattgaaggaccctttgattggtcttagcagacagaaatctggtatgaatcctttaattgggcagtagctatagtatcttgagttattctgagtgtttgctcaatgtttctagtagtgatgatgacttgtagttgggatcctatgtgtaatttggcagaagaggacggtggcttcaaactttgtttgggatataaagttgaccccattttgaattattttaaaataatttgaaagattaatgaaaatgcatttttataactttcattattagtaaaacgtttgactttagaataatgctgtttttcaattaattattattatagtataatggctccaggtgaacttaacataaatatagaacataaactactttttaaagtacagagggagccggcacagtggctaacgcctgtaatcccagcactttgggaggccgaggtgggcagatcacttgaggtcaggagttcaaggccagccttgccaacatggcgaaaccccgtctcgactgaaagtaaaaaaattagctgagtatggcggcgcacgcctgtagtcccagctactcaggctgaggcaggataaccgcttgaacccaggaggcagaggttgcagtgagccgaaattgcaccactgcgccccagcctgggcgacagagcgagactttgtctcaaaaacagagaagtacataagggttgcaaagtcaaatgacttgaagggccaagcaggtgacttagcaggtgacttaatagagcagctaggtttaaaacagcaaggaatagtgtggagtctggacttccgcatgctctatgtaaaggagtcagaatcagaagttttaaaaaacactgtcatcagtgtccctacacaaaaaaggacatattcccaaaccatcagttttctactttttatacaaacaaaatacaggaataattattcaaatgaggccaagcatggtggttcacgcctataatcgcagcactttgggaagctgtggtgggaggattgctagagcccgggaatttgagaccagcctgggcaacatggcaagaccctgtctctattttttaatagtcaaaaaaaagaagaagaagaaaacattcaaatgcttgaacatgacaaaggggttagatggcttattaagttgaattcgccatgtagcatcatgtgtgacgtaatggaaatgaatggcaaaccttgtttaacagaattaaatgaagatgattaaaagtatttctaaaacatctttatttcaaatatttatgaaaataactctgtacatttaccatacccaaggcccctaaatcttaattttgatcttaatcttgaaaatgtattgttgttagcatactttgtatagtgggttttttttgtttgtttgtttttgagacagggtctcactctgttgccgaggctggagtgcagtggcctgatcatggcttacttgcagcctcaacctcccaggctcaggtgatcctcctacctcagcctcctgagtagctgggaccacaggcacatgccaccacatccagcttttctttccttttttttttttttttttttttttgagatggagtctcactctgtcgcccaggctggagtgcagcggcgtgatctcggctcactgcaagctccgcctcccgggttcactccattctcctgcctcagcctcccgactagctgggactacaggcgcccgccaccacacccggctaattttttgtatttttagtagagacggggtttcaccatgttagccaggatagtctctatctcctgacctca

SEQ ID NO: 650 - DNA, 32744 bp, Homo sapiens
  source 1..32744: mol_type = other DNA
ctccctcgagtccctgagtctctgtagtgcctcagctcctggatgtcctcccttaaaggagaagaacaatgcgggccgactagacgagtcccttagtttcctcgccggcgcagacaaatacggtttcagtccaaggaactaccattcccagaagacagcggggcgttccttgctgcatttctattggttggcgtttgttactcccagccaatagaaagtgagcttcttgacaagtgccaaaatggcgatgcctaccacctagaactggattgtgcggtaggcttaaatttggggaggtggtggatgaaaaggaaattgggaggtatagttacagggctggagaaggtggaggaaatgagggagcaaatctggacttggaatggtggtggccaagggacgcttttagagctaagggcgtaattaggcaaccaggactgccttaactccttgatgccctgtttaatctattagtccctttgatacttctttattcatttatttgagagacggagttttgctcttgttgcccaggctggagtgcaatggtgcgatctcggctcaccccaacaacctccgcctcccgggttcaagcgattctactgcctcagcctcccgagtagctgggattacaggcatgcaccaccaagcccggctaattttgtatttttagtggagacgaggtttctccatgttggtcaggctagtctcgaactcctgacctccggtgattcgcccgcctctgcctcccgaagtgctgggattacaggtgcgagccactgcgctcggccgatactttcttagtgccccagtttaaggaagggcggttcaggaggagagagtctgacaggatcttactttatccctttagctctttttctttcaaattcctctgtctcgcttaaatcttcccgcatcttctcctttctatttaattctgccttccccggttctccttagaacctcatgtccttttctttagctccatttctttcacctcaaagctggccgccaccgctgccacctgctcagagtgaaataatgaaggtggtcaacctgaagcaagccattttgcaagcctggaaggagcgctggagtgactaccaatgggcaatcaacatgaagaaattctttcctaaaggagccacctgggatattctcaacctggcaggtctcaagtgaactgggaaagaaagatgggagggataaacccagagaagttgtaatcactcagttgtgttttgctattcctcttgcagatgcgttactagagcaggccatgattggaccatcccccaatcctctcatcttgtcctacctgaagtatgccattagttcccaggtaagcttcccgcaaacccccaccaagaagtgagagttctgggggtaaaaaacttggagtgcatttgggccccggtggttcatggctgtaatcccagcattgtgggaggctgaggcaggcggattgcttgagcccaggagttcaagaccagcctgcgtaacatggcaaaacccagtctctacccaaaaatacaaagagttacccctgcgtggtggtgcccctgtagtcccagctacttggaaggctgaggtgggaggatcacctgagccctgggaggtcgagactgcaatgagccatgatcctgccactgccctccagccagagcaacagagtgagaccctgtctcaggaaagaaacaaacaaacacaatttggggtgcagttgtacaattgtcagcttactctttctagatgaaagagtaagattctagattgatctgtttgaacagatcatttcagtgagtttcagtgttctcataaaaataatacttcatttgttgtgatgaatattacattcacttattctgctgggagtggtagcaggtagcacaggcctgtggccccacctactcagaaggtggaggtaggaggcttgcttgagcccaggagtttgaggctacagtgagcactgattgtgccactgcactccagcctgggcaacagaacaacactccgtctattaaaaacaacaacaagcaaaagaaaaaaagaggattacattcacctattctatcaacaaatactcatgaatgcttttatgtgccagacagtgcttagcccctggggaatatagctgtgaacaaaacccgatgtcagtacacagaaaatttagtgggtaatatagacatgtaaataagcagtcactagatgggtttatgataaaggttaggatagagtacagatgctcctcaacttacaatggggtgatgtgctgatataccactcataagttgaaaatgtacttaatacacataacttgccaaaggtcatctacctacctttttttgagtcagagtcttgctctatcgcccaggctggagtgcagtggcgtgacctcggctcactgcaacctccgtttcccgggttcaagcgattctcctacctcagcctcccgagtagctgggactacaggtgcctgccatcacgcctggctaatttttgtatttttagtagagacagggtttcactatattggccaggctggtcttgaactcctgaccttgtgatccgcccgccttggcctcccaaagtgctaggattacaggtgtgagccaccgtgcctggccatctacctaccgtaaatgtgctcagaacacactagcttacagttgggaaaaatcatctaacacaaagcctgtttgtttgtttatttattgagatgggatttcgctcctgttgcccaggctgcagtgcaatggcttgatctcggctcactgcaacctctgcctcctgggttcaagtgattctcctgcctcagcctcctgagtagctaggattacaggcgtctgccaccacacccggctaatttttgtatttttagtagagatgaggttttaccattttggccaggctggtctcgaactcctgacttcaggtgatccacccacctcggcctcccaaagtgctgggattgcaggcatgagccaccacgcccagccttattttttattgattgattgattgattgaggcagagtttcgctctgtcactaggctagagtgcagtggcgtgatcttggcttactgcaacctctgcctcccaggtttaagtgattctcgtgcctcagcctcctgagtagctgggactacaggcgtgtgccactatgcccagctaatttttgtatttttagtagagatggggtttcaccatgttggccagtatggtcttgatctcttgacctcgtgatccttccgcctcggcctcccaaagtgctgggtttacaggcgtgagccactgtgcccggccgcccagccttatttttattttttgagaaggagtcttactctgtcacccagggtggagtacagtggcacaatcttggctcactgcaacctctgcctttcgggttcaagcaattgtcctgcctcagcctcccaagtagctgggattacaggcgcccaccaccaatcctggcaaaattttttttttttttttttttttttgagacagagtctagctcttgttgcccaggctggagtgcaatggcgcgatcttggctcaccgcaacctctgcctcccaggttcaagcgattctcctgccttagcctcccaagtagctgggagtacaggcaaatgccattacacccggctaattttgtatttttagtagagactgggtttctccacgttagtcatgctggtctcaaactcccgacctcaggtaattcgcctgccttggcctcccaaagtgctgggattataggcgtgagccaccacgcccagccagaagtgcagatttcttatgtgcatacattgcatcgtggtgaaatctgggcttttagtatacccattaccctagtagtgaacactgtacccaatacgtaatttttcaaccctcaccccactcccaccttcccaccttttatattctccagtgtctgttagttcactctatatgtgcacacgttgtgtagctcccacttatcagtgagaatatgtggtatttgactttttttttatttactgagacggagtattgctctgtcgcccaggctggagtgcaatggctgatctcagctcactgcaacctccttgactttctattcctcagttatttcactgaggataatggcttacatgtatgagcacttgaagtacaatttctactgaatgtgtatctcatatttttttttgagacaaggtcttactctgtcacccagggtggagtgcagtggcgtgatctctgcttactgtgacctccacctcctgggctcaagtgattcttctgcctgtctcccgagtagctgggaccacaagcatgcaccaccacacccagctaatttttgtagttttagtagagacggggttttactgtgttggccaggctggtctcgaactcctgacctcaggtgatccgctcacctcggcctccaatgagccaccgtgcctgacctgaatgcgtatctctctttttttttttttttttttgagacggagtttcactcttgtcccccaggctggagtgcagtggtgcgatctcggctcactgcaacctccatctccttgggctcaagcaattcttctgcctcagcctcccgagtagctgggattacaggcgtgcaccaccatgccccgctaatttttgtatttttagtagagacagggtttcaccatgttggccaggctggtctctaactcctgacctcaagtgatccatctgcctcggcctcccaaagtgctgggattacaggcttgagccaccacgcccagcctgaatgtgtatctcttttacaccatcataaagtcgaaaaattaaggtggggtgtggtggctcacgccttaatcccagcactttgcaaggccgaggtgggcggatcacgaggtcaggcgatcgagaccctcctggacaacatggtgaaaccccgtctctactaaaaatacaaaaattagctgggcatggtggcgagtgcctgtaatcccagctacttgggaggctgaggcaggagaatcgcttgaaccagggagtcagaggttgcagtaagccaagattgtgccactgcactccagtctggtgacagagcgagactccatctcaaaaagtaaaataaataaaattaaaaaataaagtcaaaaaattgtaaggtgaaccattgttaagttgggactgtccttgctatgggaatacatgggaaaggcacccagtccagtgtgaacaatcaaggaaggctttgtggaggaagtgatgtttaaaccaagacctgaatgttgagtatgagttagccggcacattgaggagagtgtgtgtgcaaagcagagaaaagcatatgtacacggtgggaggcaaaaatcacataatgttgttcaggaactgaaaataatttggtatggctagagaaaaggagtttgctctcaggacccctttttcttttcttttttctcctttttctttttttgtattttttgtggaaacggggtctcactatgttgcccagtctggtcttgaactcctggcctcaagtaatccttcttccttgtcctcctaaaggctgggattatgagtatgagccactgtgctcagtccctggacccctttacagtcttcaaaattttgagacttttcttaaatatatttgattgtatttgatctcatgcctccctaaaatgtataaaaccaagctgcacccgaccaccttgggtacatgttttcaggacctcctgaagggccatggttactcatatttgactcagaataaatttcttcaaatattaaaacatatatattattggccaggcatggtggctcctgcctgtaatcccagcactttgggaggctgaggtgggtggatcatctgaggtcaggaattcaagaccagcttggtcaacatggtgaaattctgtctctactaaaaatacaaaaaattagccgggtgtggtggtgcgcacctgtaatcccagctactcaggaggctgaggcaggagaatcgcttgaacccgggaagtggagcctgcagtgagccaacatcatgccactgaactccaccctgggtgacagagcaagactctgtctcaataaaaaataaaatgaaataaaattaactggtctctttgttgcaccttgaatagatcttttatctatgcatgatttttgtcacatcatgaattggtaatttggacaatatccatgactaagttatatagatattacagttgttgatgcatttaataatatcatattctcacatgttatggagcttccaggacaatccactgtacaattgtgagagaaaaagagcaaaaaggtaaacagtatcttagtagtattttaaaaataattttgacttcctagaccccctgaaaggtcttggggaccctggggagttcctgaaccgtacctttagaactgctaggctggcactttaaggaggagagtggtttagggagagagaatgataagattgtaacagacttttgagtgatgctaaggaatttggactttattttagggtgacaaataatcatttaaagggttttaagtggaggcgtcacatgacaagacttccgtaaaaatatacatattttaattaacatagcataacatacaaagatcttgcgctgggcgcagtggctcaatcctgtaatcccagcactttgggaggccgaggcgagtgtatcacctgaggtcagaagttcaagaccagcctgaccaacatggtgaaaccccgtctctactaaatatacaaaaattagccgggcatggtggtgggcgtctgtaatcccagctactcaggaggctgaagcaggagaattgcttgaacctgggaggcggaggttgcagtgaaccgagattgcgccattgtgctccagcctgggcaacgagcaaaacttcgtctcagaacatacaaacatcttaagatcaattcagtcagggttttttttttgttgttgttttttgttttttgtttttttgtttttttttatgagatggagtctcgctctgttgcctgggctggagtgcagtagggcaatctcagctcactgcaacctccgcctcccaggtccaagctattctcctgcctcagcctccggagtagctgggattacaggtgtcctccaccacgcctggccagtttttttgtatttttagtagagacggggtttcaccatgttggtcaggctggtctcgaactcctgacctcgtgatccacctgccttagcctcccaaagtgctgggattacaggcatgagccaccacgcctggcctatttagtgagttttagcaattgtatgtacccatgtcaccagcatccaaaataagatacagagcatttctgttctctcagaaagttcccttttaccgctttctagtccactcccctctcccacaattgcctttatttggatttcttagtaatgtagtcagatgggatatagttcgtatactgtcttttgtttaacataaatgtttttgagatttattatttatgttgtatatgttaatagtacattctttttatttatttttttaaatttgaaacagggtcttgctctgttacccaggctggagtgtgcaatggcaggatcacagcttcctgtagcctcatccttctgggctcaagtaatcctcctacctcaggttcccaaggagttgggactacagtcatgcaccaccatgcctggctaatttttaaatttttttgtaaagatgggatcttcctatgttgcccaggctgataatttttacatttttgtagggacggggtctccctttgttgcccaggctggtatcaaactcctgggctcaagcgatcctcctgccttggcctcccaaagtgctgtgattacaggtgtgatccacccatgcctggcctcattcttcttcttcttgtttttttttgagacggagtctcgctctgtcgcccaggctggagtgcagtggcgggatctcggctcactgcaagctccgcctcccgggttcacgccattctcctgcctcagcctcccaagtagctgggactacaggcgcccgccactacgcccggctaattttttgtattttttagtagagacggggtttcaccgttttagccgggatggtctcgatctcctgacctcatgatccgcccgcctcggcctcccaaagtgctgggattacaggcgtgagccaccgcgcccggccttttcttcttattttttaactgctgaatagtatttctcagttgacacatatatatttttttttattaaaaatttttttaggctgggcgcagtggatcatgcctgtaatcccaggaactttgggaggccgaggcgggcggatcacgaggtcaggagatcgagaccatcctggctaacatggtgaaaccccgtctctactgaaaatacaaaaaattagccgggcgtggtggcgggtgcctatagtcccagctactcgggaggctgaggcaggagaatggcgtgaacccgggaggcggagcttgcagtgagcagagatcgcgccactgcgctccagcctgggcaacagtgagactccgtctcaaaaaaaaaaaaaaaaattttttttagaggctgggcgtgatggctcacgcctgtaatcccagcactttgggaggccgaggcgggtggatcatgaggtcaggagaccgagaccatcctggccaacatggtgaaaccccatctctactaaaaatacaaaaaattacctgggtgtggtggcatgcacgtgtagtcccagctactcgggaggctgaggcaggagaatcacttgaacccaggaggcggaggttggagtgagccaagatcgaaccactgtactccagcctggttgacagagcgagactctgtctcaaaaaaaacaaaatgtgtagagtcaggatccttgctttgttgcccaggctggagtgcagtggcacaatagtggctcactgcagctttgacctccttggctcaagccatcctcctgcacctgtagcttggactacaggtgcgcaccaaaacacccggccaatttttgcattttgtgtagagacacggtttcgccatgttgctcaggctcatcttgaactcttgagctcaatctacccaccttggcctcccagagtgttgggattataggcgtgagccatggagctcacccctaaaccactgctacataatattccatatgtacttttttttttttttttgagatgaagtcttgctctgtcgcccaggctggagagcagtggcacgatcttggctcactgcaacctcctcctgtccccgccgctgggttcaagtgattctcctgcctcagcctcccaagtagctgggattacaggcatgtaccaccacacctggcccatttttttatttttagtagagacagggtttcatcatgttggccaggctggtctcaaactcctgacctcaagtgatctgcccgcctcggcctcccaaagtgctgggatcacaggcgtgagccactgtgcctggcccagcccatatgtactttaatttaggttgtttgtaattttttactgttataatcaatgtttcactgaatatccttatacctacctgtctgcatatctggaagtatttctctagggtggatacctcacaatggaatatctgatttgaagaatatacacatactaaattatagtagatcctgcaaatttccccctgaaaatgattggattaggttataccccatccgtaatgtctgacagtatttccccatacctttgccaacgctggatataatttttttttttttttttgagatggagtctcgctgtgtcgcccaggctggagtgcagtggtgcaatcttggctcactgcaagctgcacctcctggattcacgccattctcctgcctcagcctcccaagtagctgggactacaggtgcccacgaccacgcctggctaatttttgtatttttagtagagatgcgtttcatcttgttagccaggatggtctcgatctcctgacctcgtgatccgcccacctcggcctcccaaagtgctgagattataggcgtgagccaccgcgcctggccagaatcttttaaaactttttccagaggcaaataattatatcatattataatgtgcattttcttttctttcttttttttttgagatggagtctccctctgtcgcccaggctggagtgtagtggcataatcttggctcactgcaacctctgcctcccgggttcaagcaattctcctgcctcagcctcccgagtagctgggattacaggcatgcgccaccatgcccagctaatttttgtatttttagtagatacggggattctccatgttagcgaggctgttctcaagctcctgacctcatgtggtccacccgccttggactcccaaagtgctgggattacaggcgtaagccactgcgcccggcctatgtatttatgaatacataatttatgtattcataaatacacaaataaatatataatttgcctatttttctattttttttttttgttacggcttttttttttttttttgtgagacagagtctcactccttcatccagactggagtgcagctgtgtgatctcggcttattgcaaccttagcttccccggttccagccattctcctgcctcagcctccaagtagctgggactatgggcgggtgccaccacgcccggctaatctttgtatttttagtagagacagggtttctccatgttggccaggcgggtctcgaacctaatatttaaatctttgttttttttttttttgagatggagtctcgctcttctgcccaggccggactgcagtggcagtatctcggttcactgcaagctccacctcccgggttcatgccattctcctgcctcagcctcctgagtagctgggattacaggcgcccgccactgcgcctggctaattttttgtatttttagtagagatggggtttcacgaaagtgttagccaggatggtctcgatctcctgacctcgtgatccgcccgcctcggcctcccaaagtgctgggattacagacgtgagccaccgcgcctggcttatttaaatctttgaagcagaaaaatccttaaggaagacaaaagtccagtaagggaaaaaaaggataaaactgacaacaaaaacataaaaaatttctgcatactaagaaaaaaaattacaggcggttctcctgtccagcccaccacccctggactgtccctgcatataagttccgcctagcaaaaccctatgtgtcatctgctgtctccaggtcccttcagcctcttgaacctggtgccatccctagtgaataggggtccagcacaacaattggtgagccagtcaagaggctgtggagaaaatcccatcagtctgagacaacgggatctgggaaggggaaatctgaagggaaaatctcattattaacaacaggccgggtgtggtggctcccagcactttgggaggccgaggtgggtggatcaccttaggttaggagttcaagactagtctggccaacatggtgaaaccctgtctctactaaaaatgtaaaaattagctgatggtggcgcacatctgtaatcccagctactcgggaggctgaggcagcagaatcctttgaaccgcggaggcgcacttgcggtgagctgagatcacatcactgcactttagcctgtgtgacagagtgagatcctatctcaaaataaataaatacatacatacgtaataaaatgaaaaatatattctctaatttctgccaacactggacttttattttttgtatttactttgtttgatccatttagaatttattgtggtatgaggatgggatccacatttattatttgttcaaatagatggataatggctcaactgtctttattgaataggccattctttgtcatatcttaaattttaaattctcttgtacacaagggtccattttttgacaccctagtatatttcattggtatctttctctgttttttttgagacggagtatcactctgtcttccaggctggagtgcagtggtgcgatctcggctcagtgcaacctcctcctcctgggttcaagcatcaagcaattctctgcctcagcctcccaagtagctgggattatagatgcccaccaccacgcacagctaatttttgtatttttagtagagatggggtttcaccatcttggccaggctggtcttgaactcccgacctcataatccatctgtctcagcctccgaaagtgctgggattacaggcgtgagccactgcgcccggcctctttctcttttgttgcaccagaactttattagagctttatagtatgttttgataccttggtggacaaatcttcacttagtttctttatttttcaaaatttttttggctgttttcagacatttcatttccagacaaattttagaatcaattcgttaagttaccataaaaatcctattatattttaatccagatttccttgactttgtagattaattagggacatttgtggattaattttaaaaagatcactctggttatagtttgaagaacgagttggagggaggtaagacagaagatggggatatcattgagtctggcatattttgtctttaaaggacccagatagtaagtattttcagctttgcagactgaatggtctctctcatcactattctgtcattacagctcaaaaataggtatagcccatctgtaaacaaatgggtatagctgtgttctaataaaatttgattaagaaaaatagtgatgagccaaattggacttgcagactgtagttttccaacccctgatttaggctcttgctgtaattcaggcgagaaatgatactagcacaaaattgggaagtggcagcagaaaaaaatgatgaatttaagaacagtttaggaagtggcattgaaacaatttgattaatgggacgagcagagtgagagaggagaaggggtcaaggataacgcttaggtttctggtttggacattagatagctgatggatcatgagacagtggaagagcagagtagggttgggatgtgggtgaggatacatgtttgatcttggccttttaaatttaagaagactgtggggtatcaaaaagaggatactcggtaggcagttgaacatacgtgtctggtactcaaaaggagagttctagactggagcttttggtttagaagtcaccagctactgatggtaatcaaagctatgggcatggatgagattgtgcagagacagcagggagagtgagcaaagaagtgactaaacccaacttcctgaggaaccaatctcatttaaggaacacacttaggaggataattcctcataggagtctgaagagaaggggccagagagtagggaagaaaagtgagagtgttatcaagaaaagccaagagaggattgaggggtgagggaatgtttcaaggggtcagatgctgctgggaagtcaggtaagatcagaacagagaaggatccattaggtttaacatgaagagtttgtcaatgaccttaatgagaagattcatagagtggtcaggacagaagtgattggagtgcgttgaatagtcaatggaaggtgtgcaggtagagccagggagtgtagaagactcttatgttgtccgggcgtggtggctcacacctgtaatcccagcactttttgaggccgaggtaggaggatcacttgaggccaggagtttgagcccagcctagacaacatagaccctatctctactaaaaaagtaaaattaaaaaggccgggttcagtggctcacacctgtaatcccagcactttgggaggccaagggagtggatcatgaggtcaggagttcaagaccagcctggccaacatggcgaaactctgtctctactaatacaaaaataagctggatgtggtggtgcatgcctgtaatcccagctactcaggtggctgaggcaggagaattgcttgaacctgggaggtggaggttgcagtgagccgagatcgcgctactgcactccagcctgggcaacagagtgagaatctgtctcaaaaaaaaaaaagaaaataaaattaaaaaaaaaaacttttatatgtgtgaagagtagcagagatggggtggtggttaaatggaagtgtggggtctataggaaactcttttaaaaatagaagaatctaggccaggctcatacctgtaatcccaggaatttgggaggccagtgtgggtgggcaactcacttgaccaggaatttgagaccacccttgacaacacggcaaaaccccatctctgcaaaaaatacgaaagtcaggcagctgggcacagtggctcacgcttgtaatcccagcactttgggaggccgaggcaggtggatcatgaggtcaggagttcgagaccagcctggccaacagagtgaaactccatctctactaaaaataccaaaattagccgggcatggtggcgcgtgcctgtagtcccagctactcgggaggctgaggcagaagaatcgcttgaacccaggaggcagaggttgcagtgagccgagattgtgccactgcactccagcctgggcaacagagtgagactctgtctcaaaaaaagaaaattagcctggcatggtggctcacacctgtaatcccagcactttgggaggccgaggtgggcagatcacgaggtcaggagatcgtgaccatcctggctaacatggtgaaaccccgcttctactaagaatacaaaaaattagccgggcgtggtggtgggtgcctgtagtcccagctactcgggaggctgaggcaggagaatggtgtgaactcgggaggcagagcttgcagtgagctgagatctcgccgctgcactccagcctgggcgagagagcaagactccatctcaaaaaaaaaaaaaaaaaaaattaagcatggtggtgtgcacctgtagtcccagctacttaggaggctgaggtgggaggattgcttgaatccgggagcaccactgcactccagcctgggtgacagagcgagaccctgtctcaaacaacaaacagaccaatagaagagtcttgagatgtataaacactgatgggaaagggaagaaagagaaagaggctgaagtaacagaagtaaatagatatgaaagacctttgtgccctctcaagtgctgtgcaaaattagtaatttattcttccttcagagtcaagaggctctttggcccaatgttatgcgagtagagggcacttaggagtagttggggtgttgaatattcagaagagcagagaggatttgagagcagctgcagggtcaggtggggctagccacaagcatggtggccacacagagggtctcctgccctgggggcctgtggtggtttagagcttctactgtgatagaatgattaagacttgaataggccagatcctgctgtgtaaaacagttcgtcatgtagaaagcatttttgggtctctgaagtagccgtgctttattgatacagttagcagaaatctgctgaacagaattcagaatttgaagaccataaattcattttgacgaatggcatccctcggaacatgcataattgggggtttctctcccggcatttgagggtcagtgttcagtggggacatccagctccccctgcaggttggtatccagcaaggttcacttctttgccaagcactcgctatggggacatcagttataaataaacaaaacgctcgccggaacgttatggtcatcctgcccaggcaggctcccagctttctgatggatatcagacactagccctggcctcacagtatggtggttctgaacactgatggtatttaagccctctgtgttttgctcctgttcacccaggagtactagtgaaagatggctgaacagagcagtgtattttggtgagagggaaattgcacatggatggaaagtttgccaaacccaggtgattgagcagacggctttcttcctctcctttttttttttttttttgagatggagtcttgctctgtcatcaggctggagtgcagtggtgcgatcttggctctctgcaaccactgcctcctgggttcaagcgattctcctgcctcagcctcctgagtagctgggattacaggcatgcgccaccacgcccggctagtttttgtatttttagcagagacggggtttcaccatgttggccaggatggtcttgatctcttgaccccgtgatccaccctccttggcctcccaaagttctgggattacaggcgtgagcgactgcacccggccgacagctttcttcttaaatctttggaggcttccactcctccagcagagacagctgaactagatatccagtcttatgatggtgatgaataggttttactaacagaaatttattttaaggtaagatttttccagaaggcaactagttagtagaattcatctgttcaaagcaataaaaacttcctgaggacctattgtgtatcagttcttgggctggatgctagagaaacagatataaattcaataccatctctgtcctctgggaacttactgttcaggtagaatttcccaaaatgtattttggaaatactgggtacatgaaattccttggtcaagtaagtttaaaggatattgctttgttttatcgtcagtcttcttagagattctcattgtatacgagtatatcatggttccgagaagttctgtggtaaagttctcgttatatgtttaatccagtgtttctcaaatttatgtcacacacaagctcagggtatgtgtgtgacatttctttttttttttttttgagacagagtctagctctgtcgcccacactggagtgcagtggcgcaatctcggctcactgcaagctctgcctcccgggttcacgccattctcctgcctcagcctccctagtagctgggactataggcacccgccaccatgcccggctaattttttgtattattagtagagacggggtttcaccgtgtcagccaggatggtcttgatctcttgacctcatgatcctcccgccttggcctcccaaagtgctgggattacaggcgtgagccaccacacctggccaaattttatttaactttaattaatttaaatttaaataaccatatggggctagtgacttgtgtattgggtagggcagctttggaagctactttgagacatgctgagctaaaggtgtttttatttattcattctacaaacatcaagtttgtggtggtcactgagtaaaagcatccttgtcctcaaggagcttctaatttagtggggactgcaggcacccgccgtgtaatgatgagccttaggtgattacttggagcacagaggaagggtttcagctttgtgggggaggttggggttgatcagggaaggtgtcctggatgggtcctagggagtaagttctggagaacaaataagagtttgtacagtaaaacttactctttccttctttccttctttccttccttccttccttccttccctctttctctctctctccctccctttcttttcttttgacagagtctcactctgtcacccaggttagagtgcggtggcaagatttcgtctcactgcaacatccgtctcccaggctcaagcagctctcctgcctcagcctcccaagtagctgagattacaggcataggccaccaggcccagctaatttttgtatttttagtagagacagggtttcaccatgttggccaggctagtcttgaactcctgacctcaggtaatcctgcctcagcctcccaaagtactgggattacaaacgtgagccaccacgcccagccactccctgtttcaaggtgcaggtactacctgctcagtgcaggaaatgtttgtttgtctctagttcttacccattaaaacctctgttcttgccggaagctgtaggaatacagtgacatggcttcactcttgcccatgcttctgcccactagccgtcagttaacccatgcttattgaggacagtgagtagcaggcgcttttttttttttttttttttgagacagagtctcgctctgctcccagtctggactgcagtggcacaatctcggctcactgcaacctccaactccctgattcaagcgattctcctacctcagcctcctgagtagctgggattataggcacgcaccaccacacccagctaatttttaatttttagtagagacggggtttcaccatgttgggcgggatggtctcaaactcctcacctcgtgatccgcccgcctcggcctcccaaagttttgggattacaggcatgagccaccatgctcggcctgaaacatggagcctttgagcatccccagaatcatcttcttgatgggcttatgctgataccatttgcagtaagtctgacagaggcaggaacagggcagtgcacagtgacactgcctctccttgcttgggttgaagagggcctgtggaaggggttgaggttcaggagagctgcagcaacttgaagcatcagtgtttgttcctctcaactgtgggagactagttgtctaaagattatctttcttccttctctccagatggtgtcctactcttctgtcctcacagccatcagtaaggtatgaccatagacactcaggagctagattggggatgacagacaaggccccgcctccttgacggccctgatgctgtgacccgtgaggctggataggcagcacatgatgcctctggctggcattgctggacttccatgggagggggatcctggcaagtaggggctggtgcttgggagccaatgtccagtgttgaggatgctgagtctggaacccagggttggaggagagaggagcaggagtcctgaatgcaccgtctgcctcatgtgagacctgggggtggatggaggcattccgtagcatctccactgtcctttccacagtttgatgacttttctcgggacctgtgtgtccaggcattgctggacatcatggacatgttttgtgaccgtctgaggtaagggcaggggtaagggggctcacaatacaatgttccagccttgtctttgtgcagaggtgcagctcctagcacacagaccgagaccaactccgggttccaacgttttttctccccacctgcccatctacacttacctgtgccctccttttcttactcccttaggacagagtgcctcctctctgtctggagtagctcatttgaaatcttgtccagtaggagccaaaggggctaagcatcttccccaggactttgctagcttctcagccctagtccctagtaggggagtgccagggactctggggaacattgatgtgggtcggatttcagccattggaagaacagagtctgattttgcatccttccctgtagctgtcacggcaaagcagaggaatgcatcggactgtgccgagcccttcttagcgccctccactggctgctgcgctgcacggcagcctctgcagagcggctgcgggaggggctggaggccggcactccagccgctggggagaagcagcttgccatgtgccttcagcgcctggagaaaaccctcagcagcaccaagaaccgggccctgctgcacatcgccaaactagaggaggcctgtatgtcccttgattcccctgagccccacctgccgctgctcccatagccggtcctttaattgagaagggagaggcaggatgccatcccacctctttccaggaggatctgaaaccatcccacttccttttttttctccccataagcattgcacacatcccagggacttgggcagggtggcacccgagccaatcaaccaacaggtatttactgagcattgttgtatacccagcactgtgctaggtgctgggggtggggggtggggggctaccaaaggagcatgtggcagggtccctgccctcatcaagcatagctgctagtgggtagcaagactagtacatcacagacgaggaaaaaactagaggacaagacaagcacagtgtccattattgtgtttgtctccatgttactcatcgcttggaagcagatgactcttgtatttgaatgttacctaaaatgccccttttaacacagtgcctgtctgctgttgggcctgttgtaccatatgcctcttgactcaagttcagatgttaagtttgggtactttccagagcctgagaacagacagatcacctggcgggagggaagatgccagtatttccagcaatggggtcctaaggccatagtcttgctccttgaagcccaagtggcttgggaccacctacaggtctcttgttctccaggaacaagaatgctagaatgggctactctcgaggcttcaggacctggttggagagcttgttttaggactagtatatttatttcttccccaagtatgttttactgcctgtgaaaagtccaaaaagacaatctttatataaaaatggactgtgttgacagcctcttccctaccttgggcccttgataaatgtttattggctgaaaatcggatgaatactgaattttaatggatctcaggtcttgtctttttttcccccttttatgctccatggaggttaatgggctagttggtgccattattcatcatttgaccctctggaattgtaactaggataagtaacttatagttcagtgctaaccaatatggcttagaccatgagtgtgggcattaaggagagaacagtgagttagaccagtcgggtgagttgctaaaggaactggggcttgaacagaagcttagagcatggtgggagtttgagagagagtgtgtaagaggccttcagcaggggagggcagcaaacgcaatgcctagatgagggagtggttgagaatgagaaagccatttagggacccagttcccccagaggagagtgacagcctctgcaagactggactttgggatccgctcactcctcgagtgatttgtggccgccctccctgttccagccactggattctggcctccctctgcctctctctcctgagcctgtgtgatgccataccttctgaagtcagctggctgtgtcccctggaaatcaggcttttgggaatggtctctggggtttccagctctaggtgcccaccccccttctggaaacagtgcatgctgccctcaggcccctccctccctgttgtcctcaggggaagccttcctgtgtggtttcgtgtgccggagggagtgccaaaatcgaggagttcagggccaggtgctccttctctcctgtttcccatcatgtttctgtacttccttccctctgccagcttcttggactgccatcgagcattctctcttgaaacttggagagatcctggccaatctcagcaacccgcagctccggagtcaggccgagcagtgtggcaccctcattaggaggtaccggctccctgggggatggtggagaagggagagggaggacacgccctggggtaggaagatgtggcacccgtgccatcctctccgccttcacctttggccccccaaacaccgtcccctgtgtttgtgacccctcagcatccccacgatgctgtctgtgcatgcggagcagatgcacaagaccggcttccccactgtccacgccgtgatcctgctcgagggcaccatgaacctgacaggcgagacgcagtccctggtggagcagctgacgatggtgaagcgcatgcaggtgggaggggccgagtggctctcccttctccaaggcaggccagcctgttgggggcaggagggaggattcttctggttctccctgggagaagtggggtttctcctgctccatgatggaaagtgggtgccagtcgtgcacacttctgtcattggaccttactcccctggttctcagcacatagctgagcagtgactctgccatgcagtctctgacccagccaaatcctcagagtccacagaagggtgacggggtatgggcaccctcttaggcctcatccttggctcttcccacagcatatccccaccccactttttgtcctggagatctggaaagcttgcttcgtggggctcattgagtctcccgagggtacggaggagctcaagtggacagctttcactttcctcaaggtactggggacgtgggaggggcagagccagtctaggaatggttcttagcaagaccagtggcaccctggacctttgccctgtgttcctccctgcgggcactgggcccagcctgccaggtattccagtgcaagttcccattgatcattttctctgaaagtgccagggctatatttagcccatttggcagactccgttgtttcttaccacagaggtgcagtttagcttggtcatcagacagataggtgcagggcagtaaagggagccagggaaaggggccccagtcctccttgaagctggggatccacttttgcttatggcatctttttctgttgagctagcggaggtgcagggtgcttgtgtcctgtgcctaggcctgggggcatcaggggcctgggcacctattggctttctcatttagcactaagtgtgctctcactcccagggtaggagtgttcctgtctctcttcctggagcaggggttcggggggatgccttcaggggtagatgaaagagaaaagaaatggatcttcctgtttttccccctgcctcaccccctagattccacaggttttggtgaagttgaagaagtactctcatggagacaaggtgagttggggattgagatggaggcatgggagcagaaataagggcaaaggggagggtccttcaggccccagctgggcagtgttctcatgcctggaagagagccggatgtgagtgtacacctcagcgtgcacgtgcttcacaatgtgcatgcttcagcatgtgcgtgtgcttcagcatgtgcgtgtgcttcagtgtgtgcgtgcttcagtgtgtgtgtttcagcgtgtgtgtgcttcagcgtgtacgtgtgcttcagccagtgtgtgtgcttcagcgtctgcgtgcacccacaacatacacccaggctccaggcagaaagcagccaggcaactcaggccgatgcctccagcagacaaggttgcctgagatgatcagggcctggtggccctggaaaccagatggacacttctgcctctttctaggacttcactgaggatgtcaactgtgcttttgagttcctgctgaagctcacccccttgttggacaaagctgaccagcgctgcaagtatgagctcccctggtcacccccgccctactggaaggcgttctgggctcttcccctgatctctgtgccagagaagcctcaggggactctgtctccttgttcactccccttggcaggggcaggaaataggagcccacagttgccaagtccccagagcccctctaccgtccctcaggcactccagattttcctcatcctgaaagagggaggatgctgctcagggacctgccactcccacccctcaccatcctatccaggtgcccagttccctcagcatctttctccctcacagctgtgactgtacaaacttcctgctccaagaatgtggcaagcaggggcttctgtctgaggccagcgtcaacaaccttatggctaagcggtaagtgtgaacgcacctgtgctaccccaagagccccttgacctctctcttgttacggtggggctgctgcgtgcctttcaacctcctgtcgaaagtttgggctgcaagtgactgggaccgtgcctgggggtacagggaacaggaaggaaaagaaagcacagatgtcttcagaccagagttttacactcttagtcactgctctttaactcatacccatctttgtgataaaagtaaaaatcctaggctggaggcgggtggattacttggaggccaggagttcaagaccagcctgcccaacatggcaaaaccccatgtctactaaaaatacaaaaatcagctgggcgtggtggtgtgtgcctgtaatctcagctactctggaggctgaggcacgagaattgcttgaacccaggaggcggagattgtggtgaggcgaaatcatgccactgcaccccagcctgggcgatagagtgagaccttgtctcaaaaaaaaaataaataaataaataaaaatcctgaatcttcctttaatcttaaatgtgctttcagagcatttaagactaatgataggccggctgcggtggctcacacctgtaatcccagcatttgggaggccaaggcgggtggatcacgaggtcaggagtttgagaccagcctggccaacgtggtgaaaccccatctctactaaaaatacaaaaattaatcaggcgcgatggtatgcacctgtaattccagctactcaggaggctgaggcaggagaatcacttgaacccggaaagcagaggttgtactgagctgagatcgcgccactgcattccagcctgggtgacagagcgagactctgtctcaaaaaaaaaaaagactaatgataaattgccaggtgtgctggctcacctgtaatcccaggactttgggaagccaaggtgggtggatcacctgaggtcaggagtttgagaccagtagaacatggtgaaaccccgtctctactaaaaatacaaaaaagtagccaggcgtggtggtgagcgcccagctactctggaggcagaggctgcagtgagccgagatcgtgccactgtactccagcctgggcaacagagtgagacctgtctcaaaaaaaaagactaatgctaaatcagtgattgcaacattgactatgcttccataaacttcaccccaacctcggaggttcttacatgcttcccacctcctctgcgcatttccttccgggcttgaacgagggaacgtgtcaagaatttctcttcattcctcttcccttccttggccaactggtgatgtccacagcaaagcggaccgagagcacgcaccccagcagaaatcgggagagaatgccaacatccagcccaacatccagctgatcctccgggcggagcccactgtcacaaacatcctcaaggtgagtgtgcccttccctggccaccacagtcttctctttcttctttccagtgctccatctgcttgcagataaataaacagaggccacagacctctgtctcctttagcttttatacatagttgctttggaggtagtgaaaggggaggcaagggcagctaccactgaatgctaacccgtgggagcttcatttgtacaccaggcactgcagtaggcgctttcacttaggccatctcacatggaaacaacagagacgtgggtgcggtggctcacgcctgtaatcccagcattttgggaggctgaggtgggaagatcccttgaggtcaggagtttgagaccagcttggccagcgtggtgaaacccagtctctactaaaaacacaaaattcactgggtgtggtggtgcatgcctgtaatcccagttacttgggaggctgaggcaggagaatcgctgaaccctggggggcagaggttgcagtgagccaagatcgcaccactgcactccagcctcagcgatagagcgagactctgtctaaaaaaggaaaggacagagaagatcctagccgtgaccttgcccactccaaccttaccacctgcatgccagtgtagatgagagggatggatcggagagcaggggtgggttttaggaatgattttccagattgaagtcagaaagatgtagattacattccaggttgtgaagagagaaaatgtggctaggctgtatcttgggtggggggtcttcagtgttcttcaggacttgatttcctgtcctgtccccagacgatggatgcagaccactctaagtcaccggagggactgctgggagtcctgggccacatgctgtccgggaagagtctggacttgctgctggctgccgccgccgccactggaaagctgaaatccttcgcccggaaattcatcaagtgaggaaggccaagcccctgaccccagggcgtgcagggaggctgcgcgttgggaggaggtagcagggtaggagtcaggtgcctgggtctgggtctcatccagagacccacgggcctaggcagagcatcctggctggagatcttggaggaagggcctgttctcacgacctaagtgttcctttctcttcagctgaggatggagtggacatgtttggtaaagagatgagggtaagggttgaggtgttgaacattgggcatggaggaattccaagtatgcccagttattaataaggggctctcaaattctgttgccttttttgattgccctggaatttgacatatatagaacatggttccattcagtgagccattctctaggccttggaaatcttctaacaataaaaatccttctggccgggtgcggtggctcacgcctgtaatcctagcacttagggaggccaaggtgggcggatcacctgaggtcaggagttcaagaccggcctggccaacttggtgaaaccctgtctctactaaaaatacaaaaaattagccgggtgtggtggcgggcacctgtaatcccagctacttgggagactgaggcagaagaattgcttgaacagaggcggaggttgcagtgagctgagattgtgccactgcactccagcctgggtgacagagcgagactctttctcaaaaaaaacaaaaaaaaaacaaaaaacaaaaaccacaaaaaccttttttctatagcaatgtgtctcattttaagtttaaccagtaactcagactctagctatcgctctctgaacatgtgtagccccagcgcccagctactgctcagctcatgccctggtcaatgcagcctgtctccattcctttcagtttgaatgaattcacaacctatggcagcgaagaaagcagtaagtcagccctgtgcatccgcaggcccagtgggccctgaggaggggtgtggcgggagagtgtgggagggaggagggctccccagctcaacagggggaggctgtgctccctcctcagagccatgaccaatggaagcttccacagagcttgaaagtggataatgctggaaaaggattcttcccagaccatccctgtgtctccttccccccctcatccctttacgacttggttaggtatgccaggagagggtgctgggggtctttggtctcaaggaagggatgatgttccagttgagactcaagaaaaggattctgagcctcagagctttgaaggagccacttggtccctgaccttcctagaggcaaatcccgatccctgtcaacccagacacgggctcccccctgccctcgtctgggagctcagccttcccgtccttccacagccaaaccggcctccgtccgggccctgctgtttgacatctccttcctcatgctgtgccatgtggcccagacctatggttcagaggtgagagaggggagcgaccgggacgggggctcaagggaaggaggtaacccggaactctccccacctcactgcctgcgcccccgcagcctctcagccagttagttctgtgggcctcagaaaccaggtgcccacccgggctggagtccgtagaggcaccttcagccctatgttcacattgaccactaggtggcagcattgcccccgtctggctcccttagaccagttcgtccccagtctttgggctgggctggagcagcagcctggcgggaaacagtgcagccccaggtccagcgctggcaggcgccgcgccctccccactcggctggtgccccccttcccctttcccaggtgattctgtccgagtcgcgcacaggagctgaggtgcccttcttcgagacctggatgcagacctgcatgcctgaggagggcaagatcctgaaccctgaccacccctgcttccgccccgactccaccaaagtggagtccctggtggccctgctcaacaactcctcggagatgaagctagtgtcagtggcccgggcgcccactccaagggtggcggtgggggcagggtcaagacccgctccctgagcccgttccttgctcccctgtgctgacttctctgcacacccgcaggcagatgaagtggcatgaggcctgtctcagcatctcagccgccatcttggaaatcctcaatgcctgggagaatggggtcctggccttcgagtccatccaggtagccccgccttcccagcagcgtttgctcccctgagacacagagccagccagtgatgacttgttatatttcgtaagggcaagaagacctttaatccaggagctcatgttttgatattgatattttgtgtaatcgttgtcttagctactccctctggcccaggtagctctgggaagatcaaacttgtggagagaggtgtggaatgtggcccgggactccacccgctgcacttagctgcccgcagaggctgagaaggtgatgttggctcaagaaagggagatagatggtagcccatcacctttccgtctcccctagaaaatcactgataacatcaaagggaaggtatgcagtctggcggtgtgtgctgtggcttggcttgtggcccacgtccggatgctggggctggatgagcgtgagaagtcgctgcagatgatccgccagctggcagggccactgtttagtgagaacaccctgcagttctacaatgagaggtcggtaacctgccttcccttctcagacccttcaagtgtgttgtgagaagtcagcacatccaataacaagcacccctctcttttctgaccttcgcaaacacgctacttgatcactcactcactttcctattcatgcattcactcatctgactcagcaaacatgtactgtgtctctgtggcagaagcgtttatatgccagcacctgctgtgttgtcagaaatgcagaccctaaacagggtctgcccgcagagactcaagttctagacaactagctcccaaaagaacaaagctgtgtgactgtctaggagctaggaacctgtctgtagattttacaggccatgccccaccctcagttacctcttaggacagtttcctgccctggctcttcaggggcttggaggacttccctggtgaccagttacgttgagttcattcacccaaccaataagttgtttgctttttttaattgtaaaaaacacataagatttgccatcttagccatgtttaagtgtactgttcagtagtgttaagtatattcacactgttgtgtaacaggtctccagaactttcttgcatctctgaaactccatacccactgaacaacagcttcctattttcccctccctccagctcctggtaactaccattttactttgtgtgtctaggaatttgactactttatactttttgttgttgttgttgttgagacaaggtcttacccttgcccagatcagagtgagtctcactgcaacctcaaattcctgggctcaagtgatcctctcgcctcagcctcccgagtagctgggactgcaggcccacagccggctaatttttctagtctttgtagagacagggtctcactatattgccaggtcttgaactcctggccttgagtgatcctctcaccgtggtctcccaaagtgctgggattacaggcgtgacccaccgtgccctgctgaatttgactactttttagatgcctcatttaactggaatcatacagtccttgccttttcgtgactcactgacttcactcagcatggtgtcctcaaagctcatccatgtagtagcacgtgacaggaattccttcctttttaaggctgaataatactctgttgtgggccgggcgtggtggctcacgcctgcaatcctagcactttgggaggctgaggtgagtggctcacttgaggtcaggagtttaaggccagcctgaccaacatggtgaaaccttggccttactaaaaatataaaaatgagcagggagtggtggcaggcgcctgcaatcccagctacttgggaggctgagacaggagaattgcttgaacccaggaagcggaggttgcagtgagccgagatcacgccactgcactccagcctgggtgaaagagtgagactctgtctcaaaaaacaaaacaaaaacaaaagaaacctctattgtgtggctataccacatcttgatccctcctctgtcagtggacacttcagttgcttccacctttgggctatagtgaatagtgctgctgtgaacatgggtgtttaccagctaatacgttttgggtgttgccatgtctttatggcaacgttgaggatgtctttatttatttatttatgtacttatttttgagacggcgtttcgctctgtcacccaggctggagtgctgtggcactatctaggctcactgcaatctccgcctcctgggttcaagagattctcctgcctcagcctcccgagtagccgggattacaggcatgtgccaccacacccggctaatttttgtatttttggtagagatggggtttcaccatgttggccaggctggtctcgaactcctgatttcaggtgatcttcccgcctcagcctcctgaagtgctgggattataggcatgagccaccgcaccgggcctgaggatgtcttaatagggagaaggggaagcattgagctgaatgaggtttggacggtctggaaaagcacatctcgttttccccttgcctcctccttttttcctttcttctctcatttctccaccaccttcccccccgccctaccaagtagggagcttttgctctggtgtaacccattctaagcaccctaaatcctatctgggtaaggggtagtgagaagtctgtggctccattgtgcaggtgggaaaagtggctctaaaggtcatagcaactttcccagagccaccctgcattccaggaacagtcagcactcggcccgggtctgtattcacttccgaagcctctttccatgagaaaattcctggatatacacttctatctgcccagctaccaggggccgggaagagtcctgtggggcagcccttgggcctctcctggaaggaacagtttactttgggaggaggccagggctgggcggggacccccaagcactcagcctagggggaagtgattgtgtttatttatgtggcaggttggcagggcccaggcctgggggatgggggaagttggagaataaaagaaaatgtgaatatctggctggaatggccagggggaggaaagtccctccccagtccctatttataggctttgtgtcctgcaggtgagagacctgccaggagcagagcaggggccaggtcaccccggggtataccgtcccccagcgcaaaactgggttaatgcctcagggagatttccgtaacctaagtccaagggaaagtctggcatgggtgttccctcctctccctccccaccctacagtggcacctgagcctcaggttctctcggccctcccccagggtggtgatcatgaactcgatcctggagcgcatgtgtgccgacgtgctgcagcagacagccacgcagatcaagtttccctccaccggggtggacacaatgccctactggaacctgctgccccccaagcggcccatcaaagaggtgctgacggacatttttgccaaggtgctggagaagggctgggtggacagccgctccatccacatctttgacaccctgctgcacatgggcggcgtctactggttctgcaacaacctgattaaggtacttgggctggagtggctgtgggccgacatgggtcctgtcccctggctccccacacctggcctggtctgccaggcttccctgagaggctgccgtgagccaggtggcctccccggaatgcctcgcctcagagttgcctccttggggagctctggccagagactgggattcagcctgaggggcggagcaacatctggggccccctctgcgggccttactggacagccatgctggggtggcagggtgtaggagccccagatcccgggcccctggctcctgaactgccccctttcctgcgcactaggagctgctgaaggagacgcggaaggagcacacgctgcgggcagtggagctgctctactccatcttctgcctggacatgcagcaagtgaccctggtcctgctgggccacatcctacctggcctgctcactgactcctccaagtggcacagcctcatggaccccccgggcactgctcttgccaagtaagattctcttcagagcttgccctgctccggccacccagggtcaagcacccctcgcctggtgccaccctgggagactgggctttggggagcccagtcagacacagaaagctcctggggcacctctcactgtccccctttttctggaaccctttgccaggctggccgtgtggtgtgccctcagttcctactcctcccacaagggacaggcgtccacccgccagaagaagagacaccgcgaagacattgaggtaggccccccagctgccctcgccggcttcacttgttcaccggtttgttacagcatttcctaaggattccccaggcaaagggaagcagttgtggcccctgcccttggggcagctgtgcctgggcatgattggtcaggaatctgcatgggtgatttgtgtggccccagcttgcccatgggcacaaggggcctgtcagattgtgggaggggttgagcagagaggggctgaggccctgctagccatgctgacctcgctcaaatcggagctcaagctcttttccctgacagctggaaactggggggtttaggggtgtataacagtgactttcactccctctaggattatatcagcctcttccccctggacgatgtgcagccttcgaagttgatgcgactgctgagctctaatgaggacgatgccaacatcctttcgagccccagtgagtgtgtgggctggccgcgcgccgctccttttcctgggaattcactccccgatgctgcc

SEQ ID NO: 651 - DNA, 19985 bp, Homo sapiens
  source 1..19985: mol_type = other DNA
gggcggaagtgacgtcgtgtggggcgggtccgaccgcgcacaatgggccatggagttcccgttcgatgtggacgcgctgttcccggagcggatcacggtgctggaccagcacctgaggcccccagcccgccgacccggaaccacaacgccggcccggtgacagctcaaacccaccctctggcccttttctcccggttcctctccaaacctggtccaggcaccacgcccccttctcactgactagtgatcgccccttttgatgtccaggcctgcctttttggtgacctctgaccctgggcctagtgggattgatcagcgcttggatctgtgacctttcaccccgggcccaaaatgtcccaatcaaaggatgtggttgacctggcctttctgcttcctcacaataaccttaagggaggagggagtgtgccaccttgaaaggtgtgacagaagtttgggtttcagaagggtggggtgggaaatcagattggaagactcccaggcaaaggcagggagccttcagtgttaaacctgggttggagttgtggcccaggttcccaggactgactgcctaggacccgctaatttagtgagtatctgactctttatttcttctctttctctagtgttgatctacagcagcaaattatgaccattatagatgaactgggcaaggcttctgccaaggtactggagagtttttagatggagtaaagggaggacctctgtggggatggtatataagggaggcctgggtccttcggagagacttgcagaaagtctgacttaatcttccctgcaggcccagaatctttccgctcctatcactagtgcatcaaggatgcagagtaaccgccatgttgtttatattctcaaagacagttcagcccgaccgtgagtgccacatgctcttccatcccatacttaattccttccttcctcagcccttcccccatctttgactatctcttgcagatagataccactagcctgttcattattttccccgtcctacagggctggaaaaggagccattattggtttcatcaaagttggatacaagaagctctttgtactggtgagtgttattggatgctaggagttcgtataccttggtttctgagaacaaaagtgctggaggttagggggcagcagagatgccggggttcctaaaacatttttattgtttctctcttaggatgatcgtgaggctcataatgaggtagaaccactttgcatcctggacttttacatccatgagtctgtgcaacgccatggccatgggcgagaactcttccagtatatgttgcaggtatcactgacctcttcactggttcatccaaactaggggctcctttgccctgagcccttccagaagccctgcctcccaccccccatgttcccatgtcattctattcccttcccaggcttctggcttcctgttggcatgctttccccatacttcctcctaccctgagtctccttttccctgcagaaggagcgagtggaaccgcaccaactggcaattgaccgaccctcacagaagctgctgaaattcctgaataagcactacaatctggagaccacagtcccacaggttagaggtttcagagaatagatccccactgagcattcccattgaatttatttgttatttatggcaaagaagtagtgacttatttcctatcacataggtttcattttctacaaccaggctctttctttctcttgtggtaccatctctcatcctgtagtgacttctttctcatctattttgatttttttttttgagatggagtctcgccatgctgcccaggctggagtacagtggcgcaatctcagctcactgcaacctccacttcctggtttcaagcgattctcctgcttcagcctcctgagtagctgggactacaggcacccaccaccacacccagctaatttttatatctttagtggagacggagttacaccatactggccaggctggtctcaaactcctgaccttgtgatctgcccgccttggcctcccaaaatgctgggattacaggtgtgagccaccgcatctgactttttttttttttttttcaaagcagagtctcctgctgttgcccaagctggagtgctatggcaggatcttggctcactgcagcccaaccttctgggctcaagcgatactcctcccttagcctcctgagtagctgagactacaggcatgcaccaccatgcctggctaattttttattttttgtagagatgaggtctcactatgttgcactgggtggtcttgaactcctggctcaagagatccacctgcctcagcctcccaaagtgctgggattataggcgtgagccactgtacccagacttattttgattctttaccacaagttgtttcctacacctaatttttctttttttttttttttgtgagatgtagccttgctccatcgtccaggctggattgcagtggcacgatcacagctcactgcaacctctgcctccggggttcaagtgattcttgtgcctcagcctcctgagtagtagggattacaggcatgcaccatcatgcccagctaatttttgtatttttagtagagatggagtttcaccatgttggacagactggtcctgaactcatggcctcaagtgatgtgcccacctcagcctcccaaaagtgctgggattacaggtgtgagccaccgcacacaacccttatgcctaatttttttttgagacagagtcgctctgtcacccaggctggagtgcagtggcacgatctcagctcactgcaagctccgcctcccaggttcacggcattctcctgcctcagcctcccgagtagctgggactacaggtgcccaccaccatacccagctaattttttgtatttttagtagagatggggtttcaccgtgttagccaggatggtctagatctcctgaccttgtgatctgcccgcctcggcctcccaaagtgctgggattacaggcgtgagccaccgtgcccgaccccttatgactaattttcaacccaaacatagccagctcattttcacctccttgttttcacatagttcattactcatctggtcagtcagtatttattaagggtccagaataatatgcattccctgtcctcatggagctttggcctaatatagggaaggaagtcttgtttataactaagtgcagcaaaatgttactaatgctacccattcatccaataaacattgagtgcctggcagtgttctgggcactaggaatggtttactcaatgaaacagacaacagcctgggcaacatagcgaaactctgtctctacaaaaaatacaaaaaaaaattagccaggcgtggtggcacgagcctgtagtcccagctacttgggaggctgaaatgggagaatcgcttgagcctgggaggcagaggttgcagtgagccaagatcgcgccactgcattatagcctgggcaacagagagagaccctgtctccaaaaatgaaaacaaaaacagaaaaaaaggccaggtgcggtgcggtggcccatgcccgtaatcccagcactttgggaggctgacgtgggcgaatcacttgaggtcaggagtttgagaccagcctggtcaacatggtaaaaccccgtctctattaaaaatacaaaaattagcggggcatgatggtgggtacctgtaatcccagctacccaggaggctgaggcaggagaatcacttgaacccgggaggcagaggttgcagtgaaccaagattgcaccactgcactccagcctgagcgacagagtgaggactccatctcaaaaaagaaaaagaaaaagggccaggcatggtggctcatgcctgtaatccccacactttgggaggccaaggcaggaggatcacctgatatcaggagttcgagatcagcatgtggaacatagtgaaaccctgtctctactaaaaatataaaaattaactgggcatgatggcgtgcgcctgtaatcccagctactcgggaggctgaggcaggagaattgcttgaaccccggaggcagaggttacagtgagccgaggtcctgctacagcactccaccctgggggacgaagcgagactcttgtctcggaacaaaaaaaaaaaacagaaaaagaagggaacagacaaaagtccctgtcttagtggtggagcttatattctagctggagagacaaacaaacataataaacaatatggttaataagtgctctggaaaaatgagagcaagtaagggtttgggagtactcaagtaaggtggggatgggagtatgtgggattgcaggttgaaaggggatcatcactgagaaagtgtcatttgagcaataactgaaaggaagtaagagtaaaaactggccgggcacggtggctcatgcctgtaatcccagcactttgggaggccgaggcgcgcggatcacgaggtcaggagatctagaccatcctggctaacatggtgaaaccctgtctccactaaaaaaaatacaaaaaaattagctgggtgcctgtagtcccagctactcgggaggctgaggcaggagaatggcgtgaacctgggaggcagagcttgcagtgagccgagatcgcgccactgcactccagcctgggtgacagagcgagactccatctcaaaaaaaaagaataaaaaccaaggctgggcgtggtgacttacatctgcaatcctagtacttagggaggccgaggtgggtggatcacttgagcccaggagttcgagactagcctaggcaacatggtgaaaccccatctctacaaaaaacacaaaaattagccaggtgtagtggcacgcacctgtggtcccagctacttgggggtctgaggcaggaggattgcttaagcccaggaggtcgaagctgcagtgagccgagatggtaccactgcactgcagcctgggtaacaacgtgagactgtctcaaaacaaacaaacaaaaaaaaagagtaagagccaagaaatatctggagagagagcatcccagacagaaggtaccaccagtgtatggccgtgaggtgggagtgtgcctgaaagagcaaattggctgtgtccagagcagcatgagtcagcggaggagtatggtaggagatgagaccagagaggtaatgcggaggaggggccttataggctactgcaaagactggcttttattttaagtaaaaaataagatcaggccaggggtggcgactcacacctgtaatcccagcactttgggaggccgaggtaggtggatcacctgaggtctctactgaaaataccaaaattagctgggtgtgatggcaggtgcctgtaatcccagctgtttgggagtctgaggcaggagaatcactagaaccgggaggcggaggttgcagtgagccgctgaaattgtaccactgcactcctgcctgggcgacagagcaagactccttcttaaaaaaaaaaaaaaaaaaaaatagcgccaggtgtggtatctcattcctgtaatcccagcattttgggaggcccaggcaggtggatcacaaggtcaggagttcgagaccagcctggccatatggtgaaaccccatctctactaaaaatacaaaaattagccgggtgtggtggcgggcacctgtagccccagctacttgggaggctgagatagaagaatcgcttgaacctgggaggcagaggttgcagtgagctgagatcgcactactgcactccagcctggataacagaacgagactccatcaaagaaaaaagaaaaagatcattttggctgtgatcttgattttttcctttttaacaagatcactttggctgttaagaacaggcaatagccgggcacagtggctcacacctgtaatcctagcactttgggaggccgaggcaggtggattgcctgaggacttcaagaccagtctggctaacatggtgaaaccccatctctactaaaaatagaaaaaaaaattagccaggtgtggtggtgctcgcctgtaatcccagctactcgggagactgaggcaggggaattgcttgaatcagggaggtagaggttgcagtgagctgagattgtgccactgcactgcactctagcctggtgacagagtaagaccccatatcaaaaaaaaaaaaaaaatggaaacggcaataagggagccagagtagaagcaagtagactaattaggcagcaacaatcctggcgaaaaatggtggtggctcagaccaaggtggtagcagtagtgatggtaaagagtggtcaaattttaaatattttgaaggtaaagcaagtaagatttcctgacagattgtatgtggagaaagaggactttaggacaatgccaaagcctgagcagctggaagaatgaagttgctttaactgagatggtaggtagaccagctttgggggaaatactaggagtacatttttaatatgttaattggagatgtctgtgatatgtccaggtttgagtagacagttggatacttccctggagatcagggaggaggtttggggaggagagttttcagcatacatctggtatctaaagccaacagacaggatgcgatcaccatagaaagattatagatagagaagctgcccctttgggccctctttaagaagtgaggacccccaactggctgctctgaaaagccatctttgcattgttcctggttcggtgtcctgctcaccacagccacctccgccatgcacttcctctgctgcctcagagtctggcagcttaatcgacatagtccccaaactctcactttcttcttaatcccttgcatcggatcaccgctgtgccccaccatgtcagaggcagttgtggacacaagctccgtgatcaccaccaaggacttcaaggagaagttgtggaggaggcagaaagtggaagagacgcccatgctaacgggaacgctaatgaggaaaatggggagcaggaggctgacaacgaggtagatgaagaagaggaacagggtggggagaaagaggagaaggaagaggaaggtgatggtgaagaaaagaacggagatgaaaacgaagcagctgaggcggtatggacaaatgggcagctgatgatgatgaagatgacgatgttgataccaagcagcagaaggccagtgaggatgattagacagcaaaaaaagaaaagttaaactttaaattaaggccaccgtgacctattcaccctccacttcccatctcagaatctaaacatggttgccctcgagaggcctgcttgccctccacagacagtgccactgcagatgacaggcactcaccaccacccaacccaaaccagagaatttgcaacagaggaggaaaaaagaaccaaaacttccaaggtcttgctcttttaaaagtactttaaaaaggaagtttgtttgtattttttatttacattttatatttttgtacatattgttagggtcattttttttttctttgagacggagtctagctctgtcgccaggctcaagtgcagtggtgcgatcttggctcaccgcaagctccacctcctgggttcaagtgattctcctgcctcagcctcctgagtagctgggattacaggcgcccgccaccacacccagctaatttttgtatttttagcagagacaggctttcaccaggttggccaggatggtttctatctcctgaccttgtgatccacctacctcggcctcccaaagtgctcgaattacaggcgtgagccaccggcgcccagccaggttcagtcatttttaatgatctcagatgaccaagccagcctttggagggttctctgtcttacttctgactttacttgtggtgtgaccatattcattataatctcaaaggaggaaaaaaaaaaaaaaaaaaaaccttgtttaaaaaaaaaaaaaaagcctgggcgcggtggctcgcgcctgtaatcccagcactttgggaggccgaggtgggtggatcacgaggtcagaagatcgagaccatcctggctaacatggtgaaaccccctgtctactaaaaatacaaaaaattagccaggcgtggtggcgggagcctgtagtcccagctacttgggaggctgaggcaggagaatggcgtgaacccgggaggcagagcttgcagtgagccaagattgtgccactgcactccagcctgggcaacagagcgagactacatctcaaaaacaacaacaacaacaaaaagtctcgttctgagcattccagtagcttctttagtgtatgtagttagttgtaccataagtagttggtttgtgtgagatggttaaaaaggccaaagataaaatgtttcatttatttgccttttttgtctatgaaatggctgcttatttatttaggcctatttgatgtatgtgtgaaacaatattgtgcaacaataaacccaaattttattttgctgagttgttctaacagcaacaaaaagaagttaaggaagagaagaagaccagcaaatgcaaccacagagtgactagtgaagtagatgaaaactgaggccgggtgtggtggctcacacctgtaatcccagcactttgggaggccgagtcgggtggatcacctgaggtcaggagttcaagaccaacatggtgaaaccccatctctacaaaaaatacaaaattagccaggcgaggtggctcatgcctgtaatcccagctacttgggaggctgaggcaggacaatcacttgaatctgggaggtggaggttgcagtaagccgagatcatgccattgcactccagcctgggcaacaaagcgaaactccatctcaaaaaaaaaaaaaaagaaaagaaaactgaaaagtaaggtgacctcaaaggccactgaagaaagtgtttccaggaggaaggaatggtttacttggtcaaatgctgctgatcaaggagcaaagaggtctgagaagttaccattggatttatctgcgttaggccattggtgatcttaatgagcagttttggtgcagcggtgtttggaagcctggatgcagtgggtcttgtagactgagaagctaggaacacagcaagaataagctactcttttaaatcctgctttaatgggaatagaaatagagcaagagctggagagtgaagtggatcaaaagagttgatcttttgcagatgggagaacaaatagcattagaatgattcagtagagagaaaatattattatgtcagagaaagtggggagaactgttgaagtgatgtcattgaatgggcggcgggggcgttgagatttggttgacaagttagccttggataggaacatggacagttaatccattgtaacatgatttgatagatgtgattacagaggaggcataaggacatggatttgagtgctatcttgggctgggggttgggtaaagaaagatgacatgtctaatcttgaaaggcaagtgtttgtcaggtggacaaaaggctaaagtgcatttcatgtagaggaacaggcatgagcaaaggcagaaaggtattaaaccacctttcaggccaggcgtggtggctcacacctgtaatcccagcactttgggaggccaaggtaggcggatcacaaggtcaggagatcgagaccatcctggctaacacggtaaaaccccgtctctactaaaaatacaaaaaaaattagctgggcgtggtggcaggcgcctgtagtcccagctaatcaggaggctgaggcaggagaatggcgtgaacccaggaggcggagcttgcagtgagcccagatcatgccactgcactccagcctgggcgacagagcaagacactgtctcaaaaaaaataaataaataaataaaaataaaccacctttcaggacactacaagcagtgtggtgtggttggagtgctgggcatgtgcttgttggggggtgggggtgatgaggatgggctggtagacattacaacaaggtcaaggcaagggataggcagggtcttcctacagtatatttttccattaagaggcaacagagagcagtggaaggagcacagtttttttttgtttgtttgtttgtattttgagatggagtctcagtctgtcgcccaggctggagtgcagtggcacaatctcagctcactggaacctctgcctcctgagtccaagcaattctcttgcctcagcctcctgagtagctgggattagaggcgcccaccaccacacctggctaatttttgtgttgatgaggtttcaccatgttggccagacgtctcgaacttctgacctcaagtgatccgcccacctcggtctcccaaagtgctacgattacagccgtgagccaccatacccggtcctggagcacagtattcgatatgaaacacattacccagttaacatgtaaggccagagcagtatagagtgtaaataataattcacatttcatgggctctatgtggtatctatatgcatcatctcagtggattcttgcacatctttttgaggtaggtactattattaaacctattttgggtttatacaaattaatgacttaaccaaattcacacagccagtaaatagtagagtccacatttgaacccatagccatttgcacccagtgaactttttttttttttttctttttgaggcaaggtcttgctctgttgcctaggctggagtgcagtggcacgatcacggctcactgcagtctctacctcctaggctcaagagatcttccctaccagcctggccaacatggcgaaaccccatctctattaaaaatacaaaaataagccgggcgtggtggcatgtgcctgtaatcccagctactcaggaggctgagacaggagaagagcttgaacctgggaggtggaagttgcagggagccgagatgacaccattgcactccagcatgggcaacagagtgagattccatgttaaaaaaaaaaaaaggccggacgcattggctcgcgcctgtaaccccagcactttggaaggccaaggcgggcggatcacgaggtcaagagatcaagaccatcctggccaacatggtgaaaccctgtctctactgaaaatacaaaaattagctgggcatggtggcgcatgcctgtagtcccagctgctccggaggctgaggcaggagaatcgcttgaactcaggaggtggaggttgcagtgagctgagatcttgccactgaagtccagcctggcaacagagcgagactccatctcaaaaaagatcttcccacctcaacctcccaagtagttgggactacaggcgcccaccactatggctggctgattttttgtatttttagtagagacggggtttcaccgtgttagccagggtggtctcgatctcctgacctcgtgatcggcccgcctcggcctcccaaagtgctgggattacaggcttgagccactgggcccggcccacgcctggctaatttttaaaaatatttttgtagagatgaggtcttgctatattgcccaggctggtcttgaactcctgggctcaagctatccacatgagccaccatgcccagcccccattaaacttttttttttgagatggagtctcactctgtcacccaggctgaagtacagtggtgcaatctcagctcactacagcctctccctcctggggtcaatggattctcctgcctcagcctcctgagtagctaggattacaggcgcacgtcaccacacccagctaatttttgtatttttagtagagacagggtctcgaactcctgacctcaagtgatccacccgccttggcctcccaaattgttgggattacaggcgtgatccaccacgcctggcccccgagttttttttttttttttgagacggagtctctctctgtcgcccaggctggagtgcagtgttgccatctcggctcactgcaagctctcctcttgagtaaactcttaatggctacactattttcctggctaaaacactgcagctggaatcagaagtctgaaagttgaggcccagccctgccacttgtagctacttggcattggccaagcgaagccatgtctccaaggctgtatttcccccaaccttctttcaaatagtgacttccaggattgtgaaggccaaattaaatgtgaaaatataatgaagtaactctaaaattaatagttactagttatcaaagtagcatcctggcctccagcatgtcttcccctgactttccccaccccttggaaccctgctgaattttttatttatttatttatcctttgagacggagtctcattctcttgcccaggctggagtgcagtggcacgatctcagctcactgcaacctccgcctcctgggttcaagcgactctcctgcctcagcctcccaagtagctaggattacaggtgcacactgccatgcctggctaattttttgtatttataatagacacagggtttcaccatcttggccagaccggtcttgaactcctgacctcaagtgatgcctgccacagcctcccaaagtgctgggattacaggtgtgagccactgaacctggactttagcacctttttatgtgcttattggccatttgtgtatcttctttagagaaaagtttatacaagtcctttgtctgttcttaaattgtgttcttttttgttctgagagtttttcatatattctagatagaacgcacttatcagatgtatgacttgcaaacattttctcccattctgtagattgtcttttcactttctttctttttttttttttttgagacggagtcttgctccatcgcccaggctggagtgcagtggcacgatctcagctcactgcaagctctgcctcccgggttcacgccattctgctgcctcagcctcccgagtagctgggactacaggcgcccgccaccacatccggctaatttttttgtatttttagtagagatggggtttcaccatgttagccaggatggtctcgatctcctgacctcatgatccgcccgcctcggcctcccaaagtgctgggattacaggcgtgagccaccgcacctgacctttactgtaccttttctgtgttgaggtatgtttagatacatcagctgaaccattatgttagaattgcctacagctggctgagcatggtggctcacgtctataatcccaggacttttggaggctgaggcagaaggatcacatgagccctggagtttgagactggcctgggcatcatagtgagacccccatctctacaaaaagttaaaaaaaaattagtagccagatgtggtggcatgcacctgtggtcctagctacttgggaggctgaggtgggaggatcatttaagcccaggttgatgctgcagtgagctgtgatggcaccactgcactccagcctaggcaacagagcgagactctgcctctcaaaaaaaaaaaaaaattgcctacagcattcagtacagtaacatgctgtacaggtttgtagcctaggagcaataggctgtatgatatagtctgggtgtgttgtaggctatagtgtctaggtttgtgtaagtacactctgtgatgttcacacaatgaaatcacccaatgacgtatttctcagaatgtatccccatcgttaagtgatgcatgattgtattttgtttgtttcatcttccaggtgaacaactttgtgatctttgaaggcttctttgcccatcaacatcgtaagtttttgcattttgttggtcacgtagtcggggtgagggaaaggaaagagctggactcttggtcctgccgacccctcactgaggggccccgccgcttccttcctcacagggccccctgctccctctctgagggcaactcgacactctcgtgctgctgcagtcgatcccacgcccgctggtaaagcctgtattgaaggggtggaactgtagtgcagtgatggctacttactctagatgccacggggtacagtgccatctgtgggcaattttggaaaattctaaagcaacccaagtctccagcagtcatgactgtttgcctttgccctcatgggagctcagtgcattttatatttggcaagacttttaactaagcaagctcattgggagcctgtttgacagctgatatcaatggaccctcttgccagttcaggtccgtcaacataggccagagtcaggctcctttgtaaaccccaggcttctgttagccagtgagggacaggctggtgcaaacagcccttccatttgcagtcacagaatagtgacacaaatggcccaaaatttaaatgttacttttagaagataacactcagagtttataacatttccaaccagataatgaaattgatatggagaaaccaaacctcagaggcactaaaatgctgtccagattccccatcccatatacacacatacacacacacacacacacacaaacacacttactgacagtctgagccccactccttcctcttcctcaccacctccaccttaccaacttctgacagctgtacagtgcttgcttgcacagaagagcccccttcctgagctggctctgtggccaggaaaggatgtaaccaccatccaaacagcagtctgtaaccagctatgagcatcacagtgtcaggcactgagaggcacctcaactcgctttggtttccaaggcttctcccatttagcttgttcagaaccacaggctgtgagagggactgagggccaacaaggatggtgaggtctcaggcctgcaggggagggtgctgtggataaagcttaagtgaatttgctgagaagtctttcatttgccacacatacatgatggagaatctcttgagagggaaagccgggagcaagtagagaagtgaggagggggaggctgaactttggacattacatcagcctcctgcttactctgatagctccctttcagatgcccatatttattttcttttttttttttaacctaataaaacttcagtctcttcccattttcgtataggaaggagagattgtgccctccttccaaacctcccctgacctctccagagcaattcctgattaaccaagggctttgtccatctcatccagaggaacccagggtcctcgttggcccggctgggaccattccactgccccagaataccagggggccatgacagcacccactgacagtaagagctcacttcccttggctgcccttctcctgcatctcccaggcccccagagtctccccttcgatctttctccctagctctgtgtttggcctactccttctggctttcctcaacagtgttccacattcccctcaaattcccttttggtgtgctggcattgccatggtgctgctcctgcaagttctcaggaggaactgtggtgtcagggagcagaggtttggggttggggtatagtggctgggaggaggggtgcaaagtatgtctcctaacgcttaccctgcctatgtcccctccactgccagctccagcaaggaagctgccacccaagagagcagagggagacatcaagccatactcctctagtgaccgagaatgtaagaggggcaagggtcgggtgtctgggcctggggtaccttaacacaagggaagagaatgctcaggggacccagggaaaggattcgttctctctaaagactcagatttcttgggctgggcatggtggctcatgcctgtaatcccagcactttgagaggctaaggcaggcagatcgcctgagtccaggggttcaagaccagcctggccaacatggtgaaaccccgtctctactaaaaatacaaaaattagctgggcacggtggcacgtgcctgtaatcccagctacttgggaggctgaggcaggagaatggcttgaacccaggaggcggaagttgcagtgagccaagatcgtgccactgcactccagcttgggtgacagagtgagactccgtctcaaaaaagaaaaaaaaaaaaaagaaagactcagatttctctttttttctaccaaaacctttgctgtcatgactctcttccttttttcttctttttctgtcttgctcttcattctccctgtccccagttctgaaggtagctgtggagcctccttggcccctaaacagggcccctcgccgcgccacacctccagcccacccacccccccgctccagcagcctgggaaactcaccagaacgaggtcccctccgcccctttgtgccagagcaggagctgctgcgttccttgcgcctctgccccccacaccctaccgcccgccttctgttggctgctgaccctgggggcagcccagctcaacgtcgtcgcaccaggtaataggagttgaagggctaaggagcctcacagctataaaagaggatgttagaaatggcaaagggcaatttgaatccatcagagagatggatcaataagatgggtggcttggggggggtcctgaaacctttcaagaaaaatatttgtgcaagtgatctgggaaaaaaatgcagtgaaggagcagaataggaccttatatggagcctagggaccctggctttaatgtgagagttatgtggaatggtaggaagaacaccgagatccatcgagttgggggaacagagccttctaagattgggaaaatcttcgcttaatacttgctggggaaggggcagtgtctgacagagagtgggaagccactggcttgtgtgccaagagtccatcgcagcaggcagggagtgggcatttcctttatttctctccctttctcttcacctctgacttctctgtttttctctcccccgccccccgccatttcccatctcccttcctcccatccataacatccttccacagctcccttccccgctctgaggagagtcgatactaacagctaccctctccctgccctgggagacctggggtgggcagggaacccctccctgagaacctcagacccactcttccattgcatcctgtaggacccagtggaacctgacagagcccataggattccctcttctactttcttagacagcagggatgtcagggtctcaaactgcctaacactttgtagcttttcttaacacaaaagcaccccttctctcctaacttgggctctgaatactttcccaacaggaagtctgatctgttgccagacttcttggttagatggctcatacatttatctagagaagcacactcttgcttgctgtcaaactttagaccaccatggaaggtctaagggcatcctgtgccagggaaactttttaaggaattttatctatgggataaaccccatattccctctagtgtctactggtggctctaatactgctttgtgctgcctgccacacttgccctttgagcctgcgaatggccgctagtgagcaagctctgcttcagagcagtctagttaggtagaacagggacttaccagcttcccaaagggatctactcaccattgccaaactcttcatttccacattttgtgtaggtgtcagggaaccccaaactggtgttgctttggggtctctaaaggagattggctgacaccaccatttcccccagatccagattctctgagggaggttgtttcttgagagtagatccagagtgtcaaggatctgttagatcctggaatcccttcttgcatccatccctccctggtagctaggtcccgatatactcctgtcttgtgagattgtcgagatgagatgggggaccactcttcctctgtccttcctctctcctttcctccatagcaaggacgaccttccctgctccatgcccagagtatagctagatcccttcccctccctaccctctgaatgtgtgctagatcaggtgccccactgtgtttcctgaaatccttgggagccggatctccccatctcccctactcactcttcccttttcttctctcagtgttgtctgaataaagtgtgaaatcttttgtgttttctaaattgacattttcaatgaaaaaaagaatcacaaaaaaaaaagttgtcagcctcatttgtgcgtcatcccttattttcctgggatctcaggacctctgtccctctcatttctcacttctgagatctgcacatcttttacccaggagcctcagagctcctgagtctggtgtctgcctatccccatcttcactgttagtcctcctgcagattctgtgtctcctttcatgtaggtgctggatccctgtgtgtgggcttccgtatctactccctcattccctccaggaacctccagctctccccagtgacttctaccctttactctgggcgtgcctttgccaagatgtcaaagcttaccaacatctctggatccactaattacctcctgcctcctgtattcgtcttcccactctgattacctgacgtctgctccactaaaccgctggatctctctcaagacaaacccttacctccattgagagtgcaacacagtctgtcaccctatttacagaggcccccttccttttcctcctaaattcaaaattcagccttgtcacttcctatttccctctggtctaaggaatctttttttttttttttgagatggagtcttgctctgtcgccaggctggagtgcagtggcacaatctcagctcactgcaacctccgcctcctgggttcaagcgattctcctgccttagcctcccaagtagctgggattacagaagtgcaccaccgtgcccagctagtttgtgtatttttagtagagacagggtttcaccatgttggccaggttggtctcgatctcctgatcacgtgatctgcccgtcttggcctcccaaagtgctgggattacaagcctgagccaccgcgcccagcctggtctaaggaatcttatagttaaggtaaccctgttttccaaaccaaacaccagagtacccgatccaacacatttttgaccacatgtgagtctgttcttctgacatgatttggatcacacctagccatagatttaacacattacctcaactagaaagaatagagcaataaatcagaagcactccagaaaatcttgggtataaaatgaacttcccccgcccttttctggggcacagctttgattaaaacctgttaggaatgataattacccccttctctttgttcctgtgctattccttttactcctctcctctgattcctccatacccacccatctttcatccagtagcctcctccccatcatctcccatttcttctacagggggactcccccaggtctggtagcccaaagctgctgctacagccgccatgggggggtgaattcctcatcccccaatacaggtaagtattcactcctccctaccctcaaatcaagtaggccacattcactgtctactcctgccttcccattcacatgcctgatatttccacaggcaaccaagactccaagcagggagaacaggaaacaaagaataggtgaggtctaaacccctcccctaacagcctcccaccaccatctgactcccttcctaacatcattctcagtcacttcctactcttaaatcttattgtatgaactggacaccagctcctcccacaattccttctaccttacatcctgcaagcccctttcccccacaggttcaactctggtacttccctttggaatacggattctctgagaggttttaaatttggacatagcactaatggttccagcttcatacccatcatgtgtcctacattaaaacctggcccgagaccttgaagagtctgtaatcttaatttcctctttagtattcctataacccactctccatctccccacctaccaggtctgccagtgaggagcaggccttgtcacaggatgggtctggggagaagcccatgcacacagctcctccacaggccccggccccgccagcccagtcctggacagtgggtggggacatactcaacgccaggttcattcgaaacctgcaggaacgtcgcagcaccaggccttggtgaccgcagccccgtcaaacatcttcaaagtattatttctccctcactacaggaaagagccaaagcccaaccctcataatagatggatacattcattcattcattcattcagcaggcttatcagattcaagtcatttgtatcttttaaccagaccaataaaagtatttatttttatcacaa

SEQ ID NO: 652 - DNA, 32744 bp, Homo sapiens
  source 1..32744: mol_type = other DNA
tatcccagtggcccccgtgcggcgactttagctgctgctgtctcagccgctccacagcgacggcagcggctgcggcttagtcggtggcggccggcggcggctgcgggctgagcggcgagtttccgatttaaagctgagctgcgaggaaaatggcggcgggaggtgagtggagataaaggaggaggcggtggcgggcgagggggtggagtgcgaggcggagggaagaggggcgagttccccaggctgcgagagccagcggcttcagatctgccaaggcactgaggggcgcgccggccgggggacgcgctgaggtagtttcggggtgtcggggccgcgccgcttcccctcagcccggggggcggcccgcggcggtaggagctgagacgaagctgggtggcagtccgcttggggatccgagggggtccccgcgcggaggggtcacccgaggagtttgcggggggactgcaggggcccactttccccttctgtccctaaagttttttcttcctcttgcctcccccagcccttttgaaagctccccgcgtcgtcctcctgctgccccggctccttagcagcttctgggacgcacgggagggaaaagccgcggggaccccccccaccccagcctcccagccgggtgagatttggttgctgtgtttcctcctcacttgggcatttaaaaaatattttaacacgaattgtccgcggaattttcatgttgggctcgggtagcttcttagttttctcggtaaaaaggcgttttactacctctggtgtgaaggctgggaaatggcaagtgggaagttggttgataaaattaggagtttggctgtctttattactactttttttttttttttgctctccccatctctcattttatgaacatcgacccagttcgtcatggtttaaataaactgcttgtcttgtacctgccttaacaaaactagccatgggtcgttgggagacttagttgcttcctaggcagtttgagggcatctagggtggaaaagttaaccgagagagcgagcatctacctcactggcaggatctgggattcccaaatggaatgacacggaagctatgagattctctcgaagtcgaaacttttttccccctcccgaatgcgaagacttcctttttgcaatatttgagcagggcttcaaaaccaacctgtttttgttattaagcctgtacggtaaagaaacaggaaggagagtaccagctgtcttgctgcagtggttttaaatggagttgaatgagatgcgtgagagtggtagtagtattgagtaagattgctgcatctctttgatttaaatgcctggcctcggatccacctaactgatccctggctgcaaaaaagcttcagtatttgttgcagcaggttgttgagaaggtgattggaggaataaaaatcttaggtcttcagcgaatgctgcacaaacgaaaatgttaatggaaacctgtaagtttgtgaattgtttgttcttgaaaatattttaaatgtatgctcatttagaatatggttctaccgaatgatatccaattggaaaggtacaaacacattgaaaagtgaatctctctttcacgccaaaccctacagtttccccttctcagaggcaaagactgttactggtttttagaatatccttggtctttggaataattattttaagattttcatttgaaaccacttctgttggataccaaaagcagggaaataaaatgaacagaagaaacagaaaatgtgggaatactgtttttgctctcttaaaaaaaatgttgatagctattggaaaaagctcttcagaacttactgcttatgtcaccttatctattaataccgttaaataacaatctgtggggctttaggataaagaactctgccagggttcattgtttgtatgtacaatgaatcctctgcttgtaacatgtaaaatgatattgaacactatagctcctgtcactagaggttgcttcaggttctgcatttcaatgagcagaaatctaaattgcctgtgatcctaaattataggggcattttatgtatagatggaaatgacttaattgtccaatcagcatttgaaataagaggcatataccagcttttggcatatagaagatggggattgtggactaagcgggaggctgtaatatttctagagcagttataggaaatatttctgccataagatatttaattacaaaggctttgaaaatgtacaacttaagcatcaatagcgagatttatatttttatattttagaatggttgttttaacagcttgccaacactaacaatttgctaaggaaattcagtgatattagagctaggttattaaagattatattaaataatttaactgtattttgaaaatgattatgctgtgcatttccttctctgtataaaaattatttctaaaaagtgccacgcacctcccgagcaaataaaatagaattcagtaaggagtgaagtactgttgtacgtgagaccctttttctaggcgatatgcaaataaaaagtagtttaaaaatggttgcttactaatgtcttcttgactggtcttttgaaataagctttcttgcagggacattacattaaagataaaagctaagtgtgtctttttttttttttttttttttttttaacgaattcagttctttctgccgggctgcagtggctcaggcctgtaatcccagcactttgggaagccaaggctggtggatcacgaggtcaggagtttgagaacagcctggcaaagatggtgaaaccccttcactactaaaaatacaaaaaattagccgggcgtggtggcgagcacctgtagttccagctactcaggaggttgaggcagaagaatggcttgaacccgggaggcggaggttgcagtgagccgagattgcaccactgcactccagcctgggcaacagaatgagactctgtttcaaaaaaaaaaaaaattctgtcttgtgcattagcagtatgattctggaataattcattttaacttggagtactgtaattgaaaagtctttaaaagaaaattaaaaaataaattttagtttggacaatagggtaagatttaaaaactctgctattgtcctatcccaaattgatggttaaaataaatggctttgggtttttggttttttttttttttttttttttttttgcgggcaggggcgttttttttttttcttttctttctttttttttttttttgagaaggaaatttgctctgttgcccaggctggagtgcagcggcgcgatcttggctcactgcaacctctgcctcctgggttcaagcaattctcctgtgtcagcctcccaagtagctgggattacaggtgcgcaccaccacgcccggctatttttgtatttttagtagagacaaagtttaccatgttggccaggctggtctcgaactcccaacctcaggtaatccacctgccttggcctcccaaagtgctgggattacaggtgtgagccatcacgccagcctgcattttttaaaaactatataatttcacactttggccagaggaggtagagtacttttgaaaacttttaatttgttgcaagtttagaatgcatattagccgccagtgacttttggtctacaacagcaaatttgtcacaatttaatacagttgttaccctgtaaagctatctaggattagaaaaaaaacaagacttgttgatcatgattgaagagattacctgtagcagtttggttcatatccttggtataaatatttgttttttgcattactgagcggttaaagctctgagagcagaaaattagtattggaaatgtatgttaactttttcttatttttttctcatacttcaaaaaattgaaaaacaaggggactatattggtttggattctcaggaatagctttgagattgagtgctgcagtaaaatgtaggcattttctcctttttttttttttttttttgagacagagtctcactctgttgctcaggctggagtgcagtggcatgatctcggctcactgcaacctctgcctcccaggttcaagcgattctcgtgcttcagcccctgcccgagtagctgggactaccggcgctcgccaccatgcccggctaatttttgtatttttagtagagatggggtttcatcgtgttggccaggctggtctcgaactcctgacctcaagtgatcctcctgctttggccttccaaagtgctggggttacaggcgtgagccaccgctcccggcccattttctcccattttatgagtgcttcttggggttggggaggggttacaaaataaacacttcagaattaaggtggaggaggggctttgtggtaatgaggcatattccatgagtttggtcatgtttttactaggtaaattcattttgtctatcatttttctgagagggtttctgggagaagattattttaggttaaagatgcaatttatccagagcctaactttattttcagccccctaacaaattatggaattgaatttaattgcctttccctttcctaccttctggtggagagtttttaaatgaacaggaaaatggccagaaaatacacagcaggagtaggatgggagacctgcagtgtgtagaaggccgatttatccacaaactggataatcttcttaggctgcatactgccagtaccaaactttgttagcattaactcagtttggtaggtactgccagcctaggtcagtttacagtggggggcagtaatagggtttatttaactaactgtgtagtaaactttgtggcctaaaggcaaaggaaaggagtcggacctgactggcaaacaggttttacccatttaaagtaatattccaagagcaaatggactagtgtctattttgtttggcttttaaaatatttttgttaggaacatctgtgtctttttttttaaattttctgttaatttttttattgatatgttctaggaaagggtgtgacatttttcatctgttattcctatgaaaaggtattctgttgaaatgtttaatttccttggttagaggctatgaatgagggttatgcagcttcactttttggaaaccagggtgactagattactgaatttaactattgattagccacataatgatgaaaagggaatcttggcctgggtatcacacagtaatggataatctgcttcctggggctttgctttggtggctatggcagctgagttggcgtggtagatggatagatgggaaaggactgcagaagtcagcataatcctcaattaggataagccttatggttaattgaatgttgagtgtacaggttaaatcccattataacgaactccaggggactggccaaattattttgttgtactgggattagactttattaaatattgtttaaaacagtctttttgttagaggtgttagagattttggaaaaatttccatttattgtaacaatttgacaagttgttcatgaaccttccatctttaatgcttttacctttaaaaagaaaagaaagcatgttgagctgggcagtggcagagcatgtatatcacccctccacaccatgttttgagtagctcttggtttatgtcgacaacctaattagtttgttagtaagtactaccaccatctaagtgtggtcagaagaatgggaaattccccaggtttgcaggtgactggtgctgttaattttttctgtccccaacaacatgtatatatatttttaaatttaaccctgatccttagagcacccaacaactttttgttgttgttgttgttgttgttttgagatggagtttcactcttgttgcccaggctggagtgcaatggcacgatcttggctcactgtaacctttgcctcccaggttcaagtgattctcctgcctcagcctcgtgagtagctaggattacaggcatgtgccactacacctggctaattttgtatttttagtagagatggcggtttctccatgtgggtcaggctggtctcgaattcccagcctcaggtgatctgcccgcgtcggcctcccaaagtgctggaattacaggtgtgagccaccacgcctggccaacaacttttaaaaaataaatgaatatacatcattttagtgtgaaatttaagtcagtaataattgacttagcccctttctcctcagctatcaatgtaggttgagatttttaggtctataaattgtattgtttaaaaaaaagggatagtaatgatgtagtttttaacttcgtgatactatccatataaatatgaaaattttcagaaacaagcttaatttatatacatataagaaaaagactgttcttatgcttggccagaaatatacttctttctgtcctgtacttttattaggttggtgtttgccaagcttcaggcatttacatcccaccttcatatctaaggctagcatttttagtttgtttagagaatttggattgggtgcagcaagacatttttgaagtcattcttttaaatagatgttccatgaaggagggaaaatctgaaagaaggaatttcaaagcaacccaagcagtgttttgaaaattctcaagactgaagaataatgactgactagtaggcaggaagcctgcagttgtattgtggtattgttcctccatctcatgcatttgagaactttagtacaaaagaagagaaagcatggggaggggaagaaagggttttaacaaaaaagggggcacttttggagtaaatattctttgcccttctgtttaaatgaaatctaaagccatattattttactttgaaagaaaatgtgtatcataatagaaatgtcctaaactgacatttttataaatgaaagttaattgctgttggtggaaagagcagcatgatcatatgttcagtttcaaaacagaactttgattaaaaagaaatctacatgtgaaaacctttttttcctttttggtacctgatcaatatattttgttagcttgttactttgaaaagaagacttacctagggcagagttcagaataatttgtaagcatgtgctataagctttggacaaatcaatctctcttggccagtttttaaaattttaaaacaaagggtgctctgtatggttttccaaggttccttattttatacaattctataaacttaaggcattatgtagatatgtacaatgctcttttacttaaattttgttgattgaacataaatgaattaagctctttataccagataaccgtgtgaagttagatgcagctttcagtgctgacttataaagaatttagaggctgggtcccatggctcacacctgtaatcccagcactttgagaggaggatcacttgagcccaggaatttgagaccagcctgggcaacaaagtaagatcctgtctctataaaaaataggaaaaaaaaattagccgggcatggtgatgtgcgcctgtggtcccagccgcatgtgagactgagctgggaggatgacttgagcccaggaggttgagggtgcaatgagctgtgattgtgccattgcacaccagcctgagtgacagagtgagaccctgtctcaaaagggactttaatcgcctgacttcatcacagtatatgctataactgggtaaaagtgtgtgtgtgtgagagagagggattttcagtcccctccttctcgtgtaagaaaagcaagtgttactttctttactctcagtgaaattgctgtcgttgaaatggattatttaagtcatcttgtggagtagctatatcagcttgagtttgtttccagattgaaatttggcaattttggggctgagtgcagtggctcctgcctgtaatcccagcaatttgggaggctgagaccagagacttgcttgagcctaggagttcaagaccagcctgggcaacatagcaagacccccccatctctattaaaaaaatttggcaattttatttgaaaatgttataagagttactcagtactgtttatcaaattgtccctttagtctactacacactctgtgttccatcccagctcatctatttccttttacttgcttggtggtaattgtgttttatgacaatgtgttaatctcaattgaggtagttgtcttcaccgcagttggaacagtagttgactacatataggaaaatctaccagtgaagaaactccaccagtgagaaaaataactctacacatcttgcatcattggagggtcagtgatatctttgtcatataataagacaggactgttaccatattaagtttaaaactactttcatcaggaatcaataaaatggaatccagaaagcgactttaaacgtacacagtcatggccaggagtggtggttcacgcctgtaatcccagcactttgggaggccaagatgagtggatcacgaagtcaggaattggagaccatcctggccaagatggtgaaactccgtctctactaaaaatataaaaaaattagctgggcatggtggcgggtgcctgtaatcccagctactcaggaggctgaggcaggagaatcgtttgaaccctggaggtagaggttgccgtgagctgagatcgcgccactgcactccagcctgggtgacagagcaagactccatctcaaaaaaaaaaaaaaagtacacgatcatatctagaatggtagaagccttgagtgtatgggttctaagatttggcaaacctgtaagcatgaacttgcccagtaaccttcagtttcccttttctttcccccaaatcacaatatagtcatccacatgggacttttaaaaattaattcaatttttggagagggtcttgctctgtcatctaggatggagtgtagtgtcaccatcacagttcactgcagccttgacctactgggctcaagcggtcctcccagcgcagcctcccagtagctgtgactacaggcacatgtcaccactcctggctgatgtttttaagttttgtatagaaggtgtgtctttggctggtcttgaactcttgggatcaagcgatccttctgccttggtctcccaaagtgctgggattacagatgtgagccatcgtgcccagtatagtgagttttcttaaacttagttttcataccactcttctaagtcttgaggccttaaacttcaatcatctttaatttgctgctgcttggttgttgttgcctactcttccatgcacagacatacttaatcagtgattattatgcctttactatttaaggaactgtgagagttaacaaagtttgtgacctccaagtgtgcacaatcaatcaggtactcatatcacttcagtacaaggcaatcagtgataagtcggttttgcctatagagattgtagagaagttcagaggaggcaagggactactactgatccaggccatcagggtacagcatgttgaagaataagatttaaacattttctttctttctttctttttttttttttgagatgggggtctcactgtgttgcccaggccagagtgcagtggcatgatcatggttcactgcagccttgaccaccagggctcaagcggttttcctgcctctgcctcccaagtagctgggactacacgtgtccaccaccatgcctaattttttttttttttttttttttgagacagagtctctctttgtcacccaggctggagtgcagtggcgtgttcttggctatatagatatatagctgagatatgtatctctctcgagatatatatatatatatatatatatatatatatttctttttttttttgagacggtcttgctctgtcacccaggctagaatgcactggtgctatctcagatcaccgcaacctccacctccccggttcaagtgaatctcctgcctcagccacccgagtagctggggttacaggcagcactaccacgtggacccagctaatttttgtatttttagtagagacggggtttcaccttgttggccaggctgatcttgaactcctggcatcatgatctgcccgtctccaaaataaaataagtgggaactatgctacacatggacatattgtgtggaataatagacaagagactaggaagggtgaggagggggatgatgagagattacttaatgggtacaatgtatgtgatttgagtaaatgatgccctaaaagtcctggcttcaccactaggcaatctatgcatgtaacaaaattacacttgtaccccataaatttatacaaattaaaaaaaatcaggctgggtgcaggggctcatgcccataatatcaatactttgagaggctgaggcaggaggactgcttaaagccggaagttaaagactaggctgggcaatatagtgagaccccatcctatgaaaaaaaaataggaaataataaaataatttttacaaaaaacaaaatataaacacaaaaaaagtttttcttctagaaaaaataactaatttacatctcaataagataaaaacaatccaacttaaaaataggcaaaagagactggaccccgtagctcacacctataatcccagcactttgggaggctgaggcgggcggatcgtgaggtcaagagatcgagaccatcctggccaacatggtgagacaccgtctctactgaaaataaaaaattagccgggcatggtggcacatgcctgtagtcccagctactcgggaggttgaggcaggagaattgcttgaacccggcaggcgaaggttgcagtgtgccgacatagcgccactgcactcgaacgtggcaacagagtgagactctgtctcactaaaaaaaaaaaaaaaaaaaacacaaaagatatatacagagacttcacagaaaaaaggtacaccagtggcaagtaagtacgaaaaaagatgctcaacatcagccattagggaaactgaaaactacaatgagataccactatacactcactatgaggggtaacattaaaaagactgaccataccgtttgttggtaaggatgtggaacaactagaactgtatcatacgtggatacatggctaggagaaatgtgaaatggtacaatcactttgagaaacagtgggcagtttctttaaatttgtaaatattggctgggtgcagtggctcaagcctgtaatcccagcactttggaaggctgaggtgggggatcacttgagatcaggagtttgagaccagcctggccaacatggcaaaacctggtctctactaaaaatacaaaaaattagccagatgtgatggtgtgtgcctgtaaccccagcttctcaggaggctgaggcatgagaatagctgaggcatgagaagagcccagaaggcagaggttgcagtgagccgagatcccaccactgcactccagctggggaaacagagcaagactctgtctcaaaaaaattaaaaaaaataaaataaacttgtaaatattatacacttagcatataacccagccattctacttctgggttccccccaagagaaacacaagcttaggtccacacactaccctatacacaaatacgcagagaagctgcttacttaccatcaaatacatatgaggatatttacttccagttttgtttgaaataatatgaaactgaataaatcatgatataaccatacaatggaatgcagtgtaattattagaaatttctaagcaactattagccgggcgaggcggctcaagcctgtaacctcagcactttgggaggctgaggcaagcagatcattcaaggccaggagtttgagaccagcctggccaacatggcaaaatgcggtttctactaaaaatacaaaaattagctgggcgtggtgacacacacctataatcccagctactcaggaggctgaaacatgagactcacttgaatccaggaggcaaaggttgcagtgagccaagatcgcgccactacactccagcccgatggagcaagactctgtctcaaaaaaaaaaaaaaaaaaaaaaaaaattataagcaactgtaaatcaaactgatatgaatccttccccaagatcatttttaaagtatgtacagtgcaaagcagggctcttgagtgccagttacttaggtgtgttcattttataacaatttagcaagctgtacttgtgcccttccataaatatattatacatcaatttaaagtttgccaaaaatataggcgaaatgcttaaacttaaaaactttaaactatatgcatgtatatgtacctagactagggtaacaatggttccagggcagggaaggaggcagctaagaaaggacggccactgtataccctctgataacttttaaattgatctgatgtgtacctgtaatttatttcaaaaagtattttcttaactgagaccatttgcaactctctttaagtcaacattttcttttttttttctagtatcagaagattttatttttttacttttatttttttgaattttttttttaatttatcaacattttcttaatatagaaataaagtagaggcagagatggatttaggtccataacagttcttcataacccaatttcaaattttctacatatcacaacagtctcattctcactacttttataactgaaaaaacagtataaatttcaaaaataaacttgtaacaaatctttttttattttttttgagacggtctctgttgcccaggctgcagtgcagtggtacaatcttgactcactgaaatctccacctcccaggttcaagcgattctcatgtctcagcctctggagtagctgggtgtataggcatgtgccatcattcccacctaattttttttttgtatttttggtagagattgggtttcaccatgttggcctggctggtctcaaattcctgccctcaagtgatctggcccacctcggcctcccaaagtgctgggatcacaggtgtgctgtttttttgtttgtttgttttgttttgttttttgctttttttttttttttttttttgagacagagtcttgctctgtcacccaggctaaagagcagtggtgcaatctcagctcactgcaacctccgcctccagagtagctgggattacaggtgcctgccactatgcctggctaatttttgtatttttagcagagacagagttttgccatgttggccaggctggtcttgaactcgtgactttaggtgatgcacttgcctcagcctcccaaagtgctgggattacaggcatgagccaccacacccagcctcttgtattttaaatagtgttttgtataagatttcatttgtgttaaaaaaaaaaaattctacagcaaaagaggtttgaaaaaccgggactatgaatgatataatgtatattaagcatttaacactgcccagggacagacacacaaatagtaacttttaatagctatatatatatatttaaaaaaaatttttttttttgagatggagtctcgctctgttgcccacctggagtgcagtggcacgatctccgctcaccacaacctccgcctcctgagttcaaacaattctcctgcctcagcctccccagtagctgggactacaggcgcgcaccaccatgcctggttaattttggtatttttagtagagatggggtttcactgtcttagtcttgaactcctgatgtcgtgatccacccccctcggcctcccaaagtccaaagtgctggaaatacaggcatgagccaccacacccgagctttttctttctttcttttttttttttttttttcttttttttaagacaggtcactgggtcactctgttacccaggctggggtacagtggcatgatctcggctcactgcagtctgccttctgggtttaagcgattcttatgcctcagcgtactgagtagctgggactagaggcatgcaccaccactcccagctaattttttattttttagtagagacgggatttcactatgttggctggtcttgaacttctggcctcaagtggtccgcccacctcagcttcccaatgtgttaggattacaggcgtgagccactgccctcagccttaataccaatattatcatcaatcaataagtggtagcttttctgtggtatatccagacaatggcatattattcagtactaaaaagaaatgtgctatcaattcatgaagagatgtgaagaaaactttaagttttcacttagtgaaagaagccaatttggaaaggccacatactgtgtgattctaactatgtgacatcttagaaaaggcaaaattttggaaacactagaaagatcagtggttgccaggagttagtggggaggaaagaatgagtagacagagcacagtactcagggtagtgaaactactctgtatgatagatactataatggtagatacatgttgttataaattgttccaaactcataaaatgcacgataccaggagtaaactctaatgtgaactacacactctggatgataatgatgcctcagtgtaggtacaaatgtatcaagatggtggggggatggtgataggggaggctacacatgggtttgggcaggaggtatatggcaaatctctgtatcttctgttcaatattgctgtgaacctaaaacgcctctaacaaaataaagtgttaaaaaataaatggcagcttttatcttttctacccaggaataggaactgaaatatagatcaggacacagggaagagaattttattggaataagagggtagaagacagagcaagggtctagactatcaagcaactgacatataaataagatacacacatagaattagaaagatggtggttgaaatgaaaattaatagtcagattatgaaaatctttgggagctccatgtgaagtttagtttcgaattttagacaataaaaaacaaaggttccaagcagtcaagcaggctgggtgcagtggctcaagcctgtaatcccagcactttgggaggccgaggcaggcatatcatttgaggtcaggagttcaagactagcctggccaacatggtaaaaccctgtctctacaaaaaagtacaaaaataaaattagccaggcatagtggcacacacctgtagtccaagctgctcgggaggctgaggtgggaaaattgcttgaactgaggaggcagagattgagccaagatcacgccactgccctctagcctgggcaagagtgagaccctgtcttaaaaaaaaaaaaaaaaaaatttgctgggtgcagtgactcacatctataatcccagcactttgagaggcctagacggatgaatcacttgaagttaggagtttgagaccagccagcatggtgaaacctcatctctactaaaaatacaaaaattagccagtcgtggtggcacatgccagtaatcccagctactcgggaggctgaggcaggagaattgcttgaaccttggaggtggaggttgccatgagctgagatagcaccactgcactccagcctgggtgacagcgagactccgtctcctccccaaaaaaattaccttataatattttttactataacgaaacagtacagagtaaaaagagatgagaaagagaagaaactgaagcagcagttaattccctttagatctattccatcttcttcaagtattcgctaataatcccagttgaaaaggacttttcttcctctgaacttgtgaaccacctgcttatgttgatgcaattacattttcttctttttttcttttttctttttctttttttttttttttttgagaaggagtcttgctctgtcgcccaggctggagtgcagtggtacgatcttggctcactacaacctctgccttccgggttcaagtgattctcctgcctcagcctccctagtagctgggattacaggtgctcgctactacacctggctaatttttgtatttttagtagagacgggtttttgccatgttggccaggctgttctcgaactcctaacctcaggtgatctgcctgcctcggcctcccaaagtgctgagattacaggcgtgagccaccacgcctggccaattacatttatttttcaactagattataaactcctagatcacaaagggattctaacagtcacattacttagcacaattctttgaaaaacagtggtactgaataaaaacatttaaatgatgtaaagaaggatcgtccagtcctagggcaatttagaaaacatggaatgtactctaaggctgatatgattttcctgggacaactctgtgagggagacacaggtcccaagcaaatccctaggaatatttaattttaactccatttccaggtagaaaaactgactcgagggttgaattctaaaaactttcacatccaggccagccatgatggctcacacctgtaatcctaatactctgggaggtcgaggtgggagaattgcttgagtccaggagttcattacaagtctgggcaacatagggagaccccgtctctgccaaaaaaaaaaaattagctgggcatggtggtgcgcacctgtaatcccagccactcaggagactgaggtgggaggatcgcttaagtccaggagttccaggctgcaatgagccatgatttcaccactgtactccagcctgagaaacagagggagaccctgcctcaaaataaataaattaaattgggggaaaaaaaaagaaacataattgaaaaaaataatagaggattttctttttctgttttttttttttttttgagacagagtttcgctcttgttgcctgcccaggctgcagtgcaatggcatgatctcggctcactgcaacctccacctcccgggttttcaagagattctcctgcctcagcctcccgagtagctgggattacaggcatgcaccactaagcctggctacttttgtatttttagtagagatggggtttcaccatgttggtcaggctcgtctcgaactcctgacctcaggtgatctacctgcctcggcctcccaaaatgctgggattacaggggtgagccaccatgcctggccaatagaggatttttaaagcttataaaaggattactccttaccttcaagaaatagacaatttgaatccacgctaccaatcaagaagtactgactcacatgcacacgaacaattaagattcatctaagaaatgactggtgcggtggctcacgcctgtaactccagcactttgtgaggccgaggtgggtggatcacttgaggtcaggagtttgcaaccaacctggccaacatggtgaaacctcatctctactaaaaatacaaaaattaggtgggcgtggtgacgggcacctgtaatcccagctactcaggaggccgaggcaggagaatcgcttgaacctgggaagtggaggttgcagtgagccgagattgtgccactgcactccacactgggtgacagagcgagactccatctcaaaaaaaaaaaagaaaaagccaggcacggtgggtcacgcctgtaatctcagcactttgggaggccgaggcgggtggatcacttgaggtcagaagatcaagaccaccctggctaacatggtgaaatgctgtctctactaaaaatatgaaaagccaggcgtggtggcgtgtgcctgtagtcccagttactcaggaggctgaggccggagaattgcttgaacctgggaggccgagactacagtgagtcaagactgcaccattgtactccagcctgggtgacagagcgagactccatctcaaaaaaaaaaaatgatatttttagttttggtgttctggtaatttacctacattagatggtacctgagatgggcccaacaactagactagaaagcagtggagaaacaagggagaagatggagaaaaaacagtatgtctgaaaccaagggaaattagtctgaaagactgataaaaagacggtgattaagaactgaatatcaggttaagaaatttggagccaggcatggtggcacacacctgtaattctagcactttgtgaggcccacttgggaggattgcctgagaccaggagttcaagaccagcttgggcaatgtggcaaaactcttgtctccacagaaaatttttttttttgagagagtctcgctgtgttgctcaagctggagtgcaatggcacaatctcgctcactgcaacctctgcctcccaggttcaagagattctcctgcctcagcctcccaagtagctgggactatatagatgcccaccaccacgcctggctaatatttgtatttttagtagaaccggggtttcaccatgttggtcaggctggtctcgaactcctgaccttgtgatccgccggcttcagcctcccaatgtgctgggattacaggtgtgagcaactgtgcctggccaaaaaaaaaaaaaaaaaaaaaaaaaaaaaggaaggctacaggttgtcagtggcctcagtgctttcgggctacacccttgtttacagtgacaacaaggtggtattggagtgttacagggtcacagagaagaccttcaattatcaattagaggttttaaatttaaatttaccctggcttttaaaggaacagggtacactgttttctctttactgcttctctctctgactctgtctctctctttctctctttgactccctctttgtctctctgcctctctctctttcctctgctggtctttccctgcctctgccagccacttatgccgctgttctcccctctccttgcccttcccctaggggaggaaccggcaggagtggagctactctttcttcccctgagaagaaaggaaaggggagttctgaatattttccttactaccggaggtttgtgtgaggttcaaccccctgaaatttgcggaaggctcaacccctcaaaccagtggtgtcttgtcttggctttcctggaagactcaacctctcaaaccagggatgtcttgccttgcctgccctggaaggctcaaaccctcaaattagggatgtcttgtcttgccttgcctgccctggaaggctcaaaccctcaaactagggagtgtcttgccttgctgccctggaaggctgacctgtttcctccctttccccctctgaaggtcctttgcgctcactgaacttgtgttgtcctctctggctgctcccctgagggagaattaggcccctcttagcgttggtgtgctggtataaatcccacggcaggatctgccctaagccatatgaggtagctatggaacgcagagggcacccactcactctgtccagcagtaggacttgtcatcatctacacgaacaacaccgcaagtacggttgtttgtgatcattcacgcacatacacatttagcccttcagaatttgaccaccaaggaagtactctaccggctcccacggcttctccttccttggtgtgtgcacagagtcgtcgccgcagtatgtgaagatcttttacctaggttgctggccagtttctttccgccttgctgagagctcagcttattcgtcgcactgcgtgggtcctgatttgtcacccctgaggccgccacaagggggcggggtgcacctcctcacaagagagaaccagagaccgcccccggaggggaatgtaatcacaggcaagcccccaaatttgtataaagtttcggtgccacaaaagaaatagcactcgaatataagattttctttttttttttctcagcaaggcaatttactcttatagaaggatgcaccttcacagatggagcaatggtgagcgcacacctggacaagggaggagaaggggttcttattcctgacgcacgtggcctctgctgctgtgtcgttcccctattggctagggttagactgcacaggctaagctaattccgattggctaatttaaagaaagtgttggggtgagtggtttggcgggaaaaatggctgtggcagagcaggaaacaggaatgagtcaagatgaacaatgagtcagggtggagcaggtaatcagaataagtcagagtggaacaggtaatcaaaaaaggttgctctacagggaagttaagtttaaaagtagaaggcaaagaattgaacatactgacatattctttgaagagaaatttagaactcatatccaacactcaggcaccataccatatagattatggaggtcttgaaatcagatagagtaattcttctaactttattccttttcaagttgttttggctattctaggccctttgcatttccatataattgctagaatcagcttatttctgtgaaatttctgttgagattttgattgtgattgcattgaatcggttgatcaatttggagagaatcaacatcttaacagtattgtgcctttgcttccatgaacacattgtatatcttttcatttatttaggtcttatttagtttccgttagcagtgttttgtagttaccattgtacagatctttttttttttttttttttttttgagacggagtcttgctgtctcctaggctggagtgcagtggagcgatctcggttcactgcaagctccgcctcactggttcacgccattctcctgcctcagcctccggagtagccgggactacaggtgcccgccaccacgcccggctaattttttgtatttttagtagagacggggtttcaccatgttagccaggatggtctcgatctcctgacctcgtgatctgcccgcgtcggcaaagtgctgggagtgctgggattacaggcgtgagccacagcgcccggcccttttttttttttttttttgtggttttaaggagagagtttaataggcagaaagaaagggagaagacggaagaagctcccccatacagagacagaaggaggggggctccaaaaccaaaagaggaagtccccacctgccacagataccagccaggtatatatgcagcggctggaggaggcagtgtttgatttgcatagggctcgggattggtttgactcaacaaatcattcgcgtagcccgtgaaaaagctgaccctcccaccctggccttttaatatgcaaatgcaggggcgctatgatgttctacacacgtggggatatgtgggggaggccatgttgccaggaacttgtggggaaagggcaagaaggctgaggcaatctccatgtttgggtggacccattttctaatggcctgcatttgcatatcaaaggttgttggcctggctctaagagctgaggctttacgagaaacttttccagagatgctttaaaaaaaaaaaaaacgagcccggcgcggtggctcacccctgtaatgccagcactttgggaggccgaggtgggcggatcacgaggtcaggagatcgagaccatcctggctaacacagtgaaaccccgtctctactaaaaatacaaaaagccaggcgtggtggcctacacctgtagtcccagctactccggaggctgaggcaggagaatggcataaacccgggaggcggagcttgcagtgagccgagatcgcgccactgcactccaggctgggcgatagagcgagcctccgtctcaaaacaaaacaaaaaaccacgaaaacttcccaaggaccccttttcctataacattatcccctgtggagatgccacactaactgttagggggttttgggcgatgactctttctggctacttcctgctgaaaaggggcgtggaatgggaaacagcagctagggctccttctggggttgatccaagggtcttcggaggaatggctggcctgtccatgtgtggttcagtttatggcaccatttggagtttgattgcttctaggcgagaagaaatatttcgagtgatagtattaactatacggggtccaaatattagtacaagacgtataagcaagagagtgcttagtaaaggggttaaccaattccataaagaagactggaatttattaaagaggggttgtagccacttggagctgaatctggcattttccctgagcctgtcaataattttgatttttaagtacctgtagattttcctctactttactagaggtgttaatcccaaagcagcatgtttcgtttaaaactgctttactaaacccaataaaaagtcctagcggactcagcgatagtgaaactttcatgcttcctttttgtcaactattatccctgctataaggataataattaagcaaaatattacagcagtggaaactctctaatatttcagttagaaggtgctaccatgtataaccctattgcaaatagtagagtgaggacagcaattcccacaagtgtggtattttcatagcccatgctaaagcatttacccatagaagaacggttccggttaacttctgaacttaaaatcgccttactaattaagtaccatcttaataggagccagaatagatggcttaaaggaatgtaggaaccgaatggtcattttcctgtcagtgggacaatattgagacaaaaatttgtctacggaagacattttactcctgttaaaagcagaaacttcctgttcccagaagaggcctacagcctgatttctactaggtggcttaggaataccatgtgtttgccagaatgtagagagagagagacatttattgaattactgcctgccgtgattcacaatcttttctaacatacctgtttccctgaactgtaaagactcctgcatgttagacacacggagagagggtaagagaccgaggatagaaagagaaagaaagtttggcgacagggtagctggaagagagccttgaaattaaaggacagatttaaagttgaaatccattccatacccaccactctgatggttgaatttcctttcctggcccatgcaccaaaatgatacggctctaatgagtgggggaacaccagggttcttggtcctcatgccagtttagataaaatgacttgggcacacgtggagtggttttaaggagcagaaggtttaatagataagaagtgaagggacaagtgaagggagaagacagaaagaggaagctccctggtacagagacagagggagggggctccaaagccaaaagaggaggtccccccagtatacagatcttataaagcttctgtcagatttatcagtaagttccatatatatatattttttgagatggagtcttgctctgttgcccaggctggagtgcagtggcacaatctcggctccctgcaacctctgcctcattctcctgctgcagcctccccagtagctgggattacaggcatgtactaccatgtccagctaatttttgtatttctattttattttatttatttatttatttttttcttttttctttttattgatcattcttgggtgtttctcgcagagggggatttggcagggtcacaggacaatagtggagggaaggtcagcagataaacaagtgaacaaaggtctctggttttcctaggcagaggaccctgcggccttccgcagtgtttgtgtccctgggtacttgagattagggagtggtgatgactcttaaggagcatgctgccttcaagcatctgtttaacaaagcacatcttgcaccgcccttaatccattcaaccctgagtggacacagcacatgtttcagagagcacagggttgggggtaaggtcaccgatcaacaggatcccaaggcagaagaatttttcttagtacagaacaaaatgaaaagtctcccatgtctacctctttctacacagacacggcaaccatccgatttctcaatcttttccccacctttcccccctttctattccacaaaaccgccattgtcatcatggcccgttctcaatgagctgttgggtacacctcccagacggggtggtggccgggcagaggggctcctcacttcccaataggggcggccgggcagaggcgcccctcacctcctggacggggcggctggccggacggggggctgaccccccccacctccctcctggacggggcggctggccgggcggggggctgacccccccacctccctcccggacggggcggctggccggacgggggggctgaccccccccacctccctcccggacggggcggctggccgggcggggggctgacccccccacctccatcccggagggggcggctggccgggcggggggctgaccccccccacctccctcccagacggggcggctggccgggcagaggggctcctcacttcccagtaggggcggccgggcagaggtgcccctcacttcccggatggggcggctggccgggcggggggctgacccccccacctccctcccggatggggcggctggccgggcggggggctgacccccccacctccctcccggacaaggtggctgctgggcggagacgctcctcacttcccagacggggtggctgctgggcggaggggctcctcacttctcagacggggcggttgccaggcagagggtctcctcacttctcagacggggtggccgggcagagacgctcctcacatcccggacggggcggcagggcagaggtgctccccacatctcagacgatgggcggccgggcagagacgctcctcacttcccagatgtgatggcggccgggaagaggcgctcctcacttcctagatggcatggtggccgggcagagacgctcctcactttccagactgggcagccaggcagaggggctcctcacatcccagacgatgggcggccaggcggagatgctcctcacttcccagacggggtggcggccgggcagaggctgcaatctcggcactttgggaggccaaggcaggctgctgggaggtggaggttgtagcgagccgagatcacgccactgcactccagcctgggcaccattgagcactgagtgaacgagactccgtctgcaatccctgcacctcgggaggccgaggctggcggatcacttgtggttaggagctggagactagcccggccaacacagcgaaaccccgtctccaccaaaaaaatacgaaaaccagtcaggcgtggtggcacacgcctgcaatcgcaggcacttggcaagctgaggcaggagaatcaggcagggaggttgcagtaagccgagatggcagcagtaccgtccagcttcggctcggcatcagagggagaccgtggaaagagagggagagggagaccatggggagagaggggagaggggaggggagagggagaatttttgtatttttagtagagatagggctttaccatgttggctaggctggtcttgaactcctgacctcaggtgatccacctgcctcggcctcccaaagtgctgggattacaggcatgaaccaccacatccagccagttccatattttttaatgagattataaatagtattggattttagatttcaatttgaataatttattcttagtatatagcaatacagttgatttttgtatttttgcctaatatattataactttgctaaattaattttagtagcttttatgtagtttgcttaggattgtatatataggtgatcatgtctgtgaataaagacagtttaattccttcccttccagtcagcataccttttttttcttgctctattgttatggcgagtacttctagtacattgttgagtagacatctttgttttgttctcagtgttcggggtgaatattaagatgttatgggtctgctgatctgctttgtattagtatagtattgtttctagaatttcatataaatcccatgtaatcataaagtatgttgtgtcagcttcttttttttctttacgtatattttgttgctgttgttgtgtcatacttcttttgcttagtctaattccctgagattcattcatgttgttgcatatatgagttcttattttgtttctgagtatgtatatagtatatagacaatacatatgggcagtttgtttatttaccagttgagcaacatttcttagctattatgaatagagccgctgtgaacatttgaatacaaaccttagcgtgggcagaaggtttcattttcttggacaaatatctaggaggtggaattgctggatcatatggtaaatgtatgtttaactttataaggaactgtaaaactgtttacctgtctgttccattttgtgttctcaccagcagtatagccaaatttcagttttgtaacctcaccaacacttggtattaatattctcctatgttttagccattctggtagatatgtagtggtatcccattgtgattttaatttgaaatgtcattcagcttctttggtgaagtgtctgttcaaatcttttgcctccttttcctttcctttttcttttctcctcccccttctgttttgaaaatcaggttgcttttctgttactgaattcttagaaaaaactgagttcttaggaaaaaaactcatttttttaaatgttctcgatatccatcttttattagatatggtttgcagatattttctcccaggctttgttggtacaattctaattgatcagctgagtctctgtagtaatgctccatttcttggtcatatgtatattttgaggaataacaagtgttttaaagctcaaaataacagttatgctaacatatactataagctgcattctttaatccatatatagggaaagaaaaacctagattgttaatccggaacatttacattcttaaacatagtaaattgtctactgtacttaactatgttaaatacttttaaatggcctagagcttcatctttttatctaataaaaatgaataaataattccttgtctgtttcattatttattattactaactaaaatgaaaaactatgaatatattggtctggtataaacctaatgaaaagttgccaaaataaaaaaacacttaatcttgcctataagcttttgccattgttccctctctaaccctcactgaaaaacccaatctttatggcttacctctattagtatacaatatattacttttgcatcaagtatatacacatactgtcttgtctttttgttctttctatgcgtaactgttctactgacttgaattaggttttgaatgcttgctgtgtaagctgatgagaaaaaaaaatcagctttacaatgtgatatttgtcacatttagcaattatattaaattattgtaacactatattacctaagtatctacctggacacttttttttctttttctttttgaaacggagtttcgcttttgttgcccaggctgaagtgcaatggtgtgatcttagctcactgcaacctccgcttcctgggttcaagcaattcttgtgcctcagcctcccaagtagctggaattacagccaccacgtccagctaattttgtatttttagtagagaagggggtttctccacgttggtcaggctggtctcgaactcccgacctcgggtgatccacccgccttggcctcccagagtgctgggattacaggcgtgagccactgtgcctggctggacacttttttttcttactcagggtgatactcaactcaatttatttatttatttaaaaaaattttttttctttttttttttttgagatggagtttcactctagtcccccaggctggagtgcatctcagcactgcaacctctaccttttgggttcaagcgattctcctgcttcagcctcccaagtagctgggattgcaggcaccaccatgcccagctaatttttgtatttttagtagagatgaggtttcaccatgttggccaggctggtctctaactcctgatctcaggtgatccacccaccttggcctcccaacgtgctaggattacaggcatgagccgccgtgcccagcatctaaaaaacttttttgagacagagtctttgtcgcccaggctggagtgcagtggtgtgatcttggctcactgcagcctccatctcctgggttcaagtgattcttgcgcctcagcctcccgagtagctgggaccacaagcgcatgccaccacacctggctaatttttgtatttttagtagaggtggagttttgccatgttggctgggctggtctcgaactctgacctcaagtgatccaccggctcaacctctcaaagtgttgtgattacaggcgtgagccactgctcctggccttacctcaatttatttaacagtcccctcacccaaatgtgaagatgataaacaattctttcctgtctgaattattctttctctcatgctggaattttggaacattttacaacttacatttaagaaggctagtttaaaaagaaacagtggaaatttccaccttttaaaaaaacttaatttctggtctattaactgctttgcaggaagaaagaaatatgaagaagaaccgcagacattctggatgtcagcctgtgaaattttccactatttcccataataacatgcaggcacgcttatactgctggattcattgcaactgcagttgcactctgagtggaatttgaagctactcttatcagtgataaaatggcatgtagcttttaatgagcagtgcatatattttcacatctaaggtattgtatgtttgtttcatctctgcctgaatagtgtggccataaacactgaaattgtaaaattatttttaaaacttctgattccaaaattcctgattgtttcaaatggttttgattgttttatttcagtagattatgtatctgagaagatatataatcatccttttagttacagtgctgcatacataaaattttacagggttttatacatacagaagaatgatgagaaaattaaagttttaaaaggatttgtatagaggagaaaattgagacaaagttttaaaaagatttgcatagctcagtattttggtttgattcaataaatttttaatgatttaactttttttttttttttttttgagacagagtcttactctgtcacccaggctgtagggccgtggcacgatcttggctcattgcaacctccgcctcctgggttcaagcatttcttctgcctcagcctcccaagtagctgggattacaggctcccgccaccatgcctggcgaatttttgtatttttttagtagagacaaggtttcaccatgttggtcaggctggtctcaaactcttgccctcaagtgatccacctgccttggtctctcaaagtgctgggattacaggcgtgggccactgcgcctggccaacaattttaactattttaggttcctgttaatcttttaaaatgtcagtagactttatattaaaattgatgctgtgtttttgtttggctccttgaaatttaaaggcaaacaaggtgttattatccaacttttctaatgatgtaagtccaggtttcctagatctgtaaactggcgtagcagtagggtgaagagtagattacaaatacattgtaattatctaccctgtttcatctttcatctcttccatggctaatgcctaacattggtattaaggaataaaattgaggaatttggctgggtgcggtggctcacacctgtaatcccagtactttgggagactgagggcaggcagatcacttgaggtaaggagttcaagatcagcctggccaacgtggtgaagccctgtctctactaaaaatacaaaaattaaccgggtttggtggtggtcacttgtaatcccagctactcgggaggctgaggcagaagaatcgcttgaactcaggaggcagaggctgcatgcagtgagccgagattgtgccactgtactccagcctgggcgacggagcgagactatctcaaacaaacaaacaaacaaacaaacaaaaagaaattggggaattcaagatatataaatgaacctttaaactgcacttttgcagagaggaatttaagggttcaaagtgatgaaacagatgtattacagatatctttctgtgtttttacacttgcacatcactgacattttggaagtaaagccatattaatgcagaagtatatctcttctggactgttgggctagatttgagcaagaataatgttgtgacataacagtgttctccatcccttccctgtgatctgctcctcccttgtacagtctcatccttcctcttgacctttcctgtatctataacttttctcttgacctcttcatgcacttccccttctcagctttcctccagtctgcaactgtcttatcccttccctcagcctaaatttccgtctggcttgtaacctttttacctctgtcaactttccatccttcaggtccctcactttttctggtttctcactgttaaccaaggtcttttctttacctttggaagcttctttactgcgtgtgttctctgctcctgtcagattgatttttgtttagtccttgacccctcaaacgtgtacatcctcacaccctccaaaatcctttaactttcatttcttcttccatgctttaatttattctgcaaaaatttattgagtgctagccatgtgttgcctattccttagatgttaggaatataccagtgactagaaaggttacggaaaaaaaataaaactttgtagggggggacttgtgtgtgtgtgtgtgtgtgtgtgtgtgttgcagggtttacgttttagatatcatggtaagttttgctaagtaagtgatacttaaacaaggacaccaggaagtaagtaagccctgagaatattgggttggggtaaggttgggatggggagctttctgtttagagggaactaccagtggaaaggccctttgttaggagcattcttagtgaatttgaagaacagcaaggtgaccagtgttttggagcacagtgtttggaggacagtgaacaaagacgtaagtagcaagagaaatctgagaggtaacagtgaggccttgcagacagttgtaaggacttcaactttaaaaaaaattcattttttaaaaaatagcataatagcatataaatgcatggtttccattattttctttttgagatgggatctcattatattgcccaggcccaggctggtctagaactgctgggctcccacctcagcctcatgggtagcttggcctacaggtgagtgttaagacgtgcagctaattaaaaaaatttttttttcttgtagagacaggtcttttttgctgcctagtctagtcttgaactcctgacatgaagcaatagtcccacctcagcttcccaaagtattggcattataggtgtgagctatcatacctggcttcctgcagattttttaattgtatttttggttattccaaaaagatcatttggctgggcacggtggctcacacctgtaatcccagcactttgggaggctgaggcgggcggatcacttgaggtcagaagtttgagaccagcctggccaacatggtgaaaccccgtctgtactacaaatacaaaaaaattagccacacgtggtggcgggcgcctgtaatcccagctactcgggaggctgaggcagagaattgcttgaatctgggagacggaggttgcagtgagccaggattgtgccattgcactccagcttgggcaacagagcaagactctgtctcaaaaaaaaaaaaaaaaaaaaaaaaaaaaattaaccgggcgtggtggcaggcacctctgtaatcccagctactcaggaggctgaggcaggagaatcatttgaatttgggaggcggaggttgcagtgagctgagaacacaccactgcattccagtctaggtgacagagccaggttccgtctcaaaaaaaaaaaaaaaaaaaagatcattgatttttttttttctttttccccttcaaattaaagcatttcttttttctttggttgtaaaggtgattaattcatgttcatgtggaaaacatggaaaatccagaaaagtacaaaaaaataaggattactagcaaccgcatcatccattattaatagattttgtatgtatatctttccagtctttttttctttgttcttttacacatacacagtgccttatacagtatatgggtttagcagagattaaatgaactctatcagggtcttcataagaccctccagcagtcatgtgaagagtagcctgtaagagtgcaagggtagaagcagggagagctaggccaggtgcactggctcacacttgtaaccctagcactttgagaggtcgaggagggtggatttcttgagcccaggagtttgagaccagcctgagcaacatagatcctatctctacaaaaaatgcagaaattagcccagcatggtggcaggtgcctgtggtcctagcttactggggaggctgagctgggaggattgcttgaacccaggaggttgaggctgccgtgagctgtggctatgccactgtactccagcctgggcaacagagcaagaccctgtctccaaaaacaaaaacaaacgaaaaaacaaaacacaaaaaacccaggatgacctattagaaggctgttagagtaatccatgttggtttagactatgattatggcaagagaggtgataagaagtggtcagattgtatatatcttcttttgaaggtagagccaacaggattttgtgatggtttcagtggggggggcggggggtgaagagggaagagaagaatcaagcataattcaaaagtttttggcttgaacaactagaattgtttggcttcattttcttgtcaaactacccatccaaggctcttttattgtgtccttcctgtccatttgaacttgggattctttaaaaaaaaaaaaaaaaagatttatttgctctatagagaaaccaaagcatgaacttgtgattatttctttcaccaggcttctagtttgtgctgtccaacttggtacttggtacccaccacaagatgctatatataacaagtgtttcactagcattagtctccctaactgggttgtgagcatccttttactggatcatgctgaatttgagtcttttcagggacctgtaactttctgagtacgttgtggacgttcagaaaatgtctatttattgtatgtttttcaggcttaagaataagatatgaaaaaacctcaaagtaactgtctgcttttacttt

SEQ ID NO: 653 - DNA, 23884 bp, Homo sapiens
  source 1..23884: mol_type = other DNA
ccgcctggcgcccgcccgagctgccgccttgtcgagctgagtccgcgctcccgcccaggcggcggccgacgcgacgccccgagcgcccggccccgccgccgcggcccggcaggtaagcgggcagccgcccggcccggggaacacaaggcgggcagcggggcggcgccagaagcttccaaaccgcacccggccgccgcacgtgttccccgccgggcctcgggccaggcccagccccgggcgctgctcccgctgcagcggccccgcccgggacccccgccccggcccctcggtggacggccgcgcgcgcagttccctccacccggtccgcccccactcgcgcccccacctccgcctccccggcggaccgctgacaaggccagagcgccggcactgggtcctctttcccgcaggcagcgtgcccggcctcacatcgcccctctccctccactgccccttcagggaaggaccccagacccaccaagccactcagtccctggacgaggtgcgcttcccctcctcgtagaaacgcccccagcccgctcccgccgctcaccccaacccgaggcagccaggctgcagctcgctaggtggggtcctggggtgcgggtcctcggtcctgaacggtaggcccaccgtgcctcctcgcgcggggccgcagacctgtcctggccggtctgcgagagccattttgagcggttacgttcccggaccaaacagaggtcggcctgttacatcgctaacgacactccctgctgtctcgcttgcaagtttccactcaccccggtccgtttacccatctcctcaaatgctagtttaatctgtgacctgggcaggtgctgtcctagccggtggggaagacaggaaagcgaaggacccaggcggggagcctgtccaggatctcagatagggagagccaggtccccacctctgttgggccggccacccggctggtgtttaagatgcagattaattcctgtctttgcacacagtatgcttttctgactgcatgtcacaggcagattcctgggctccacctcagggactgagggactcaggaatcggcctgtggcatgcagtccaggagggcacactgaggtttggttgctcggcttcaggtggtcaggcttacctggatgaaaagcagtggctgctaggaggagccaggcagcatctggtctaggggccgccaattcatcaccgttcccgtaaccttggcccccgctttcctcaagatcaagtctccaaccttcctgttctctcaaaaggattgttccacagagacacctgagtgttcatgaaaatgccaagccttggcccggcgcggtggctcacgcctgtaatcctagcactttgggaggctgaggcgggcggattgcctgaggtcaggagttcgagactagcctgggcaacatggcgaaactccgtctctactaaaaatacaaaagattggccgggcgtagtggtacgcgcctgtaatcccggctaaactggaggctgaggcgcaagaattacttgaacccggaaggtggaggttgtagtgagcccagatcgtgcacctggactctttggactgtgtctcaaaaaaaaaacaaaaacaaaaaaaaaacacgccaagcctagaccccaccgacgtagaaacttggtgggtgtgttgggtcaagaaattgcattccccgccaccccccgacggagtttcactgtttggcccaggctggagtgcagtggcgcaatcttggttctgccttctggtttcaagtgattctcctgcctcagcctcccgagtagctgggattacagggaccgaccaccacacccggctaatttctgtatttttagtagggagggggtttctccatgctggtcaggctggtcttgaacttcctgacctcgtgatctgcccacctcagcctcccaaagtgctgagattacaggcgtcagccactgtgcccagccatcatattcttaaaagtcaagttaaggttgttttgtttgtttcttttacatgttcatgttttttgagcccaaaggttggggcaggttgggcttgagctgggaggggctggacaccttttttgtaagaccgcctatctgttgttcctcctctgagggtgtttccaggcgtctagactcacccaggtgagttgatgctgacaggagctgctcggccttctgagctgcctatttcgccttctgttcctctggtgtttcgcttgggtagggcatgggcacagttcactcagctctggccctggcctggctgtctaacgctaggactgttatagtggactttgcagctttttgcttggatttccttagttcctctctctccctgtatttgtccagcctgccaaggaaaatgcagcagttgggttaaattggcatggctaggttgcactaatgacaagtaccacgtagctggcatttaccgaggaccggttttgtactggcactttgtcccctgggcagcgctacagggcctgcccctcctctccccctctcttgtactgtactcggccctagatgcagcgtgatccatctttgcgcagggaatctttgctgcaggtgaaatggagcggtggccacacctgttctctgcaaagtgggtgttgtaatttctctgccttcctcttggatgaagactttgagacatgctttttaatgccttccatttcgcgttagtgttacaatcagcctgtgcaagatttcagttccaagctccaagctagaatttacagtgtgtaaactcattagattgatggtagtgctagcttctgggattccgatggccagtggtatttgcaagcatgtctcagtggctttcccttttaaaaatgctgtccctcctttccaagtaacctgttgtgcttttatgagatgtattgaagtaatgaatctattcccatggtagaggaaactagctgcttactgtacagatttgggataattttcattgtcaaggtgaaaccgattgaactgcagtcttttttcgttcccctgcagtgtgagtcctgctcgtagaatatcgttggtgtacttgaggctgcttttccagaaggcaggatgtggaaattccagcaggcagagctgcctctggcttgctctcatctctgtgttttgtggctcctcactgagtgcgcgagccctgtgagctgttagcatgctggaaggcagcctcgggccagcagcctgtgcatggaggcactggagcccccccatgaggcgtagaccactgggtgcccgtgcttgtgttttcaaacgtggctgtgaacgtgattgcgtcacttggggtgcattttaggatttggatgtgatcccaaatttctacaccctgaagctcagtcttctgtcatttggcgtgttagctttctgtcaggaaaccttttgctgttctttttttaatgtgtccagggctctttgaagaaaactgcattttgtttgcacaaactgctgcattcttacagacttctggataacaaaataagaagcacgcttgagggtggggtctttcattatgatgacaaaaggggagagcgcaggggtgtcagcggagcagctggaaagtattagcaaggacttaggggaattaatagggtcctcaatttggaatggtttgtttgctacagggctcaatatggtagtcaaatgtttttcttttcatcctttttcttggaaatcaattttttaaaatatagtttgtttcttggctccctgttctgcatctcgctcaacagactgcctctgtcaccgggtccctccacccttgtctcctgtgcggccagcgtcagagccatggcgacggaggagaagaagcccgagaccgaggccgccagagcacagccaaccccttcgtcatccgccactcagagcaaggtgcgtgcccaggggccccttggacaccttccgggggcaaatacgcttagagagtctcggaaacatctcaagctcataagcctagtcttccctactcagttaaatgtcactgctaatttttatttactgaccgcatatctggcgaatgcttgttgcctgctgtgtcagggatcccaaatctgtcacctggaggagagagccttttatcaaaaatacagattcttggttctgattgtaagagtctctgtaggaaccagaaaacatctctttatagttgcccccaccctggctgcgatcctgacgcacaggcagttctgcaagccctcccgtagacctttagcaaagggagcagggcttcagtgttcggggtcggagggtggggcgctggaccaaggccagagctggtgggggcctcctgtgctgtagcaggatcacaggtgggattgaggtggggggatgaggtggattgaggggggcctcacgtttctggctcggctggtgctgttggtgctgagtttggagactacagaagaggaggtcttgtggggaagtagtgggctcagattcagatgtgttccacttgaaaggtactgtccacatagagattggtggaaggcactgggcatgtggatttggagctctaaagatctgagctgaaattaaatggtgggagtcaaaatccaaactggtcacgggtggaacgtacagtggtggtgactttttgctaactggtctttcctgcagcctacacctgtgaagccaaactatgctctaaagttcacccttgctggccacaccaaagcagtgtcctccgtgaaattcagcccgaatggagagtggctggcaagttcatgtacgtagcactgaggcccttagctgctgggagaggcggtctgagctgcagacaaaaagctggcgaggggatggcttgcttcctcacctaccgctggggagacgtagcaggccgctggggggcacgtagcaggcgggtgtgtctcctcctggaactgtgagctcagtgctggttgaaattgcccgtggggggccaggcgtggtggctcatgcctgtaatctcagcactttgggaggcagaggcaggcggatcacgaggtcaggagttcgagagcagcctggccaatatggtgaaaccctgtctctattaaaaatacaaaaaaagattagccgggcatggtggcacatgcctgtagtcccagctactcaggaggttgaggcaggagaatcgcttgaacctgggaggcagaagttgcagtgagctgagatcatgccactgcactccagcctgggcgacagagccagacaccgtctcagaaaaacaaaagaagaagaaagaaaagaaattgcccgtggaccctgggagggaggggaaggggactggtcctctcaggcatgtggccgtgctgaatgggttctgagccatgtggttcatgctgatcacctgggactcatgtgggaaaagctcagactttggactctggatgactagacaattgtgtcctgctcttagcctcagatccttttgttttctttcagctgctgataaacttattaaaatttggggcgcgtatgatgggaaatttgagaaaaccatatctggtcacaagctggtaggtttcagccctgtgcggtgaagttgactgttgaacagggtggctctagtgatcaaggggtcagggctgcttcgagagctgtgggttcaggttttaagttttccccgttttttaatttttttatagttatttgcatcttgaacttttaacccaaataacatttgacttccatggaggagtgtctgtgaggctggcagagctgcagaaagcctgctgtttttctcctgggccgtgtgtcttttgtaaggttaacactagtgagaagatttcctgagggcaatggggatgtttgggattttgaccttttgccgatggtcctattttgtcctgtcaagttactgaccctgttttttctccccaagggaatatccgatgtagcctggtcgtcagattctaaccttcttgtttctgcctcagatgacaaaaccttgaagatatgggacgtgagctcggtaagtgacactcagtgcttctctccaggggagaccggctgcagggcacggggcaggtgcgggggactgagttgactgctcagtaagcaacactcagcgctcctctccagggaagactggctgcaggggcatggggcgggggtgggtgggggaggccgagttgacttcggggaacagcaagtcactggcggggcatcaggcatgctttgggatgtcagacattgatgaatgtgacctgactcttacgtttggggaaataagcactggaataatcctaataatactctgttatagggcaagtgtctgaaaaccctgaagggacacagtaattatgtcttttgctgcaacttcaatccccagtccaaccttattgtctcaggatccgtaagtgtggctggggtgtcttccctgggggaggtggtgtcggatgtgggaaggctgttgaatttgcttgtagccactgtggagaaggcaggtgggccctgagtcctttctgtgctgtttgtggggaggatgggctgatagcaggtcttaggttctggggaggtttgtcccctctccttcctgtaaaatcactgtcatctcttttgtgttcagtttgacgaaagcgtgaggatatgggatgtgaaaacagggaagtgcctcaagactttgccagctcactcggatccagtctcggccgtaagtccctctgacacggatggggtggtgtccagcactacgtttctctgacatcggatgtggccagctgtctccctgaggggcgtaagcctggccatggcctgtgcctagctgattcctgctgtcatgccacagtctagagcaatcaggttggaggctgggacttgagaaatgagtcctgtgtgcagtggagggatggcgagggggtggtgaggtgtcagtggggtgccctgtgatgagcaccaaggggccgtttgtgcagacttgggggcagtggccacaggcgttcaggaggtagtgtaccctgaactgatgcacgggacaggaagggcggccaggctgggaagggcactgggagtggtgggagcacaggtgaagtgtgagttttgagtggagttagctttgatgggcgggctgggtggggatggcccagtcctggtgggaagtgttggaggctggagctctccggagagcgggccttgcacagggacacgtcctgccattttgctgttgccactgtgcaaaccaaacggccgagaggccgggcgtggcggctcacgcctgcaatcccagcactttgggaggccgaggcgggtggatcacttgaggtcagaagtttgagaccagcctggccaacatggtgaaaccccgtctctactaaaaatacaaaaatcagctggacgtggtggcgcgtgcctggaatcccagctcctggggaggctgaggccagagaatcacttgaacctgggaagcggaggttgcagtgagccgagatcgcaccactgcctgggtgacgagagcgaaactctgtctttttttttttttgagactgagtctcgctctgttgcccaggctggagtgcagtgttgcgatctcggctcactgcaagctccgcctcccgggttcatgccattctcctgcctcagcctctccgagtagttgagactacaggcgcccaccaccatgcctggctaattttttgtatttttagtagagacggggtttcaccgtggtttcgatctcctgagctcgtgatcctcccgccttggcctcccaaaatgctgggattacaagtgtgagtcactgcgcccggccaaaactctgtctttaaaaaaaaaaaaaaaatcaagaacaaatggccaagagttaaactacacagtatcataaaccgctccatttcacaaagtggccagaaagttcttttgttaacaaagtgcatgaggtagtttcttggccaatcctgcccttcgttgagaagcggaaggaagggtggatgcagcatttgtcccatgctgcctgcccgtgtgcctttcactttgtgccatcttggcggtgaatgggtttaagcatttttacccttggaaggctttgcccgagtgagatggcaggcgaagccctgatactgcccggacggacagtgtgtcaggcctgggcggggctgcggggtctgagccccgcacatagctgggccacaagaccctcgcgggcccagtgtcactgctgcggggaggccgtttgctgtggggatggcaccatgtggccctgtgcttgtggctgtgtgcttgcgggcccagccccttggtgccagtccgctgccctccaggacaccttgggtcatagtcagcagagctgaccttcagactggggctgacaaatgaacgcttgtgaagtaacctgagaaaggggttcgctggtggcctttgagttggaagaaagaattctgtgagcatcctagaggccaaagatagcgcaggtgggactcgcggttgataggtaggattttaaaagtctttttttcttacgaaagtcacgtttgctcataaaaaaacacaaaaacaggttgggtgccatgtctcccacctgtaattccagcactttgggtggctgaggcaggaggatcccatgagactaggagtttgagaccatcctggacaacatagtgagatcctgtctctatacaaaaagcaaaaattagccgggcgtagtgatgcgcacgtgtggtcccagctacttggaggacggtgggaggattgcttgggcccaggagtttgaggctgcagtgagcaagatggtaccactgcactccagcctgggtgacagagtgagaccccatgtcttaaaaaaaccacaaaggtgagcaaatgtaggaagtagaaaatgaattccctgagccacccctggggtcagctgccaggaggtggagtcggtccctctgtggtcttctactttgcttttttaggtgcatattttccagggtagctcactcctgtcctttaaataactggtaccacatcacagctgctgctccgtagctgtctccactccacagctgctgctctgtagctgtctccactgcagagaggtttgtggggctttgttttttttttttttttttttgaaacagaatctcactctgttgcccaggctggagtgcggtggtgcgatcttggcccactgcaagctctgcctcctgggttcaaggggttctcctgcctcagcctcccaagtacctgggattacaggtgcccactaccacgactggctaatttttgtatttttagtagagacagggtttcaccatgttggccaggctggtctcaatctcctaacctcaagtgatccgcccgcctggtcctcccaaagtgctgggattacaggcgtgagccgctgcgcctggcctggggcacctttgatgtctgcgcacatctatgcccttggattgctggtgtgggcctgctgtgtgagcaaggactctgccagtcgcctctcagtgagtgcttatgtgtaattctcactttgacaaaaaggagtgcagtgagcatcctgtttgcatctgtggccgtttgtgcgggatggctttggaggggaaatgcagtagtcaggatatgtgtttagctttttgacaggtacattttggagctttagagacttagaggcatgtggccccctgctcactgcctcccatccctgtcccctctctggccagggtttgccctctctggctagggctcctcggctgagggccgctgccgacccccatcatccacagccctcgcgccctccttgcacccgggacctgtgtttttcctgccctggagcttctgctactgcttgtctgcccaagtcgactccgcagagcacttggagtgctccttggctaggggccttgccatcccctgctgggttctggctgattaccttctctgtttctttctttcttttttttttttttgttttttaatatttatttatttatttattttgagacagagtctcactttgttgcccaggctggagtgcagtggtgtgatctcagctcactgcaagctccacctcccgggttcacgccattctcctgcctcagcctcctgagtagctgggactacaggcgccctccaccatgcccggctaatttttttttatatttttagtagagatggggtttcaccgtgttagccgggatggtctcgatctcctgacctcataatccgcccacctcggcctcctgaagtgctgggtctttttttttttttgagacagggtctcactctgttgcccaagctggaatacagtgacgcgatcttggctcactgcaacctccgcctcctgggttaaagtgattctcctgcctcagccccccaagtagctgggactacaggttcatgccaccacgcctggttaagttttgtatttttttgtagagacaaggtttcaccatgttggccaggctggtctcgaattcctggcctcaagtgatccgcccaccttgatttcctaaaatgctgggattacaggcgtaagccaccgcgcccggcctcccttatctacctcctcgaagttaacttttctggcagccttctgctggagtgcagtggatgggctgtattgccccttgcacctgaatgtgggtggaatggtagagccaggccatgtttgccagtgggtagtatttggatgtggttaagaagctgaacaaagcaaagcatggagttggccttgtgagttttggggacttgttttgtcttgttactgttacatccatcgtaatagtctcaataagagactgttttgcacatttaaaggtagggatgaatgtggttagatggatcactgtgagttagaaaagtactttgagaggctgccggccagatggttgcagtgaagcagctggcacggtgagagcaccctgttggagcagaaacaggtactcacccctctgtgtctgctggagaacatctagggctgcagtacccagcatgcccagcatagaggctgccagccgcatgatggcccagagctcagggctgtgtgaggtacctgcagatttcagagacctggcacaaaaaaagaaagtaaagtgtcttgtaataactttttgtgttgattatgttgaaataatattttagatacattgggttacatgttaccaaagtaatttcacttgtcttttaagcttttctaatgtagcttctagaacaattaaaattacacgtgtggctggcaggctcttgcagagtctagcctagtgcttctctgggcgtgcagcagcaggcagcatgccccggggacctgttcgaaatttatgttcttggactccccctcctggactggtcaaatcagaagccctggggatggggcctagcagtctctgccatagtagctcaccggtgcctttgatgcatgtggatttgcctctggggacacatggcaatgtctggagacatttttggttgtcagagctataggcatctagtgagcaaaggacaaggttgccactgcacaggggcagtaccaccctgtcccccccggaagagtctggtctaaaatgtcagtggtgccaaggctgggaaactgcttctactagacagtagaagcagacaacctcagtcccatccccgaatcattaaaccacggcttccttgtgtggcttgatttcacccaggaaatgtttcagcacccatagcctgagacaagatagtttccaaaggtgctgtttgattgtgagaaggcttatccttggctgggtgcagtggctcatgcctgtactcccagcacttcggaagaccaaggtgggaggatcgtgtgagctcaggagttcgagaccagcctgggcaagatagggagaccctgtttctcttatgaagaaaaaaaaaagggtgggcgcggtgcctcacacctgtaatcccgcagtttgggaagccaaggcgggtggatcacttgcggtcaggagttcaagaccaggctggccaatatggtgaaaccccgtctctcctaaaaatatatatatataaaaattagctgggcgtggtggtgcatgcctgtaatcccagttacttgggaggctgaggcacgagaattgcttgaacctgggaggtggaggttgcagtgagctgagatcgcaccccagcctgggtgacagagcgagactctttctgaaaacaaacaaacaaaaaaacataactcagtctttttttttttttttttttttttttgagatcaggtaagaagcagttgtgtccctgacttgaaagtaagtttttgtctcttcttcctctccttaattcctaggttcattttaatcgtgatggatccttgatagtttcaagtagctatgatggtctctggtaagtgaaaacattttacttcatgaagcgatgagtgcttaactaagggccagctcttgcactgttcctgcatctgggggtacagcagtgacaaaagacccaagtccttaatttccgaagcttctcttctggccacgctgcagacatgttagcagataggcagtgcagtttcggggttggcagcacaggtggtggggcggcatgcctgggaagatgtccttgttgttagggtgggtcagggagggcctcctccatcagacttcagctccgtgtagacgctgacgtgtgctgttcacacgctcgtggaaaatgggtgtttggaccccttgaggtgaaagctgtgctgctctgggaggatgctgagtgatgccgtcttgccctgtgaggatgcgtcaccatcccgggcaggtgaacccaagcagatggcagcatagagaagggcaggaggaagagtgacagggtctcctgcagaaagcccacctaggtctcagcaggtgtttgtagtgcttggacttggtaatctgtgtccagcactcctcaggagacacaagggaagtggagaagtagaggttaactcagcgaaatgtctgatgggagcgagttgggggagtggagtgtttgggttgtgttttggatgtggggcggacacatcataagctgttcagattggtcactggggaggaggaggacggtggcagccactggcagaattgaagatcttactaggacttcctgcagggaaccctcaggtggacacgcacactcgaaatctgtttcccagtctgactccccagtgactgttggcgtggggatccccagggggtcacagtctgtagtcgccatgcatgaccccccttcggtcttgagaagacgggtctggtgggagagggtcgtagtcgagttgcacccaaccaccggcctcccatgggcttcacagcacacacttccgggccatcgcctcgcaaggttcaagctgcggttgcagcactgtgatggcgtttggggctgaggtcactgggatgtgctgtggcaaaaatgaggtcatccggagccccacattggccagtagtctccacggttaaagccatcgtttacacttgaccatttaccagcttattataaaggatacacttcaggaacagccagaggggaggggtgcacagggtgagctatgggcgagcgtggagctgccagggcctctctggtgccaccctcccggcccctctgtgtgtgtgtcaccaacagggaagtgagcacgggacagtctcagaattactcatggacctggctctaagaactttctaaagaaatcagaaaaagtataccaaggaaattaggagggaaatgggaaacaaatgagaacatagatgatataagatgtcttctttgatgaggctagtaatgaaagccttttaagtcccataatggaaaaagcaaaataagcaagatgagaactaggaggtggttggaagcaccgcagcgggaggaagcgggagtcagaagcctccgtccagcctgagcagtgcctcggctccagcagcgagctcggccacagctcctaaaggggccctgggtatggtgccttaaggagcagtcaccgctgaagaggctggaaaaggggattgaaggcctgaaaagaacatgtcccctgtgactttgtatctgaatccagttcaatagtgaactttgaagcttatcccaacgattcgagaccacaggcgggagggagctccctggttcatgtctttggttttagcatgagcttgctacctaagccttgattgctggtcccagaggaagaccacagagggcaactcactggtgaatgttgatgccaggattccagaggaagtagcagcctcctgagcctaccgtgcacagaaaggaattcccatagccaaggaattcattcattattggataatgaaaggattataacgtaaacatcaggaaacctattatctaattctaccaacagattaaaggcgttaaatgtctctgtctgttattaattagtaggggtcaaaaaggcgcctgattgataatatccagcagccaacccttcagcaagatagagcagtattgttgaccacttactggtaactaataattttcacatgtggcgacatgctgaaactctttctatgaaaatcagaagtgggacaggtgtgcttggttcccatgttactcagcattgttgggagtttctagttagtgtaagaaaatgaaaaaatagtcctatgaaaattgaatagagatacacatctttgtagatatgtttgcatgttttaaaatatttaaaagccaccaacactgcttttcaaatacccatttaaccctgtgacgtgggtactgtcagccttgcttttcaggcagggacagttaccacggtctctcagttgctcagtgcaggaccagaacccgtgtcagctctggagtctgggcctggaaccccctgccctgctagctacgtggtgtgatctcgcgtttagtgccatcagtgcttgaaaatggacttttttctgtatactaggaattgccagttagaagatggggaaaatgtttccattttaacagtgacaaaaatgctaagatgtttaggaatgcggctagtgagaaggagcaggaccaatgcaggaaatgagaaatggaactgaaaggacacacgggggttaggtcttgagggttaggagatgaggcggctccggagaggccctcccgcagtgattgcggagctagaggacatgaatttgagatccatggggcagcaggatggagctgttgctgagagaattgagaagatgcagagttgggaggagagttgctgcttctgggtttgaaaaccctgggtgaagtgtctgaggtccagtgtggtctcgtccctggattattgaagtgtgggcagaacaggaggtgggtgtgcagagcagagagcttcggggccctcccagaggcggcttctccatgggtgagagatgggagggaccgtgcatggcggccatggggtctcgtgcttggggaatgatttgtccacgtgtgacccgagcctgttccccgctgctggcatctgtgcagtagaattgtgggtgctaacacagtgggctctgcttccagaatgcgtctgtattggcagaaatcacagaaaccctgaaattggaacaatgtaaatgcctggcttgtaccttctgggaatagtccagaagactgcttacaatactcttaaatttttgttttgaaagaagccctctcattgcttgcatgtgtttgcatgagcgtgggcagagcctgcgagaagcactgggctgctgctgcccctctccttggccagggagagtggagagagcaacaggcttcccgctctgtgttgggggtcaactgtggcttgtgtaggagagatccagaggtaccccacacatggtctgcacgtgtgtagcatgtgtggactgttgatgtttgtatggacagtgtttagtctttgtccctagaatataagagaatgactgttaaacaggtgaagcataacttttaaaaaaagatagggaaaagcgtgctagtcctaaaatttatatctgactcccagcagcccgcgtgagatcataacttgtctgcttacgcttttttgttctctttgcttcgaagtcgcatctgggacaccgcctcaggccagtgcctgaagacgctcatcggtgagtgtggctctgtgtgggggctgggtctgtggggagggcctcccctgctgggttcactgcccctgttcttcaccagctcctcctccctcctctgccctgggtccgcccctgcaggaggaaccttcctccgtgtccgaccgttccgccagctccccctgaccgcccgctggctctgttgctccttctggtgcagttttcctgccatggcctttctcttgggccagcctggggctcctccacctgtgctgtcggcctcactccggctgctcactggagtcctctgggcagccccattgcctcctggcttcgggcccctgctgtcgtgccagcctcttggatcattccttgagtgaccggctgagtgcctgcccatctgctgggggtgctgccgaggtggatggaggtgtcctgggggcacggaggacaggcctgaggagaggaaggagggacgtggcgtggcctggatgggaaggccaggtgctgggcagggtgtggcctgagggtctgtgacggcccggggttcccagctgccccttgcagagcctgcagaaaggagcggaagggttttcatccggggagtgttcgtgtttaagaagcctaggctagatgtgtgggatggggcgcaccttgaggagggagctgggtggtgaggatggggggatggacccccgtgtggggaggcaccccgtttgcgcccttcttccctctagtctgtcatagcctgctggcctagctgagaccaagccccacaggctgggaggctatctgtggcaggaatgtgtctccccgcagtccaggaggctgtggtcaggattgaggaggcctcttcttggcttatagacgctgccttaccctggcttcacaccagtgtccctggtgcctccgtgtgtccaaatgtcctcttgtaaggacaccacccttgggcctcattttcactctgtcgccctctttgaaggccctgtctccagtacactcgcctctgaggctctggaggcttgggcttcagcatgagtccccttgccacagcggtctttatagcttcctgccttgtggggccagccttttgccatgcatctctcctgattgagatcacaccgcacttggtgtcccctggacgggccacctgtgctcagttgtgtgcgccgctgttgtgtgagcacacgtaaccctcacggccacctctgaggaggggggttgtcctcatcctgcatagaggctcattcactagcccaaagctccacagcaagcaggtgcagggactgggattccagcctgggcgcccctgagcccagggtggggacggaggggtcgctgcatagcagttttcccatcggcgtctcctcaggtctagcgagttagacccttctggacttcactgagacaggttggctgatgcgttcatctctgtgaggctctgcccaggcagcctgggttaggcatgcggacacgcttgccatcagctgtgttaagggagcccggccccccggccctcactgtgacctcggcctgcctggcggtgtgacgtggtgtgcccctgagggagggaccgcatggcctcacagcgtctcccgtgccttttcagtgtatgtgaccgggctgagggagcggagacgccaggtgcctggcgaggccaggcgtccccgtggtggtaatgctgagggccgtgtccttcccggtgctcgggacacaccagcgcgtgcacgtgcttgggggtcggtgggggtctctggtggggcccaggggtggggcctgcaccaggacacaccttccttgagattccctcctcctcactcaggtgagaggagatgccttcctccacttctgagggtcgtggggttgccatgtcctgaaaactctgacctgtacatcgacagcttctgggaaccttgactctttttcagctgtgtgagaagcagcggctctgctctgccctcagggctgcagagtccagctgataggcctggggcattagctgtggatgtgacaacaaacagatgggttctgtgggtgcagatgccccttgcgtcgataaattcttaaaggagaatttccgaggtgattccccagccctctttgctgctggtggagttgtccctctgttgagttgggcattcgccagccttatccatcccctgtgaggcaggtgattcctgagagtgcccatggcctggtgccccaggaggcctgtattcgtaaagtcctggtgtcaaggggcccccgggcctatgggcttgaggtgtcaagaacctgctcacggctggtgtgcgtggctaggccacccttcggggcggcgaggggtggtggtgctggcactgatggtggtggccgacctcactcagatgtcgcacgtgggggatggggagcgggtcccacctcctgtccctgcctggctgtcagcgcccgccgtgtgtcacctgtccgtttttattgcagatgacgacaacccccccgtgtcttttgtgaagttctccccgaacggcaaatacatcctggccgccacgctggacaagtgagtactgcgtgggactgtgggggcgggcatgtggcctccccagccagagacacctgcgtgccagcgtgagcctttggagagcgtgttgtgggcttggcacgggatccaggctcctggtggagcttcggcttctgggcagtggcctgttaggtcggagggcaggcccccgtccatcccttcccgaggctgaacctcaggtccgactataggaggatttagggtccgttttctggttgagcaactgtggccagggcaggcctagccatcccgcatgaaggagtcggcggtccgggggcctccaaggccctttctggttctgacctctgagcatcttgattttacctctcacaaagccactgccctcctgggctgttctctaagctccagctttcccatgcgtgcaccctcagccctgtgggtccgagcctgggccctgatcctctgagggctgtgtggttgggtggtaaaacctgttctggatgtttccagaaccaagaggacttcctcacccttttgaggatgacccgagtcagggacgataacacccatcagcttcctgttaaagtctctcttggaactacaaatacttgcggctgtcacactgtgctctcagacgccaagtcactggactttgagcctgaggggctccttaccctgatggggaagggggttccagccccgctggcttttgcacctggcgctgatggtggctgtgacgtagtggctgcagagttgggtgtggggacagaaggatgcctccagacatgccgcctcacccctctctctgtcttgcagcactctgaagctctgggactacagcaaggggaaggtgagcccccgcaggcttgggcccccatggtgcaccatccctgggtcatggcctctggtggggacagagctggccccggtgatgacaaaggagaggagctcagagagccatctccgctgggtttggtgcgaattcctgaaagacctgggtatttgtagggtggcagtctgcaagttaaatcttcgattgtgtgggtttggtacttgtacttttcagaaataagtgaagtgagtagtgaaacgccttgcttagaacgtagaattacacaaaatcaaggggaaccatgactctgtgaccagcctgtcccctcctgtttcagtgcctgaagacgtacactggccacaagaatgagaaatactgcatatttgccaatttctctgttactggtgggaaggtgagtctcataaccttgaagcgtctcacctgttcccagcttactctcccgagaggtcacacctgttacaggttgctttatactcagagacacttttctgtgcccacaaaatgaatttccatttcaaccaaagcgcactgcgccaagtaccggggacaccttgtcccgtttgtttctaggtccatctccttaacggaggcaggcagcctgttgtcgggctttgctggcagtgcttggttgacaccttccgagggcgctgggacccaacaggtggagctctgtgtgctcagggtgtccctgggtgggtgcgctggctccggggctgtcgtccaccggccccagcagggaggggagtgtgttttcccgcccacccacactggtctcgatgctcctgtcttagaccggggtgactcgggcaacatgtgtgtgacacacagactcagaaaagggtgacctgagaagcatcttccatcctggaagcctctcctggggcaggcaggtgcctggcttctgtgagcgaggccggtgctgggatagagcaggcggggctgtccccattgggagaggaagcctcaggcctggctggagggcaggcagggctttttggttgagttcagcgaggcagccaccagcagggtgggcgtggggcagggcataactggagattctctccctttcacatgcatgagctctgacctgcttttccttgccctgttttccctgcttgttgttacgtagtggattgtgtctggctcagaggataaccttgtttacatctggaaccttcagacgaaagagattgtacagaaactacaaggccacacaggtgagggcctgcgctcctgcagtcactggctgcctgttgatgtgaggacagttcctgcaggtgaagcgtggtgtgcccgtagggtgccgtcgtcttccccttcccacctcagccctccgctggccccgctgaggaaccgctgctaagagctcttgcccaaggcatggagctggtcactgtgctgccgactcagacccgggctcctggcttgaaccctgtttctccctgttctgccaggcatgctggtccggaaggtgtgtgtggctgtgggactttaggtgggtgcagcccgtcccacgtcacggcgagctctgtttcctgggctggggacagtgaggtcatcgctgccccatcctggaggctctggctcctttcgggtacctgttccctctcccagagagaccccccagctgcatgcaggcctagtgggctccacggcggagctggttcccaggctacctggggttgccacctctgtgggtcccggctgccctctgcagccgccgctacttcctcaccctctggccctgcatttccacgtctcatggagccaacgagagcagggggttcgagcccttgtggaaatctggggaggcactgcttctccctccctgtgagcagcttcacccagcctggggtcagtgcttacgctccacggcgggcctgggccttcccctgggtcctcgccggcgttctggggttctttggtttacgtagaagctgtaaacactttgatgtggccgaccttgcaccaccagtctgttagttctgacctccctgcttgggtggtggacttgtccttgctgtgacagagccagccctgtggggtgctctggggcttagcattggggggaggcggtgggagtgggcggctcagggtccgaggagaagagggacattgtcgataaaggactgaggactgtgaggggtctgactgcagtccttgtgcgcgccagcctctgagccagtcctgctgccgcgctcctccttgtgggcgccgagctgctgttggtgggggcgtgtggggctcctggtctgcaggcagggctggcactccctgtggcctcctgcccctgtcccccaaccggctgtgtcgccctggtaccggctgctgtcccctcgctcccctcccctgggctccctgtgtcgaaggtgggcagtgggtgcttgtcctgtgacctcccaggtggcgggcaggcgctacccgcgtttctggagaaaggtggagctcagtctgggatggcgtccccgacccaggcgcagggatggctctggttctgactgtgtctttgttttcagatgtcgtgatctcaacagcttgtcacccaacagaaaacatcatcgcctctgctgcgctagaaaatgacaaaacaattaaactgtggaagagtgactgctaagtccctttgctcctgcccgcgagagactgtcgggaagttgacccggattggcaagaaacagggtgtcttggaggtggtcccccagatctgcgcctgggggtcaggacagggcctgatttgagcctcctctctgaagatgatttggccgagcggaaggtgtggaccaccggaaagttcttaaaagttgctggtgacatttcttgccaattctaacactgtctagggaagagttcctagtctattgtgttcaaacagagtcaacaaaagtttttaattttttattacagaagggtgaagttcaatttaacatgcgttgtgttttttcagtaaacgttctgtatctttttgatattccatgacccagtgcacgctgtggcctgtcaccgccaccgtggccccgccagctggcctcccctttggcccacgccggccgcccccattctctgctgcgtagatgccctggcccagggccctgactcctccattcccgccagtagctgttcctagtgtattttcgtctttctggaaaacagcattgagtggttgttttctgtgtaaagagccgtttgtgtcttgggagtttgtggcccacatgccgatagcacggtcatcgcacatgactctcccgtttgtctcagtgtccctgcaacaagcagcaccgcagactgtaataaaaggtggggttttgtgaatggttgtggcaagtgcgtccttgtgaagctcgtctccatgtggctttcttggagaaaggctcccctggggcaagagggtggaaggtttctttggacaggaggtgctgaggctggctgcacctgctctctgaagacgccttcctctctaggttcattgttcagtgttgctgggggcggggaacgggggtggggaggttcttagttgcgaaggagccaagctcctgatggacttgcgttgggatgtgggggacacctgtggcatggtaaggctccctgagtcccttactccaggtcagatgccagtgggactcatgcgccctatgagggctgcagggccagtgctgcccctcggactcctcgaggggttgggtgctaagcgcgagcctcgccgtccctgctggagccctcgcctgcctgcccctctgcctgtgctcctggcagtgtggcttcccggtgctcacctgcacagcagttaacagcagaggccgagcgggagcctctggggagcgaggctgaaacctgaacctgcccatggagacagttgtggtgagggttgccacacacagtgagggcggagcagggtggctgagggcacaggtgcctgggtctgtcccacggggcagggctttggggctgtgatgctctgggaagccagcttgggtcctgggtctacagagggccctggccccggagcccagccagctctgcctctctcagggcctggagtcctgggggagctcagccagctctgcctttctcagggcctggagtcctggatgaatcctgcaggtttttggttgcaccggcccagggaggaagcggggggtttgtcaggtgggctctcctggaggtcctcgagtggcaggggtgaggaggggattatctgaggcatctggagatgtatatcctgtggtttcccctgcccctctgtttccgatgaggtgtacggatgagtgacctgcactaagaagtgagttgccacagtgaaaatgggttggtttttgtcttcgacgctcagggtctgggcgcctcgcatttgcagtctgttgtgacagacacggggagctccgcgtgccagcctgtggctgccctgctgtgggggtcctggggccggcgaggccccttcagtcttgttctggggggacggcccactccggggagggggtgtgctgtgctgagcgctgtatccctgaatatagtttattttttctacatttgaattctgttgtagatttatgtaaaaatacattctttttgaaaataaaaattttcatgtcttctaattta

SEQ ID NO: 654 - DNA, 32744 bp, Homo sapiens
  source 1..32744: mol_type = other DNA
gcagccgcagctcgggggcggtgcctgccttgcagcctcccctcggcgatcgcgcagccccatctttgtccggcctccgcgctttgttctcggcgcccgggccttggccagcctggccagccgccgagcagcccccacgccgcgctggcgtcgtcctcgcctccctcgccgccgccccccgcgcgcggccgggccttgccccccatggtgtcccggccagagcccgagggcgaggccatggacgccgagctggcggtagcgccgccgggctgctcgcacctgggcagcttcaaggtggacaactggaagcagaacctgcgggccatctaccagtgcttcgtgtggagcggcacggctgaggcccgcaagcgcaaggtgcgcccggcagcccaccgcgcggcgggctcggggccttctgccgctcctgaggccggccggcggaggggcccttttcctgccctcttcccttcccccgttgcctttccctgtccttcctcttcctctctccttctgccctctcttctctttaccccttccccctcctttccttcccccctcaactctctcccttcccttatctcctcatcttcctatccttcccctctccccccttcccccattcttcctttccctccccctcctctctgtcccctccccctcctctctgtcccctccccctcctttctctccgccctccccctcccttatccttcttggcccgggaggggcgagtgcttccgggccgggggtggtgttctcctgccctgctgcctggggagcctgggacttcggtgggcggtcccgggcgttcctgcgcgaggtccttgcggggaactctcctggttctggagggttcggggctggatgcgggtgcagagaaagaaatatttcaaaaaaatgagtaaaggatggggggctgtcgagttctgggcgttggtctgcagcggtcacccgccgccaggagcgaccttggacgggagctggggcaggaggcgggctggggggcgcggggccggagcttcgcggctgcctcggggcccgcgaggagctggaggtggagggcggcaggggctggggccggggcgagcctgtgggtgcggagccacagcccgggtttgcgttgcggctgaggagtagacttggaagcgcgccgtgggctgtgggaggccttaaccaggagtgagtcccctcggggagcccagtcttgcgtcccgcagttaggcttggtaagggtttggaaatcaaaacgtaacgtgattcttctatgtgaataaagtttatttttacagtttcacgcgcttttgtagattacaatccgagattgggagttgtgagggcagtttccaccttgagtggcatttttttatttatgggaataccaacaggctcgctgagattgtagggtatgttaagcagtaattcaaaaaaaaaattatttttttgagacgaagtctcgctttgtaccccaggctggagtgcagtggcgcgatttcggctcactacaatctccgcctcccgggttcagccgattctcctgcctcagcctcctgagtagctgggattacaggctcctgctaccacgcccggctaatttttgtatttttagtagagacggggtttcaccatgttggccaggctggtctggaactcctgatctcaggtgatccacccgcctctgcctcccaaagtgttgggattacaggcatgagccaccgtgcccggcctcaaaattttttttatctgtaatggtatcaggtagcgttatgtctggatgaactaaaatcagacataaaacgtttcaggatcggagttagagtcttgctagtagaattgtgtgtctttaagaaaagatggcctggcttggcgcggtggctgacgcctgtaatcccagcacgtggggaggccgaggggggcagatcacgaggtcaggagttcgagaccagcctggccaacatggtgaaacctcatctctactaaaaatacgaaaagtagccgggtgtgatggcgggcgcctgtaatcccagctactccagaggttgaggcaggagaatcacttcaacccgggaggcggaggttgcagtgagcagtgatcgcgccactgtactccagactgggtgacagagcaagaccccctccggaaaaaaaaaaaaaagggtggcctggttgaagccagtcttctacagggaatgtgctgttgctactctgggtcagtagtgtccggattgggacgtgacgcgcccaagatttgttactactttggatgaagtggggaccgccccactcttcctctccctccttttctttttccgttccctccctccctctccctttcttcccccctctggtattttttaaccaaatagaaggagtcaagtttaaaccatcattaactaactttgcctaatttcctaaagttaagaattactttttttttttgcgctacttatggctctgattaatcttttaatttcagatgtcagttgcttagtttcaaaactgttgagccacatgtatgttattcaccaattagaagttgaactgtagtcgggtagtgaaaaatatttctttcaaaatttaggtgggggctgctgcagtgccagttggcagtgtgccagcaaggagcccttaagccctccatgctttttcctctgactggggggacttatttacctgtatcacttcatgtgcggtgtcctgcatttctagcactctctagtggcccagttaaggaagagttggtttgggaaatagtttaacaaacctgatgattaacagttggacaatctgcataggatttccatcagatctgtaagcttaggacattttgttttttaaattttattttattaaaaattattttttgtagagacagagtcttgctctgttacccaggatggagtgcaatggtctggtcagtgatcactgcagcctcagattcctggactccagcctctcctgagtagctgggactacgggcgtgtgtcaccacgaccggctaatatttgtagagacagtgtctcactatattgcacaggctggtcttgaactcctggactcaagccatcctcctgtctcccagagtgctgggattacaggccagagccactgagcccagccatatttttggttttaatgatatgaacttgactgtaaaagtactttaagctgatgattgtgccactgtactccagcctggacaacaaaacctatctcaaaacaaacttcaacttgaattataatctttgtaaacaaacaaaggtactttttgagatggacatctcaggtacagtttaaagaaatgaatccctgaatgaataggaattacgagttttgttatctaaggacagatggattatgcattttgtacccaaactttgattcttcttttaacaggcagaacatgacaaaaacatgaccaggcttgataaatttctgtccaaaagaagcttgaattgcagtaaaactctgttttttgagatggggttttcactctttttgcccaggctggagggcaatggcgtgatctcggctcaccacagcctccccctccagggtttaagtgattctcccaagtagctgggattacaggcatgcgccaccatgcctggctaattttgtatttttcgtagagatggggtttcttcatgttggtcagactggtctcgaactcccaacctcaggtgatccgcccatcttggcctcccaaagtgctgggattacaggcatgagccaccgcgcctggcccgaattgccataaaactcttgtattgcagactataaaaatatttctgccgggcatggtggctcacgcctgtaatcccagcacgttgggaggccgaggcgggcggatcacgaggtcaggagatcgagaccatcctggctaacacggtgaaaccatgtctttactaaaaatacacaaaattagctgggcatggtggcacgcgcctgtaatcccagctactcgtgaggctggggcaggagaatcgcttgaaccagggaggcggaggttgcagtgagccgagatcgcaccactgcactccagcctgggcgacagagcgagaccgtctcaaaaaaaaagaaaaaaactatttccatgatttaggactggcacgaccacagtggcgtctcctttgtgtttttggtgtgtgttaaatataacaaatttcttaccatttcagggtttgtctgtaaagataggaactggcaggaagtgattatgatttaacattctacattatattttgaatatagacactttggagaacaggtaatgtttttaaaaccatttctctctttgaatctaaaattttatggcactgtgtcctcaaaacacttttttaaattttttattttttatgtattttttttttttttgagacagggtctgtctctcactcaggctggagtgcagtggtatgatcatggctcactgcagcctcgagttcctggggtccagtgatcctcctgcctcagcctcccaagtagctgggactacaggcatgcgccaccgcacctggctaatttttgtatttttggtagccatgagttttgccatgttgcccaggctggtcttgaacttctgagctaagtgatcctctctccttggcctcccaaagtgctggcattacaggcatgagccacctctcccagccatccaacaatgcctcagtctgtctttactggctcagccaggtgctgggatggtggtgagcacattgtagagagctctcattacttgtttttattttcatagtctagctcattttcctgatacgtgctattgtatttatttatttattaaaaaaaaataaaagactgagtctccctatgttgcccaggctggtcttgaactcctggccttaggagattcacttcggcctcccacagtgctgggatgatatgtgctattttaaaagtatactttaaaactttgtttctttgaggaatttactttttattttatagtgaactggatctttcaaatcatcacaacaaaacattacaccattcatactaagtggggtctaagtaaaagatctaaaatgtaaacatttttctgtttaaggttttaattttgaggtcattgtagattgacatactggtgtaagaaaatagagtaatcctgtgtatctttccccagtcctctaagggtaacttcttgcagaaatggagtacaattaccaccagaatattgacattgatacagtctatcttcaatataatccaccatctcattcagatttccccgcttttacttctactcatttgtgtttgtgtatttagttcattaactacactgcatactttattcagaactcattggtttttatgtaatgtccttattctgtctcagaatcccacattactttgagtcttcacgtcctcttgggctcttctagacagtgacagtttctcaggctgtcctgtttggtgaccttgagagttttgaggagtcccggtcatgtagtttgtagaatgtccctcagttttggttttctgatgtttttctcatgattcagctgtggttatgagttttgggaaggaagaccagggagatgaagtgcccttctcattcccgtaaattaaggatgatgctgtcaagatgtcttgggttgctgggcttgactgaatggccgaagtcatgtttgccaggtttctccactgtggagtgactctttccctcctttatgtactgtttataatagaagggagtcactctgcataggtactctaccggggtggggagttctgttcctcctccttgaggatggagtagctacttaaattatttggaacgtttatgtatggaagatttgctgatcctcactcgtgtgtttattcatttgtgtatatcaacatggacttgtggatattgaatgtatgctttgggttatcatccagtgctgtgtggtttgttgtgttgctcccatcatctggctgtatccactgggagctctttcagctggctccggtgtccctttcacatagccacattattttttgttcgttgtttttgagcacttccttactttctggaactacacgatgttctgggatcatcttatgtgttttctgccccagccttagactccagcattttccaaggatccctagtttcttttttgggagaatggaattagatctcaagatctgggcactggtgtgttcatcattactgggatatcctggcttcttggccccctcaagggacagagctgggaaacaggtgtgtatatacaaatgcgtgcatatacacgtctgtaatttgatatatattcatcagcatccctattaagctctacatgagttcatgtttatatctccaactctaatccatttctatagggattattctagccttcccctccagtttatctgtaacttctctgtccagcagagaaaatgctggctcccactgtcgacaatctacttacttacctgttgtgctttggtatacatgaagagaggtttcagaattgtcctgtactcccttgggaaatgacttgaccccccccccccttacagtacagtgctcagttacagttccttttgcttttagtcttacactccctcctcatttccacattacttaggtacttccctccccacccctcttggcggagttgtgtcctatatgtgtaatacaattggtttcttctgcctcagcctgcattccatagggcctcatcagttatttttaaaatcgcatatattaaggtttgctctttgtgctttaaagctcagtggattttgacagaggcatccacaactacagtactgtacagaacagttgcactgccccaagaaatccctgtgcttcaccttctaactctccacaaccactggtctcgtctccatctcggaggtttttccctttccagaatgtcatatcattgggttcatacagtctgtagccttttcatactggcttcttttgtctagcaatatccattgtatccattgagtggattgaaagttcattcctttttttttttttttttttttttttgagacggagtcttgctctgtcgcccaggctggagtgcagtggtgcgatctcggctcactgcaagctccgcctcctgggttcacgccattctcttgcctcagcctcccgagtaactgggactacaggcgcctgccaccacgcccagctaatttttttgtatttttagtagagactgggtttcactgtgttagccaggatggtctcgatctcctgaccttgtgatctgtctgcctcagcctcccgaagtgctgggattacaggcgtgagccaccgcgcccagccgaaagttcattcctttttcttttaatggtatttatcatgtggctatactggtaagtcgtttaagtttcttaatctgtaggttctctcttcattcctttcttacagttttttgcttctactttatctgttgaaaaacttgggccttgtgacttgttgacttccctatagtctggattttgctgtttgcatactcaacagtggaagttcaaagtgttgtggtttgttttttttttgtcctatttcctacaaattggtagcagggtctcctattaaggcttttcctgtatttagcacacagacttgatcaccttggtattaagcggatggaagcttaggtaggaagtaaactcagttttcaaggattaaaatgacccgcctaatggatatgtgagtctttttcttgcctcttgttttatgttggccagtacctgtagcagagggtgctgaagagtagaaattgagatagaattgagtgtgagttttattattatatgttagcagctctggtaagaaactcagagaattaagtgagaatggtagattaaaatgaggctttaggataatgtgattgctccccatacatgtgtaattgacagttgtgtgaggtgagctcaatttaaaggaagactagcctaagctggtcagtaccaggaggattttgccccagtttgcttccgtccaagtgtgtgtccctcagcacagcatctcttgggcttcctcatttcctgtttatgataatagagtactcacccccatccttgagggatacattccaagacctccggtagttgtctgaaaccacagataatactgaaccccatttgtattacgtgcaaacttttttccttcataatttcatggatagatttgttcttactgtagatcttagcaaccttgttatttgatattgttttcttattaagaatttttaccttttcacgtaaaagaagccctttatggcttttctttggcatatccaaattgcagcatcagtactcttgagctttggggccatattaagccaaataaaagtggcttgtgttcacttttatccgtgatcacatccgcaacagttgatgtgatcagcaagacagctaccaagtgacttaacgggcaggtggcctagatggcacggagaagctggacaaagggatggtcatgggacagagcgggatgtcactcagtttcatcatgtttctcagaacggcgggcagtttaaagcttatgaattgtttatttctggcatttccatgttactattttcagactgaggttgactgtgggtaactgaaaccacagcaagcggaactgtaggtaagggaggactgctgtgatattttatatttcatacgtaatttccttctggttttggtagttgggatacactttttaggtaggcctggcaagtaagtctcctgacctgtccaaggacatcaccggcaactgctgggtcccagccttgaaatgaggtcagtctgaggtcttgcctttgctgaatgaaattaccccttctgtaaattgaaaggtctggagtcgctgtacccttagattgattttggctccgagattgaggggcctgagtctggaagctgaggtttttgaggttggggaacttaatttgagaagattatctaattttggcaaagtctttagctttttagtgccgtattttttttttcatataaaggatagaatatttaggccgggcacggtggctcatgcctgtaatcccagcactttgggaggctgaggtgggtggatcacttgaggtcagtagttcaagaccatcctggccaacatggtgaaacctcatctgtactaaaatacaaaaagttagccgagcatggtggcacgcgcccgtagtcccagatactcgggaggctgaggcaggggaatcacttgaacccgggaggcggaggttgcagttagcggagattacgccactgcactccagcctggtgacagagcaagactccttctcaaaaaaaaaaaaaattatacctgtcccttcacttatgtcagtgtttgagtccttgaaaaagtcactgaagagaatgcacaagaattaaacttaccttcctaagatgctcaggttttagaccagtaggaagtcatgggtaatgtgtgaaaagtgcactagctcttaaggtggtgtgtcatgtttgcacacttttaaaagctggactcaaaattcagtgtactgttgagtcatcccatagggtaagtctggttgactacaagggctctgcccctcttgctcctccgcatccttcttggggtgggaggtagtgtgagtggggagataagaggacaggatattcagaggaatattcttaatatcgggaccaaattaatgaatttggcagggtgtttctgtactgcataagatcaacaacaattaaataattgatcctcttctaattcctgtcacatacaaatcctagttatgtttcaggatttgcttgcagtctactgaatctacttgaattaatttataggagaaaaggatttaattcagaaatcattgcaagggctatggagtagtagattctaggttgaatttctaggaaaacccgccagcctggggaatcctgcctctgcaggagccaccacaccagaaagtggtgtgctgggctgcttaaacagtgccacccctccacggtccatgtcagcctgtggatgcccccactgggcctctctccttagcttactcaccaaccgcatcgtctgcaaatgtgtctcaagatatgtttggaacatgagctgcaagggtgcctggggaatgcattttcaactttttttttttttttttttttttttttttttgagacagggtctggttctgttgctcaggctagagggcagtggtgcgatcttggctcactgcagccttgacctcctgggctcaaaccatcctgagtaactgggactacaggtgtgtgccaccatgcccagctaatttttgcattttttgtagagatgaggtttcaccatttggcccaggctggtcttgaactcctggcctcaagctgtcctcccacctcggcctcccaaagtgctgcattcctggcgtgagccaacacgcctggctgtgttttctactttacagtgctgtgaaaggagatagaataaaaatgaatgtgaaccccatgtgagtgaccgggcctgctgtaacaaaccaccacaaaccgattaacttagaacaacagaaatttcatctcaaattatgagactggacgtccaaaataaagtgtttgcagggtagccactccagaggctattcctggcctcctccagacactggaagacatgtgctaccttactcctgtgtctgcctctgttacatttaaatctgatacagtattatcaatggacgtgctgttccacagtgtagattggggaaaaataataatgcagtgttggcattgtttaacaacaggatacattctgagaaatgcattgttaggcgattttgtctttgtgtgaacatcatggagtgacttaacacaaagctagatggtacagcctgctgcacacccaggctgtgtgagatggagcctgttgctcctaggcagcaaacctgtacagcacgtaccgtactgaacactgtaggcagttgaaagacggttgtaagcatttgtgtttctatagctaaacatagagaaggttacagtaaaaatatgatactataatcttctgggaccgccattgtacatgcagcctgtcattcactgaaacattgctatgtggtgtgtgactataccagacataagattgaggttttatcagtatgtcagagacagctgttttctgtatttagcgccagttgtcttgttggttggctgcttgaataatgttggagaagctgtctcttagctgtgttggctccataaggcctgtaaaatgtgtcttccctggtgattggtaaacccgtgcaggggagcatcctaggttgtgtagtagagatagaccataatggagtgtgtagcacagtcctaggttgtgtagtagagatagactataatggagtgtgtagcacagtcctaggttgtgtagtagagagagactataatggagtgtgtagcacagtcctaggttgtgtagtagagagagactataatggagtgtgtagcacagtcctaggttgtgtagtagagagagactataatggagtgtgtagcacagtcctaggttgtgtagtagagatagactataatggagtgtgtagcatagtcctaggttgtgtagtagagagagactataatggagtgtgtagcacagtcctaggttgtgtagtagagatagactataatggagtgtgtagcacagcaggagcttgttgtgtttagttgttttgttcagtgttaggtttctgagattcatccacgctgctgagtatatcataagttccttttcattgctgtgtactttactcaattaactgtagtatagtttattctttttacaagtcatgaacatttgtattttcagctctgcggtgttgcaagtaataatgctacaaaagtccttgtacgtgtctttggttgcgtataaacctatgaattgaagcgttaggctgtagggtacatgtgttcaatttaatagttgtcttctatccatttatttggaaaataagaaacctacaacaaatagcaagaatgctaaaatgaatattgtatacatttatatggattcatcaattgttagcttcttgctaactggttttatgtctgtacctttttctgaatcatctgagggctgactgtagacatcatggtagtttacctcctaagaactgggacagtctcctacataagcgcaatacagttatcacactcagtttaatttttcaaatagtactatctaacatacattgtccaactttaaatacctgaattgttccaataatatcctttatgcctttaaaaattggcgtataggattcaatccaagatcatggattgcatttgatttcatgtgtctttagatttggttcatctagaaattcctagcctatttttctttcattacattaatgtttttgaagagctcaggtcagtcattttgcagaagtccttcaatttggacatacctccctacttctcaggagcaggttccagatgggtcgtgttggtctgagcacgccacaggcgccgccatgttgttctctgcacttgcctgctctgtggtggggataagtttggttagggtggcgttggccagagttctttgttgtagaggtaatcttttcccgtttaattgactgaagtagtctctggagtgatactctgaaactgtatatatctattgcctcaatacacaagtacacgtgtgcatgcatacatacatacatacatacatacacacacacacacacacaagcggcctgagttccacctctgtgggttcaaccaaccacaaatcaaagatatttgggggaaaaaagggataggtgcatcagtactgaacatgtacagactttttctcatgtcattattcctgaaacaatatattataaccactgtttgcatagcatctactttgtattaggtattgtaagtaatctagagatgattgaaagtttatgggaggatgtgcataggttatttgcaagtacattttgtatcagggacttgagtatccatggagtttggtacctgaggggatcctggaatcaattcctagataccgagggacaattgtttatgtaacttaatatatttttttaatccaggtgaaattcacataatacagttgactgttttagaggaatcattcagcaacatttcgtggtttacactgctgtgcagtcactgccttacctgtatcaaatttgaaaatgtttttatttgttccttgttctccctgtccccagcccctggcaacgtcctgagttgtgttggtggatttatctatcctgagtatttcatgtaaatagactcatagaatacgtgaccctttgtttctggcttccttcacttagcatgatattttcaaggctagtctgcactgtagcatgtgtcagtacttcactcctttctgtggtggagtaattaatattccattgtgtatatgctacagtttgttcatccactcatctgttgatgactatatggaccttttctactattttcacagttgtgaatgacacagtatttttttacccagtggttctagcatctactgatgattcttgcctgaattagttactactatgataagcataaaatgaagatcttgtatttttgtctttttacgatatttattagatggaattctcctgcgaagaagactttgtgtttgtatagtattaatttcttttttaaaaaatctgatgggtacatagtaggtgtatatgtttatcaatctggacttacggattcttttaaaactcagtataaataattcctcttactcatttctgtgctcgaattgtgcaactattgccagtggcggctgtccctgttcacacgtcccgttagtattgtgagtcagtggcactcctgggtggttgggggtgtaacggttgtttaccactgtgctcatcattgccgtgattaacatttcaggtttgtgaggtctgtttcttggtaatgccctgctcctttttctttcttctgtacattgctttgattcatgtctccctccctttttcttgttggcttctaaatttgctgtggtcctggaacctggatttgcaaatctgaaatgatgtccaggttaagggtgactaggtgtgagttgctggcctgcagtggggatgggagctgggcttggggtgcccatcaggatcaggagcaggaggtgggggaacatccccgtagcttacagggttttggcagttgaagttgtggacggagttttcctatggggagctagttttcatctgaatgaagtcctgtttgggggaactgaaaggattaaactgatcctctagagtagtaagccttgaagatggaattccctgtcctttcttccagtagctgtctcggggggatgctttgcttgactgtttcctctgagcacccctgtcttatcacacagcgttcactcctcctcttctctgaatttcaggccaagtcctgtatctgccatgtctgtggcgtccacctcaacaggctgcattcctgcctctactgtgtcttcttcggctgtttcacaaagaagcatattcacgagcatgcgaaggcgaagcggcacaacctgggtgaggcgagcttctgggatggggggatagttgtggcccccaaattgctactctttgattttttgatttgcagttccactcttccaaaagtccactttgtcgtttgtctcaagtaatgcgtgcccctcactggtgacacttggaagtgaaagggacaagccgagctcagctgaatcgcgtcctcagtttgccttcgcatccgatggttctgagtgaatggcctgctgtcttatgtccagctgacttcctgtgaaaagttgcactgtccctgctaatgaaacgtcagaccctttgaaacacataggaatcaccttaggcaaacatttataaagaaagagctccatgcaatatgaggtcgctgaggctggcgtggggttgggtgggcataggtgattttatggccttcagcaatgggtttcattgtttccagtcacacagttcttgaaaaggctcccttagcactgtgtgtggcctcaagattaatttacctttcacagccttacaaaatcaaactcattctacattctagaagttacataaaactcagttttgctcttggctttttcttttttttgagatggagtctcgcgctgtcacccagggtggagtgcggtggtgtgatcttggctcactgcaacctctgcttcctggattcaagcagttctcctgcctcagcctcccatgtaacagattacaggtgcctgctaccacgcctggctaatttttgtatttttagtagagatggggtttcactatgttggccaggttggtctcaaaactcctgacctcatgtgatcctcctgccttggcctcccaaagtgcagggattacaggcatgaaccattgtgcccggccttggctttgttttctgacttcgtgcattaactgtttcttctacacagtagtgttttccttggaatgctcatggagttggcaggatatccttcagaacagcattttcaagcggtccaagctagatacctgttttagggaatagttcatgtgagcctagcaattccaggtaaagatatttttaggctttcccgccctgaagttctgtaatttgatgctcttttaaaaacattagcctagaaagacctattggaaacaacatgcgagtccataaagtcactgcacccacgtcccttacagctctctacaaggagtactcgtagtaaaggataagacccacggctttaactgaggctgacgacacagatagtgtgtctgattttttttttttttttttggagacagggtctcgctttgtctggagtccaggctggagtgcagtggcgcggtcatggctcgctgcggccttgacctcctgggctcaggagatccttctgcctcagcctctcgttgggaccacaggcacacaccacgacacctggaatcccagcactttgggaggccgagtgacttcctgtgttgaaaaattttttgtaggctgggcgtggtggctcatgtctgtaatcccagcactgtgggagaccaaggtgggcagactggagatcgagaccatcccggccaacatggtgaaaccccgtctctactaaaaataacaaaaaagttagctgggtgctgtggcgcacgcctgcagtcccagctactcgggaagctgaggcaggagaatcgcttgaacccaggaggcggaggttgcagtgagccgagatcgcaccactgcactccagcctggacaacacagcgagaatctgtctcaaaaaaaaaaaaaaaattgtggagacagggtctcactatgttgcgtaggctagtcttgaactcctgggctcaagcgatccttcggctgtggcctcccaaagtgctgggattataggagtgagccaccatgcctggacacagtgtgtctgatttttttttttcctactaatttttttttttaaagaagtgagatgagggaggagcggtgtggcttgcacctgtaatcccagcacttcgggaggctgaggttggcagattacctgagcgcaggagctcaagactagtctggacaacatggtgaaatcctgtctctacaaaaaatttaaaaattagcagggcgtggtggtgtgtgcctgtggtcccagctactcactcaggaggtgggaggatctcttgagcctaggaggtcaaggctgtggtgagctgtcatcaagccattgcactccaacctgggtgatagagcaagactcaaaaaaataaagtaaaaaagaagtgagacgatttaaggcaaaacatacctgtatcttctatgatgtgtttatgatccagctgttttcttatggacatctggaagctgtcacctcaatatcatgctgtgcaatggcacggtctcagctcactgcaacctccgcctctcaggttcaaacaattctcctgcctcagccacccgagtagctgggcttacagacgcacaccaacatgcccagctaatttttgtatttttgtagagatggggtttcaccatgttggccaggctggtcttgaactcctgacctctggtgatcgcctgcctcggcctcccaaagtgctgggattacaggcatgagccaccgcgcctggccctattaaccatttttaagtctacaagtcggtgacatttagcacatttacaatgttgtgtgtcctccacctctctagttcaaaacttttttgcaccacagaggaatgcgtcgttaacagatcactgcctgttgctctctctcctgtcccttggtgacttgaatctaccttctgtctctgtgggttctcctttcctggatatttcatatgtgtggaatcatataacatgtggcccttcgtgtctggcttctttccgcaagcatgcatttgtgattcatctgagttgtattatggattagtatttcattcctttgtatggctcagtcatgttccattgtttatgtagaccacattcttcatccgttcatctgctgatggacgtgtgggttgttcccatcgtcttggtgcttaggaatagtgccactgtggacattgtgtgtaattctagggggacatgttttcatttctcttggatgtatacctagaagtgagctggcagggtcatcaggtcactgcttaacttatgtgaaacaccatcttttttttgtggctgcaccattttaattctcaccagtgatggacaagctttccagtttgttcacatccttgccaacacttttattttttaatacccataatagtgtgaaatggtatctcattgtggctttgattttcattttcttaatgaccagtgatgttgaatatttgttcatgtgcttgttgggccatttgtatatgtttggagaaatatcagttcatgtccattgctttttttaaattgggttgtttggtttttgttgttgttctttatatatacacatgcacagtatacagtgtgtgcgtgtgttggggtgtgtgtgtatattctggatactggactctgagcagatgtatgatttgcaaatgttttctcccattttgtaggttctttttagtttcttgatagtgtcctttgaagcacaggatcagacgtttttaattctgatgaagtccagtttcttttttcttttcaagacactatctccctctgtcacccaggctggagtgcagtggcacaatcacagctcactgcagcctcaacctcccaagctgaagtgatcctcccaacctcagcctcctgagtggctgggaccacaggtacgcgccaccacgcttggctgattttttgtactttgtgtagagatggggttttaccatgtttccaaggcttatcttgaactctgggctcaagtgatcctcccatctctgcctcccaaagtgctgggattccaggtgtgagctgctgctgcccagcctggttttattttttcttttgttgctgatggttttgtgtcagatctaagaatcccttaccaaatccgaggtcatgaagacttgcccttaagttttcttctacgagttttatatttctggttctcatatttaggtctctgatccattcgagttaattttttgtatacagtatgaggtaaggatttgtaggtgaatattcagttgtcccagcagcatttgttacagagataccctatcccctcaaatggtcctgatgccttgtggatgtcggttggttttatgcagtgggagcgttgcagtgtgaaggcgtcttaaagaaggcctaaatctagaaggatttacataggcactggaatggtgatccgtcttcccaggctagagtttttgttgtcagctacatgtgtgggctgtttttcacgggatatcttggccttactgtaaattctcatcacccttattgtaaacttgtctctgtcaggatttctctgtgacgtccatgtgctggggctgtactgctgatgaacaggaagtggcaaaggttgatggctgagctctgcgacagctcccaccaggattttaacatcgttgttggcattttgtgaattttttgagtagggcagaaggtagccctgggaatcttaaactgctgttttgagtttcaacagatctgctttggaagacttcaaagatttaccacaatataagtcgtagtagcttaagacctgaaatagaataaaactgtggtgttccaagacttccctgtttatccggggatgcacttaagttatatactaacctaatcatcacacagctctgggaagcactagtaccgttgctatcagcatcttaccgcaggggaaactgaggctcagaggtgtggagtaattgatgaaaggtgcacagctggcaggtggcatagtgagggctggtgccagttactctcaatccatggtctttcctctgtgcttcgctgcctcccgggtgtctgacatcacgtggatttaagccccactctcccaattttttttttttttttttttttgagacatagtctggcactctcgcccaggctggagtgcagtggtgcagtcttggctcactgcagcctctgccttccgggctcaagccatccttccacctaagcctcttgagtagctgggaccttagacacacaccaccacacccggctaatttttgtagagatgggggttcaccatgttgcctaggctggtcctggaactcctgagctcaagtgatccactcacctcagcctcccaaagtgctgggattacaggtgtgagccaccacgccgggtttctctcccagttttttaaaaaatattttaacttttattttagtttcaacggtacatgtgcaggtttgttatataaacgtattattcagtggtttggtgtacagtttattccctcacctgggtatgtactgtagtacctgacaattttttttgtttgtttttcctgatcctctcccttctcccactctccaccctcaagtaggccgcagtgtctgttgttctcctcttgtgtccatgtgttctaatggtttagctcccacttataagtgagaacatgtggtatttggtttttctgttcctatgttagttttctaaggataatgacctccagctccatccatgttcctgcaaacgacatgatctcatttcattttatgtatacatggtatcccatggtatatatgtacattttctttatccagtccaccattggtgagcatttaggttgatctcatgtctttgctattgtgaatagtgctgcgatgaacacacgcatgcatgtgtctttatggtagagccatttaccttcctttgggtaggtaatcctggttcatttggtttttttttttttttgagacggagtctcgctctgttgcccaggctggagtgcagtggtgagatctcagctcatagcaagctccgcctcccaggttcacgccattctcctgcctcagcctcctgagtagctgggactataggtgcctgccaccatgcctggctaattttttgtacttttagtagagacggggtttcaccatgttagccaggatggtctcaatctcctgacctcgtgatctgcctgcctcggcctcccaaagtgctgggattacaggcgtgaaccaccacacccggttaaccccagttgtttataaattgttgaatggagagagtaccttttttcaggcactcagaggactttatcttacttacttttatgataaaataattaagagcccaaactattagtcctattttattttattttatttttttgactttttacaaattattacttttaacaaagaaagcaaaagtggatcttatttccataaaataaaggtttatgttgacaattaaaaactggacatgcacacgattagaaagttcaaacgacacgaaaatgtatacttctccccaaaggaaacgactgtgaacagtttcttgtgactgttttagaaaattgaaatttatacatacatatgtatctcttcttatttgtgaaaagaatatactagtattactataatttttttatttttatttttattttttgagacagagtctcactctgttgcccaggctggagtgcagtggcaagatcttggcacactgcaacctccccttcccaggtttcagctgttctcacgcctcagctccccgaatagctggggttacaggcgtgtgccaccatgcctggctaattttttgtactttagtagagatggggtttcaccatgttgaccaggctggtcttgaactcctggcctcaaatgatctgcctacatcggcttcccaaagtgctggggtaacaggcataagtcacagctcctggcctattagtcccattttttagaagatgcagttgagaaattgtggtagaagacccaccttcaggcagctctgggtcaagatgtcaatcaaagtcatccgatgagaaactattttccccctgtacttaaggtaagagtagcaaatgccgccaaccacaaaagtcacagcaagttgctgccacattctttatggtgatggtgtcaggaattctagatggagggaagcatagtcactccgtgtcaggtggccaggactgaaaatatccaatgcagttgtaccagttttaaataccacgcattcagagaaggtggcagaggtcctgatcctggagtattggctgctttgaaaagtatgtatgggtcgcctctgttttttaagacacctcagccctgggcatgagctgccaaacacagtgcatgcccctcacctgctcaggataggagactccgctggactggcttccctgcttgtgaataggaaggtgctgtgaacagtcagtatctacagaacctcactgtgtttaactctgccctccagccttccattgtggtttttaattcaacttggtttctcctccctcctttctctcctcagccattgatctgatgtacggaggcatctactgttttctgtgccaggactacatctatgacaaagacatggaaataatcgccaaggaggagcagcgaaaagcttggaaaatgcaaggtttggttccacctcagtttacctgcttgatcctgcagttccctcatgtccatcaagggcagacccagtaggagaaagagaagtacctaggtgggaagtggcaggctggtgggaagaggccgtccccaccttcccctaaggcccacagtggagtcagctgaagctctgcatgacaggggaggtggctagtgtcgaggcatgcatagctgcccgtgtgcttgggaccacttccagggtgcttcccttgcaggtcccccatgggcctgcagctgggccaagggaacaaccccagcattacttaagctctcccagggcgcacctgcagatgtggggctgaacgagtgtggcgaggtcacacctctcggggacaggtgactccgtatctggacatccctgagtggtttgccctcagctctgccgaattctagcaagcgatctctttgcagtaatgttatatgtaaacatacctccttcctcccaggagagcagactattttcggatcaagttgtggtagaatctcttttaaaactctggactgtttgggtgatgttaaatccatgtcaacagcgtgcacccaccagatggaaactagacccaccagatggaaactagacccaccagaaggaaactaggagagtctcccagcagccccactgcacagtcagatccttgccatcttgtgagctgccctcacggctctcgcaccagtgtgggttttgcacttgccgtcgccaccgtgtggccacacacactggttattggctacacagagtgagaggagcaaacatgcagtcattttctttattttttatttcttcttggcttccctgagttttttttcctttttttttttttttttttttttttggtttttgattctgacagatgctcatagtggttgacagtgatagtgacatagtgacaggtgtggtttaccccagttgacaggtgagcatctgatctccctggtagcaaagccatcactgtttgcaaaggaaacatatgaacctgacacctgttttacattcttgccttgattactctccattgaaaacaccccagtgttttgagaagggaagaatagcaacaggggctctttcagtgagcagaattatttgtgtttaacaagtcttctctggagagcaatctctgacttgtgttcgctgttcttttccctctcagaaatttaataacattgtgactaagtgtgggtgtattattctgtgcagagcacttaaagcacgggcctaagaaatgtatgtccaggattaaaatggaattcttctagaatcattttataattctgtctatccaacatgctgtgtcttttaaagtattttgaagtattcagaaatgttggttggcatggaacaagtacttctgagcgcatagggtgtgcgttgaatggaatactatgccaattagcatttaccaccactctctgaatattttgtggcacacacgtttttaactgttggatctatcttagtttggtaactcgacgctgagtttatgctatttcagtttgctgaaaagtgcaagctctctccttcaatttcacttgtttgcgggagaatccttcatgtaagttcccattggtgctgatgctgccatctctgtgctgaaggatggaagacatttgaaaaacaactgttttggcattggcgttggggtagttttgactggaggtgctgcttttcttgcaggaaacgtagctcacatcctcataccctctgtgagaagctcctttaagtgttgtgtgtagcccctctcagcacagtagagtttgagaaagccctggtgctgtggatgttgctcactgaaatgcaccctgacagacagcatagcgccacagcttttatgtgtaaacacacttgatgtgaaaatctagctaatagcgcttggaactgtccttcatctgcttaggcgttggagagaagttttcaacttgggaaccaaccaaacgggagcttgaactgctgaagcacaacccgaaaaggagaaagatcacctcgaactgcaccataggtgggtggagcgtgtcgtcactctcagctaggcttctttccagggtttaaaagtaaatacagaattgtgggtttcttaagtccacatgattctgttgaagccctgcataactgtcactcatcaatgtgctcagcaaccagctcttgagcacctgttctctgcagggacctgcagtgggcttggggcgcagagtgatgcgtagcaacagccctgccctcacagccttcagcgtctgtgtgggtaaagggactcaagttgattttggccagggtgaggctgggcacagtaatcttcagggagagaaatgatgtgtgtgagtgtaagtgttcgctgaattttctacaaattgagggaataccctttaaaactttttctttttcttttttgagacagagtcttgctctgttgcccaggctggagcacagttcactgcaccctctgtctcctgggcccaagcgatccttccacctcagcctcccaagtagctgggattgcaggtgcacaccaccatgtttggataatttttgtgttttgcgtagagacatctcaccatgttgcccaggctggtctcgaactcctgggctccagtgatcctcatgccttggcttcccagagtgctgggttacaagtatgagcccctgccctggccctagaacatttttaaaaacctgttttgtttgttcattaggcttcactctgacctggcctgttgtcgtagaaactatatttgtgtaattctgtcaaagcatacaatggctgaagtgggaggggtccatggtggtggacattcttcaataccgttcatgtaaaagtggcataaaaactagcagaatgcgatatctcatcgtgttctggcttgaatgaatgaataaaagaaaatgagtatgtagaggtagaggaagccgctgggatccagcgacacctgtggttcagcacacaggtaactcctgctctctggtgatttgtgtccaggtctgcgtgggctgatcaaccttgggaacacatgcttcatgaactgcatcgtgcaggccctgacccacacgccacttctgcgggacttcttcctgtctgacaggcaccgctgtgagatgcagagccccagctcctgtctggtctgtgagatgtcctcactgtttcaggaggtgagcgccattgacttctgcaggggaacatttctgttactttgttttcaccttcaaaaaaaaaatttaaggtggaccatgataaaggaagatacatttagaaccttttgtagtaagttaatgtttaatatacatgtctattatggaaaacacagttttccaaaaagggaagacctggcgtgatttttggggacgcactgctgactcagaacaaggagaagccctttgagaggcttgtggcagagacttccctggtgggtgacatttgtctctaaagacgggtgattctcccccttcctcttcctccatggtctaccttcctggctcagaaaggcacgcatgtgtcaccctcctgtgtcctcctggtatgcgagtctcctccaccgccaggtctctctaagcatgccccatcagagcctctgtcctcatgagctacgcgctgcacgttggctgttcctgtgggctgcacgtgtggcgttcctgtccacttctgtccccggcatcagagcatggcagcgttcagagcaaggcgttcacggctgccgcctcagccctcaccggctccgtgacctagacatgcttctcagagctgaagcagctcagttacctcaactaataagcaggctggtgcctgttcttcaggtgccttgcacaggagccagccaacagccctggcctgttcccattcgtaacctctgcgagagatgcagccacgccagctcactcatgtctgtctggtcactggtcgcttttgtgggacagccacagagttgagcagttggacagaggctatccaacctgcaaagctgaaattatttactgtccaagcctttcaaaaacagattgccagcctctggtcgagcctaaccgatttcctcaaagtacctgcaatgtgccataactgctggggacacggcccaaataggagaaaggagggtgcagctgggaagttggtgggtggttgtatcactgactttagtgataagctcacttgtgttagattgtttttagactccggcttgttaaggtgtaaattacagtcacacccaccttctagcctatagatagatgagtttcgacgaatgcatagttgtgtaactgctgctactcaagatgaagaactgttacctctccgaactccctcgtgcccctccgaagtcaacccccagtccccagaccctggtagctgccgatctgtcttcggtcccttgagtgtcctttaccagcgcatcatacggatggatgcatgcaggaagtagcctttctgaatctggctgtccctacttaatgtaatactgggtggattcacccgtgtcttgcgtgcatccatgatgtgtgctttcgatgtctgagttgggttccattatgtagatgggttatggtttagttgtctgtttcccagttcagacacatttgggtggtctgtggttttgggttttttgatgagaaataaaactgccctgaattctgtatttgcacaggcaagacccctctgtgggttctgacctggggaggaagccgtgggatggaaggtgtgctgctgggtctgcggctggagttgagctgttggagaggactggctggcaagccctcagctaattgccattagcctcagaggcagagaatcctgtggctgatgctggtgaattctgcataatcacagtgatgtgcttccctttgcggaggtgctggtgtccatgggcctgagtggtttggctagtgctttgaggaaactagtattgggcaaatcgagtcacttttatttgcatgtgatctcatagtagcaagtcataattcattttttaggcttatatgtggaaaactagatggtagaaaggaaaaaattcatatgaggactcgaaaagtccagtgagcccagataaaaatagactttgcaaaaagtagaaaagtaaaatccaaacatttgtgtcaaatgagccacagccaatggtaggcatctgataaaggttttgattgtgtgtactctgtgttcagagtctacatttattcctgacaaggtttccttccccgccctctggcagttttactctggacaccggtcccctcacatcccgtataagttgctgcacctggtgtggacccacgcgaggcacctagcaggctacgagcagcaggacgcccacgagttcctcatcgcggccctggacgtgctccaccgacactgcaaaggtgggccctgggctctgcaccctccaccagggcaggatgttttccttgaaggggaaggaagcaaagcgagtgtatgcactcgtgcaaaaaggggcacaggtgacacattccattgttttgtcatcatagcccttgtcgtcatttgtttctgaagtcaccataactaatgacctcagagaggctcctcctagtttatttttaagaggcgaggaagtagttccagcagtatgacaggtcctcagtgaccgatcacagtgaacagcaaactcttggagccctcttgggcctgtgctttgaggcccctgcctgccctggcatttctgggaccctgtgggttatcaggcctgaggcttctggacatcccccaaacacaacttaatcacccaactgtctccttcccattggggactctccaaaaggactgatggttgctctgaaatagccagagagctgggacacaggacgagcaaagcttctcttggggtctcattggacctgggccatctcccccaacatagtcccacagcctggccccagggtggtaccctgatgatttttcagagttgtgtggtgttggtagttggcaggggcagctcttagcgctggaggtgggaggctgggaatgaatgacttgagccaagatcggctcctccccactcctcatggtggagatcccagtgtgagggacctgcagctgaagtctatccatacaggcagagagactgagaggtgattctcagatgagtgtgggctggtcacttgcaggtcttcctaaagcccgtgctggcgtttctgattcagcagatctgtggggggcaggggcttcttcactcttaatcagttcccagctgatgttgatgccgctggttcagatgccatactctgagaacccatgcgctcaggtcacagggcacctggctgcttgtgagtttcctgtggtctctgggctggcacagctagttgtagccgatatcctatcagttaattttaacttggagtcttttagagaacagagtcctgttctgacggttcaccgagttgaacagcttggtgggctggccttcccatcgcttctcatccgtctcaaggctgtgcacccgggccctaggcgcttacgtacaacctatgggttctgagatcacagcccagaaacaacccacagttgagctaaaatggctggttttggtcaaatgtgactttgggttctgttttcttttggtacttactttttttcctctgaaaaactacgtgatccttttaattcttacctagaaatcaaaggaaagttacttagtagcttaggtagaatttcatgtcctagtatgatttataagagaggaaagagccactgtggaagtgactatgctgttaccccaagcacctagtgagaataacgaagagccttctgtaagcagcagaaagatgttctaaaaatcacttgttcaaaaatgcattgctgttaaatgttcacatgacaaaatgtgacctctgacgtgcttctgacagaattcccttggaaatgtctgaaaagaaatgtaaggttcttctgtttagaaacctggttgccagagctgttcagcgaggtggcctggccacatggccttggttacgtgcattttgtccttgtggccttcacggcatctttctgttcatcttttgttttgttttgttttgtttttgagtcagagtctcgctctgtcgccaggctggagtgcagtggtgcgatctcagctcactgcaacctccgcctcccaggttcaagtgattcttctgcctcagcctcctgagtagctgggactacaggcgcccgccaccatgcccagctaattttttgtatttttagtagagacggggtttcaccgtgttagccaggatggtctcggtctcctaacctcgtgatccgcccgccttggcctcccaaagtgctgggattacaggcgtgagccaccgcgcctggccattctgttcatcattctttgcgccttcctgtatggatattcttgtcctctgaattttgtcccatgaatttgagatccctctgggaagcatttttctctctaatcttaaaccttctgctctcagaagacttagtggcccttctctattcctctgtcatgattcaacgtctttgaactgtgatgtatatacaggtgtcctcgtgccctgtccccactgtctagtgaagttatgtagaatatgtattccacacacgaattaagttctgctacttaagtttctttttcacagatctgcacacatggatatgaatgaagtgtgtattgaatagagagggtgggagtggcacttccagatgcaactgactggaagacacgctgtcccctgggggctctagctgatgaggacagcctgtgtcctgcggtgtcactttctgaacttggggcaccatgatacctactcagggagggaggttgctggggcttccccgggtgtacctggcccaccatatgttcagctgtctcactggaacaatattgattcagtcattctttatatgataatgggaatcgattattctgctcagtcactgggcattaggtgggttttcttggcaagactgaagctgtggggctcttgttagggaatgagaaaaaggagcattgaaaatccaagtgctgtgatttctcgtcatattaaaataacaaggacaccctctgctaaaatgaggagtgtcctcacatggccttttaaagcgttggccctggctcccccaggcttctgcagggtgaactgctcttcccttagagactccccatatttggggagacactaatcccagagccgtggtctgtctccaggtgatgacaatgggaagaaggccaacaaccccaaccactgcaactgcatcatagaccagatcttcacaggcgggttgcagtcagacgtcacctgccaagtctgccagtaagtgagaggctgcgtgctcggcaatatcaaaccctctggggccgtactgacatcctcccagtctccagagctgtgtgtgctctgagaggtctttaaggaggctatgagataaatgattaatagacgccatgagagcgaaggttgtggggtgggggtgcttcctcttggggaggtcgtagggcaggtgtcccctcgggatgcgagcccttcgtgttgaggtcttggctgttgtctacagccagcagtgtgttcttggaagcttcccctaccattttgcatcttacagtccttgaccagggaccaagtgaaagagccctcttcaagaaggcgtggatcatgcatggtggattgtttttctacgtgcttcgaagtgtgttagttttcattattttatggtttctggttccattttctgatgtagtggccctaattcttctcagatgtggtctctgcttagagcctcaagtgttgagtgcagggagaatccattgctttgttaggtcaggggaccctctcacccaacctcagtgcatgctacaggttttttgtttttgtttttgtttttttcaggcatggggtcttgtgtatgttgcccaggctggccttgaacccatgggctcaagcgatcctccctccttagcctcccaagtagctgggactacaggcatgggccaccgtgcctggctctgttctttacttcagttgaagtttaaaaaccctggacatgatccaccgaaattatttcagaacccgaaatggactgtcacttctaaactgcataagacgagcaaatatcgggaaaggccagtgctgcctgtgtcacgggggccattttctataaggagcatagaccgtttggggccttgtctctgagtattagaaaccgagtttgctctgagcaatttggacctcctcgctgtcccttaactactgaattccattagtaggagattgtctcaagatttaaatcctgtataaatatcgagagtaaatttcccagtctgcaagttttcattttttatattgttaaataaatttctagcaaggaactggccttgtgaaatgcagcattgactgtccagtgcaggccaccgggcctggcctgggcacgctctgtgaaatgtgcaggggtctccagtgttgcctagggtcacaggccccaagttctagatgcagctgagatagacctgtggattcagagcctctgacagggcccatgagtttatcctcctcccaagtccctcagtgactgtgatggtctccagactgggaagtccttgcttgaggagcgcccctcgccttccgagttcacacacacccctccccagggccaccttgggagccaggacacgttgggtgtgagcactgctgctcttgctcctgccccatcccacctgagtgtcactgtgacaaagggcacagcggggaagggatgtgggaacggcttccaccccgggttgcctctggagctgggtgggtgtcagtcctcacagccattgttttccctctgcttccagtggagtctccaccaccatcgaccccttctgggacatcagcttggatctccccggctcttccaccccattctggcccctgagcccagggagcgagggcaacgtggtaaacggggaaagccacgtgtcgggaaccaccacgctcacggactgcctgcgacggtgagaggcctgcacccacacggcgggggcgtgtctcctggccagaaggctgtgctccatcaggaccaaagcagggctctttcacatgcccaggacagagcctgggcaaaggtgcagcatgagcctggattggctgcagtctcttgtgctagtttgtcctttgttttggccagatgactcaatatttctgtcccccagcttcgcacagcaccaggtgtcagtgtcagcagctgctactccaacctccgcatgtaaatgaacccagagccaaactggctgctcccttagcccttgcactaatcacctaccccggagtgtgagctgagatgcgcccgggcctctccccatggtccacggccttctctgcacatgattaaaacttagttgtgatgttctgtactcttagggctgtttttgaaattgtgcatgtactgcttcatttgggataagtaataatatttacaaagtgatttttttttttttttttgagacagagttgtgctctgtcgaccaggctggaatgcagtggtgcgatttctgctcactgcagcctctgcctttcaggttcaagtgattctcctgagtagctgggactacaggtgtgcaccaccacgcctggctaatttttgtatttttagtagagcgggggttttaccatgttggccaggctagtctcgaactcgtgatatcaggtgattcacccacctcggcctcccaaagtgctcacaggcatgagccaccacacctgtgagtgatttttaaaaaaaaatgtatttaagtagctgtagcatacaattgtaaagacagcagaaaaccttcctaaaatttgtctattattttatagcctttgtttta

SEQ ID NO: 655 - DNA, 32742 bp, Homo sapiens
  source 1..32742: mol_type = other DNA
tagccctttcccggggtcctgccccgcgcgtgcgcactgtggttctgcgcttgtcatcatggcgacgcggggccatgtgcaggaccctaacgacaggcgcctccggcccatttacggtgagtgtcttggaccagcccgctcgccagcccgacgcgccgagggctgccgaggctggggcgaaagcccaggaggggtgctgagggccggcgcgcgggccgggcaggcgcaggggggcgggccgcgcgggccactaggccgcagccgcgggcctcgcgtaggcgccggcccaaccttcctcagccttggggtggtagtggcgcggtctgggcagcagctggtcggcagagctggcctgcttggcaggccccgtgggacgcgtggttctgcagacacctgcgctacccgcaggctgcatcgttaccgccgctcctagggagaccggagatctccccgaaggtggaagccggctccggcacgagggtgggacgccctgcctgagggaagattccctaccagagatttttttttatttacgggaattgggcctagagggttgtctgactaggtgggcttcggtgcataggagaaactgaggtccggagtggggaaggggctgacgcaaggtcacccagatcgagtcaggagcaggcccgagattccaggctcccaatccagagctgttgggtggagaagcagctactctggtcacacgtgggaggcggggggagggggtcttgggcctaaaatagcggtgaagagattgtgatagctcgtgtcagaggggcatgcagagctactggagggcttctcctttctgcagcttctctgtggttttctctgcagctttccttccctgtgctaagcagatccctctccacaactcttacctcaacccgcagacttgaagaccttgatgtcatctcatccatttaccctggtagtgaaaaatcacagattttgagtttgggagaaacccttttccaataaccgaaatgtgtaattggattggtcctttttgcatttcctttcctcttagatggttttatggtcttggtctatctcacttaatggtgaggaagcttcaaggtcagtggtttttacaaaagtagacatcgtatttatagacctcatgtggatgttactaaattggaggcttctctccaaggtgggaatcgttttgggagcggggggcggtggttaactttgtttctggccacagttagtccggcttttatttcataatttgtgtgatttttttttttactctcacatctcatttgattttagcaacaatcctatagctaaggtttatagatgactcattatgacagtcactggccttggccttttatatgggttatctaatataatcttcacccattctcaagaggtggctactgttttttcctgcccctgaaccctttaacaacaacaacaacaaaaaaaaaaacagatgaggaaactgaggctttattgttgttgtgtaatttgtctaaggccactcagttagtatttcttggagctagaatttgaacccctgtggactgtttcaggctcaccttttttttcttttgagatgagtctcactctgtcgtccaggttggagtacagtggcacaatctcagttcactgcaccctctgcctcccaggttcaagcgattctcctgcctcagcctcctgagtagctgagattacagttgcacgccaccaggcccagcgaacttccatgtttttagtagagacaggagtttaccatgttagccaggctggacttgaactcttgacctactcagcctcccaaagtgctgggattataggtgtgagccaccatgcctggctccaggctcaccttttttttttttttttttttttttttggagacagtctcattctgtcatccaggctagagtgcagttgcacaatcacagtgcactgcaaccagcctccgcctcctgggttcaagtgattctcctgcctcagtctcctgagtagctgggattacaggtgcccgccaccatgccggctaatttttgtatatattgtagagaatgggtttcgtcatgttgcccagtctagtctaaaactcctgagctcaagcagtcctgcctcagcctcccagagtgctgggattacaggtgtgagccactgtgcctggcccaggctcaccttcttaaccactgtgctagaaactacctcactttgagctgaagacactgatttgcctgaggtcacacagatggtaagtggcagagaaaggactctgatttcctatttccccggggctgcatattctcatgcccttgccctccagtgtatattttcagagggcagagatatatatacaaggtgggtgatggaaggtgagaactgaatccagggttcatagtttgtgactcattacagctttgtgcagcagctgcctgcagacttttttttttttaaactaaaaacactcaatactttcaagaataatttgatttttaaaattgttcttgaggaccaaagagaatttctttggtcccatagttatttagaattaatagtgttttgactgtctaatgggaaacaccatgtccatttcacatcactaaacatcaggatatattaacaagttatattctcaaaactgaagtcagaattatgtagcttttgtaacatgtacatgggaagaggattagaagaggctttcttcagtaattctaaggcgattagtataaactggcaggactaggaaaagaacggtacagactgtccgtgaattcagcacttaagcacatttgacttttgaactccacacttttgttgtttaaatacattactacccccaaacaaccatggttccttgaattcagacattctgacaaatgaacaaactcatctatggtggtacttgcccaccagccaaaaattcaacaactatcagcattaattagtgtttactggtgggctgactgccctattaggtaggtaagattattgtgatcaaactgaagcctagagattaacttgctcaaggttgtagctaccaagttgtagagctgggatttgaacatagacattctcactgagagctcagctcttcaccaagttcagattcagtagcatcactgtctttgtacaacagtatttgtactgccaaggtttcaggatttattttacaattgtgttggaaaccttgcttggggcctcagctcttgctggaattcattgagggtatatgtggacagggctatgtggtgataaattgtggtgggttgaaattttactggtggtgtctagggttggaatagcttttctgtgtgcatagatttgaaacatcttcccagtgcatctcacattactaataagtttgggtattgcatttttcgtttttgaaaacctccacccatgaccttactggaacccatacttgattatttggtctccttttgctaaaattattctcttttgctacgtagttcccagcagattttgtactcttgtgtgacttggtaagccccagtgccttctttcgttatttttttgagacaggatctggctctgtcacccaggctggagtgtcttggctcactgtaacctccacttcccaggctcaagtcatccatccacctcagcctcctgagtactgggactgcaggcgggcaccaccacgcctggctaatttttgtattttttgtagagacagcatttcaccatgttgttcaggctggtctcgaactcctgagctcaagcaatctgcctgccttggcctcccaaagtgctggggttacaggcgtgagccactgcgccctgcccattattattattatttttttaagaaggagtcttgctctgtcacccaggctggaatgcagtggcgcgatcttggctcactgcaacctctgcctcctgggttcaaacagttctctgcctcagcctcctgagtagctgggttacaggcatgcaccaccatgcccggctaatttttgtttttgtttttgttttgtttttttttttgagatggagtctcactctgtcctgcaggctggggtgcagtggcgtgatctccgctcactgcaagctccaccttccgggttcacgccattctcctgcctcagcctccagagcagctgggaatacaggcgcccgccaccacgccaggttaattttttgtatttttagtagagacaggatttcaccacattggccaggttggtcttgaacttctgatcatgtggtccacttgcctcagcctcccaaagtgctgggattacaggcgtgagccactgcacctggccccattattcttaattttaaaacattttcagtggttatggattagggaagggaagggatggagggagataataaatatttgactctgttttgttatgcagcctcctctaccccatacttttatttatttatttttctttcttttttttcttttttgtttttaatttcacgctcatatttttagataattggaagtggaattgatggtcaggtatggcacttaataaatttgtatagaatatgggaattgctaggtcagcaaattgcataatagaaatagagaaagttcaaagtagaaaaaatgtgtgcatagtctttagaatatacacacatacacaggcatgagatcccttgttttaatatgtcgtactgacctgcagtcttggattagcctggatcaggtgtaagatattttccagtgtgtctcccgggtgacagtcacttctttgctgagttaggacatttctcttgggtgcctggctcaggtaattattccactatagttcatagtttaggagttcctgaccccaggatggtgtgtgatactggtctgtggcctgttaggaaatgggccgcacagtaggaggtgagcagcagggtgttgtgggggagagcattactgcctgagccccgcctcctgtcagatcagctcttaggagtaggaacacaaaccctgttgtgaactatgcatgtgaggaatcgaggttggcgctccttatgagactctaactaatgcctgatatctgaggtggaatagttttatcccgaaaccatccctccctgccatctgtggaaaaattgtctttcatgaaatcggtccctagtgccaaaaaggttggggaccactgctctagttcataaatgaaaacttgcaggtcctcaatcaaaagtggtatttattctgacctcctcttggacagtgtggtagctttgtgagtctggtcctattttgcctcagaagtgacagggtaccttggtgagtgaagactatcttgcgtttctgtagaaaagtcacttggcacaacctatttttttccattctgaaaatatgaccatttaaaaagccctgacttactagaacttctctcaatgaatctagaacttccatcaccattggatggctgagaccacctctgccataccaaaaccttgctcataaccaaaacagtccctgttggtcttttgccctggacctgtgacattctggactatttttgtgttcagttttggccaagtgttaacaagcatacaaagctgggcacagtggtttggctgggtgaggtggctcatgcttgtaatcccagcactttgggaggccgaggtgggtgggttgcttgaggccaggagttcgagactagcctggccaaaatggcaaaaccccatctctactaaaaatacaaaaattagccaggtgtggtggcaggcgcctgtaaccccagctactcaggaggctgaggcagaagaatcacttgaacccgggaggcggaggctgcagtgagctgagattgtgctactgtactccagcctgggggacagagcgagacttcatctcaaaaaaataaaaaatagggctgagtgcagtggctcacgcctgtaatcctaacactttgggaagccgaggccggcggatcatgaggtcaagagtttgagacgagtctcaccgacatagtgaaactccgtctctactaaaaatatacgaaaaattagccgggtgtggtagtgtgcatctgtaatcccagctattcagaaggctgaggcaagagaatcgcgtgaacccaggaggcggaggttgcagtgagccgagatcgcgctattgcactccagcctgggctccagtgcgagactccattgcggggggcgggggggcagctagtgtgatggtgcatgcttgaacccaggaacttcaagctgcagtgagctgagattgtgccactgtactccagcctgggcaacagagcaagattctatgtcaaaacaaataaacaaaaaactattctgctgtcttagctgaataattcaaacaaacaacaacaacaaaaaaccctgacctagacttttaaactgaaaatgaaggttttagtgcacaaaaatattcttagatgaatacatagattagagggtagttgttgaaacatagggcaagatgaagagattagtacatttctttttttttttctgtttttggagacaaggtcttgctgtgttgtccaggctgcagtgcagtgatgtgaacatggctcactgcagcttcgacctcctgagctcaagtgatcctcccgcctcagcctctggagtagctggcactgcaggcacatgccaccatgcctggctagttttttaaatttttattttattttatttttttgagatggagtttcactcttgtcgcccaggctggagtgcaatggtgcgatctcagcttgctgcaacctccgcctcctgggtggatcacttgagtccaggagtttcagaccagcctggccaacgtggtgaaaacccatctctactaaaaatacaaaaaaattagctgggcatggtgatgcacgcctgtaatcctagctactcgggaggctgaggcaggagaatagcttgaacccaggaggtggaggatgcagtgagccgggattgcaccactgtactgcagcctgggtgacaaagctagactctgtctcaaaaaaaaaaaaaaaagttgaaaagatttggaaaaaatttaatagctggtagccatcactaatcactggttctttgaacttcctgttgtgatcactttgtattatcttttttttttgatagattttttaagatgcagtctcactctgtcacctgggctggagtgcaatggcgtgatctccactcgctgcaacctccgcctcctggattcaagtgattctcctgcctcagcctcccaagtagctgggattacaagcacctgccaccacacctggctaatttttgtattgttagtagagatgggatttcaccatgttggtcaggcaggtcttgaactcctgacctcaagcaatccaccttcctcggcctcccaaactgttgggattacaggcatgagccaccgcacccggcctgtattatcttatatatatatctttcatttttctagcagactgcccttttttcccccatacaatttgttcatttatgcattccttcattcaacatttattgagggcctgatatgtgttaggcacaatatagatgcaggaaatgagtactaaacagcacagacatagtttctgctttcaaggagcttatctccttgaaatgacagtacacatcaccattacagttatgttaagggatttgaaggaataggacagtttgccatgagagcatacaataggggcatttggactgttggggtcaggtcaagaaaaggtttcctgtggaaatgatgttttactttggacatgaaaagagaaccagggttaggcaaagagatggggagagggtggtgaagaccctgagaaaaggagcttggtccacttgaggatgtaagcaaaggcttgtgcagttggaatgaagaaatgagtgaggaagtgagatgaggctggggtgggcagcgactcagctttgtaatccattttaaggatattgaaatttgttttaaagacagtggaatcaggccgggtgtggtggctcacgcctgtaatcccagcactttgggaggccaaggcaggtggatgacgaggtcaggagatcgagactatcctggtaacacggtgaaaccccgtctccactaaaaatacaaaaaattctccgggcgtgatggcgggcgcctgtagtcccagctactccggaggctgaggtaggagaatggcgtgagcccgggaggcggagcatgcagcgagccaagatcgagccactgcactccagcctgggcaacagagcaagactccatctcaaaaaaaaaaaaaaaaaaaaaaagacaatggaatcaatacctgtgaaaagaaagaaaaggacagtggatgacattaaaaggatttaaccagaggagtagagtgataaggtgtgcatgtaaaaaagatagctctgaatactgtgtgggaaataaacctttaaactaaaagggaagcaaggccaggtgtggtggctcacgcctgtaatcccagcactttgggaggctgaggcaggaggatcacgaggtcaggagatcgagaccatcctggccaacatggtgaaaccctgtctctactaaaatacaaaaaaattagccaggcctggtggtacgagcctgtagtcccagctgctcaggaggctgaggcaggagaatcacttgaacctgggaggcagaggttgcagtgagccgagatcgtgccactgcactccagcctggtgacagagcaagactctgtcataaataaataggaggcaaatgtagaatgggtcggtcagttaggaggcattattcatttttaggttcatccttgtcccttgcaatcttgcacatggtaggtatttaacaaaggcttgctgagtgaaggaatgtgtcttctgtaatttgtattcatggtaaaagcaaggctcctattctccaacttttagaatttttaagtaaaggatattgtgtttaaagatggagctctcttctatttagcgtttttataagttgtggcaatatctttaatagtctctgaaattcttgtaggaagtggaaactgagcatactatttcagctgctaaggagaccattcatggcagctgcaagaacatgcagatgaaaaactttcctttttatttgcaaaattgatacttttcctactgtcagtatccatccctcagtaagattggatgaacaaatcccaggacctcttctccagggcatgtggacagcaggcctgcatgtgtccaggcctgctgctgcctgcatctccaaggactagtagcttctttgggaagtgttacctcaggagtgcagcttgtgcgttcattcaacaaattttgatagtgtcttgccaatgatttatcccagttcttcccaaatttctatcgttcttttacctaatctcattattttagctgcattatagtattatctgtgctatcagttaatatttttctccaaggtgacttttaaaattaaatttattttataattatattattgctatgagtggaaaacttgtatcacttgctgtaggaaaataaaactgtaaaagtaaagtacaatgaaaactaaacaatgttattaaccagattctgatacttgtgaaacttcaggacctattccttccttctggaaaaaaaaaaaggccgagtgcgacagctcatgcctataatcccagcactttgggagaccgaggcagacggatcacgaggtcaagagattgagaccatcctggccaacatggtgaaaccccgtctctactaaaagtacaaaaaaaattagctgggtgtggtggtgcgcacctgtagtcccagctactcaggaggctgaggcaggagaattgctttaatctaggaggtggaggttgcagtgaatcgagatcatgccactgcactccagcctggcgacagagtgagactctgtctccaaaaaaaaaaaaagatactagcaatttttagagaaatagtaggctagcaccaaactgacactttctccttaatgtaaaggaagtattagaaaagagattagggccaggcgtggtggctcacgcctgtaatcttagcacaatcccagttgaaccttggaggcggaggttgcagtgagctgggatcgcgcaactgcactctagcctgggcaacagagcgagtctcaaaaaaaagaaagaaagagattgactttttcactgtgagtattatctagggctgtctgcaaggactaaaaacatttcatttggaatggcactcacccgtgctttggaaaatactgctttaaccaatacatcttattgtttccattgcctgatctgtggatggctgattttggctgactcctgttattaagggaacagcaccattcctcatggccaaactacaattccccttgagtagctttttaaaaagacttactaagaagacagatttaggatatcgtttttattggcttgttttctccaaggactacttaacttatattacagatttagtaatgtaaaatgaaaataaactttcccaagagacttagcagctaattaatcacactctcctaggtccaggaaatgggagcctgatacctggctgaatgtggtaaagtgttttaaactctttcaggtgaagaaacaatctctttgataccagcgcaagtaaagacggttactgtaaatccttgtgggagccaaggcaagagtgtagtgccccaggacctgatggaaatgagaaagttgtcaggacctgaagcttctttttcagttgctcatctctgcttttctctgtgtctattcatttctctgcttggttttttttttttttttttttttgagatggagtcttgctctgttgccaggctggagtgcagtggcacaatctcagctcattgcaacctccgcctcccgggttcaagtgattcttaggcctcagcctcccaagtagctgggattacaggcgtgcgccaccaagcccagctaatttttgtactttttttggtagagacggggtttcaccgtgttggccaggctggtcttgaactcctgacctcaagggatctgtctgcctctgcctcccaaagtgctggaattacaggcatgagccgccgggtctgctcggttcttcataatgttttttcctgcttactcatcaacttacccagaacccaacatgttgacttttgtagccacaccaagctgtggctggagaagggagggttcattagcctcacccgtaagcttaatttctctagattttccaataaaggtaattgacatttttcatttttatataaatgctgtgtgaataaagagtcaagagacaactctttttttttttttttttttgagacggagtctcgctctgtctcccaggctggagtgcagtggcgcaatcttggcttactgaaacctccgcctccagggttcacgccattctcctacctcagcctcccgagtagctgggactacaggcgcccgccaccacgcccggctaattttttgtatttttagtagagatgggctttcaccgtgttagccaggatggtctcgatctcctgacctcatgatccacccgcctcagcttcccaaagtgctgggattacagccgtgagccaccacgcctggccgagacaactctttttctttgctgcacatcaatcaacttgcatccccgaaagtgccttcaaaatagaaattctggagctgccactggtaaactcagacttaaaatttttaagattttccacctgaggttccttgtaacttactgactctggctttcagttttatagttagagagtaccaggaagaaacctgatttacccagcttggatcaaatgtccaacctggggtgggctgcagttacatggtctagacatggtcatctagtcctaccccttcagcaggggcactggaaaccatttccagacaagagggcatgggcaagtaggtacattatatcagaacctcgtcaactacagaggggaagggaaaaatacccttatagtcctaacctctggtctgatccatttatgggcagaccttcagagatgggtctcatcaaagatgtttaccctttgagaaggcttcaagataggttctatgaacctggaaccttgcaggaccactgagtcagcaatgacttagaactgactcagaatgagatcagcatcaagttatgaggaagagagggtgtcgtttattgagctggtttatctttgtcagatagtttataaggacaaatgatggcctgtcagttcagctaaggatttaagaaaactggtattagatgtttaggtatttaggccaagattatgtgcttttagatatctgtgattctccaatgcctctccagaatattaggtctttggccttcctctctaaattgtgatttcctacagagtaaggcttcttatctttttacctagcattattggtgctcatcaatattaagtgcattaagtgcattgaactcatgcattcatgagactaagttttagttaagtgttaattgcagaaaaatttagtatagtaaaatgaaagtttatttctgttctgtgggacactctgagccaccagggtcatagattattttaagttgtctgtgcctttgctgatagggaactttgatgagcaaagaggaacctggtagtggtagaggattgtgaactggcctgtgttcagtcatcattgtatatttagaattgacagctactgtactgttttcccatttataacacttctcatttttcttctctagaaatgaatctttgcttttgttagactttttaaaagaattaatagactgtttttagagcataaaactgctttatggtttacagaaaaatgagtagaaagtacagagttcccaaatactccctctccccatccccatggtttcccttattattaacaacttggattcatatacgtttgttaccattgctgagccaacatgatacataattgttaattaaaatccgtaaatagtttaggcttcattctttgtgttgtgtattctctgggtttgacaaatgtatgaagacctatatccaccattacagtattatatagaatgtttcagtgccctaaaaatcccctgtgctccacctatccatcccaacctccatcctctgtcaaccactgatgattttactatctgtatagtttttcaccttttccagaatgccatgtaggagttatatagtatatagccttttcagattgggtttttttcccttagcaatatgaatataaggcttcctccatgtctttttttttctttctctctgtcttttgtgcttgatagttcatttcttgtttttttttttttgtttgtttgtttttgttttttttttgagacaaggtcttgctctgccacccaggctggagtgcagtagtgcaatcatagctcactgcagcctctacctcccaagctcaagcagacctcccaagtagctgggactataggcatgcgccaccgtacctgacaaatttttttaattctttttttttttagacggagtctcactctgtcactcaggctggagtgcagtggcgcgatctcagctcactgcaagccccacctcctgggttcacgccattctcctgcctcagcctcacgagtagctgggactacaggcacccgccaccatgcccggctaattttttgtatttttagtagagatggggtttcaccgtgttagccaggatggtctcaatctcctgacctcgtgatccgcccgcctcggcctcccaaagtgctgggattacaggtgtgaaccaccgcgcctggccaaatttttaaattttttctagagatggtgtcttgctgtgttgcctgggctggtcttgtacttctggcctcaagttatcctcccgcttcagccttcctaagtgctgggattgcaggcatgagccaccacactcagcctaacacaattttatggtgggtctccatattccttaaaacttgaaatgtatcagctgggcatggtggcacactcctttcacacatgtactcccttcactttgggaggctgaggcgggcagatcacttgaggtcaggagttcgagactagcctggccaacatagtgaaacctcatctctagtaaaaataccaaatttagctgggcatggtggtgcacacctgtaatcccagctactcgggaggctgaggcaggagaattgcttgaactcaggaggcagaggttgcagtgagtcaagattgtgccattgcactccaacttgggcgactgagcaagaccctgtctcacacacacacaaaaaagtactattttccctacatccttgcctactcctgctattattgaaattcattccctacctcccaatcttatgggtaaaactttctcttatttttttcttcagcaaattagacttaactctgtggcaaagtcagtactcattaaatatatttcattgaaggaacatagtccacttggtagatttgaggcctgaatactagaaaggtttcttttttggtttttattttaatttttaaaagattttaagattttggtgactaaactcattacttatccatggataaaaatattaatgtcatctcatctaaatatgtatagtcttgaatcttcactaaggactacatagtgtgattatattacttgtagatgagagatgactatagggacgtaagtttgtattcttttttttttttttttttttttgagacagagtctccctctgtcgcctaggctggagtgcagtggcgccatcttggctcactgtaagctccgcctcctgggttcacgccattctcctgtctcagcctccccagtagctgggactgcaggagcccaccaccacgcctggctaattttttgtattttttagtagagacaggttttccaccatgttagccaggatggtctcgatctcctgacttcgtgatccacccacctcagcctcccaaagtgctgggataagtttgtattcttgaccgtcctagccatttatagttaaaattagatccataatgtttttatttgttgaaaaaaatttttaaattaaaaaaaaaagtttttttgaatcagggtctcactcagttgcccaaactggagtgcagtggcacgaccgtggctcacactgtagcctcaacttcccaggctcaaatgatcaccccacctcagcctcctgagtagctgggattacaggtgcatggcaacatgcctggctaatttttatatttcttctagagacagggtctcactaagttgtcagagctggtctcgaattcctgggctcaagtgattcacccaccttggcctcccaaagtactgggattacaggtgtgagccactggactgtgcccatgatgtttttattattttgttttattattattattttgtgttattacttttttctgaggcagggtgtcactgttttgcccaggctggagtgcagtggcatgatctcaggtcactgcaacctctgcctcccaggttcaagcgattctcgtgcctcagcctcccgagtacctggggctacaggtgtgcatcaccactgcctggctaatttttgtagttttagtagagttggggtttatccatgttgcccaggctggtctcgaactcctggcctcaagtgatccatctgcctcgggctcccagagtgctgggattacaggtgtaagccaccacgcccggcctccatgatgttttatatagcaaattaagatattttccaaaatatctcataccagttggtgcattttttatatttgttattgaaggaatataataactgtcacataatttgttttttcatagattatcttgacaatggtaataataaaatggcaattcagcaagcagataaactgttgaagaaacataaggatcttcattgtgctaaggtaacttcatttgcccttcagttacttacctgtggcgggttatatttgtaattccttaccttaaagagaaaggagggccgggcatggtggctcaagcctgtaatcccagtactttgggaggccgaggcaagcggatcacgatgtcaggagtttgagaccagcctgaccaacatggtgaaaccctgtctctactaaaaatacaaaaattagcctggcatggtggcgtgcgcctgtaatcccagctactcagtaggctgaggcagcagaatcacttgaacccaggaggtggaggttgcagtgagcggagatcgcaccattgcactctagcccaggtgacagagtgagactccgtctcaaaaaaaaaaaaaggggggggagaaaggatgttaaatctctttagtgactattagtgtcttttgtttttgagatggagtttcactcttgttgcccaggctggagtgcagtggcttgatctcaggtactgcaacctctgcctcccagattcaagtgattctcctgctttagcctcctgcgtagttgagattacaggcatgcgccaccacacccagctaattttgtatattttttagtagagatggggtttccccatgttggtcgggctggtctcaaactcccgacctcaggtgatcctcctgcctcagcctcccagagtgctggggttacaggcatgagctactgcgcccaactgactatttgtgtttttttctcggtactttataggtcagttatttccatagtcacttacatgccacaagtggtatttcttttttcgttttttttttcttttttgagatggagtcttgctgtgttgcccaggctagagtgcagtggcacgatattggctcactgcaacctctgcctcctgggttcaagcaattctcctgcctcagcctcctgagtagctgggactacaggcgcgtcctaccacgcccggctaatttttttgtatttttagtagagacggggtttcaccgtgttagccaggatggtctcaatctcctgacctcctgatccgcctgccttggcctcccaaagtgctgggattataggcgtgagccactgtgcctggctgtgatatttcagtaaaagctagctgtttatttctttgcatattacttacctaatttattttcacagaatccttttaagcaatattgtgcacttctttttttgagacaaggtctctatcacccagcctggagtgcaatagcacaatcatgactcactacagccttggccttctaggctcaaatgatcctctcatctcagcctcctgcatagctgggactacagggtgtaccaccatgcctggctttttttttttttggagataaggtctctctcaccctgttgcctaggctggactgcagttgcctaggcatgatcacagctcactgcagctttgaccccccggactcaagcgatcctcctacctcagcctctcgagtagctgggaccacagatgtgcaccaccacacctggctaatatttaaactttttgtaaaaatgggatctcaccacgttgcctacctaggctagtcttgaatttgtgggctcaagcaatcctcccgcctcggccttccaaagtgctggggttacattcgtgagccattgcacctggcctatttttttccttcaaattttttctagagatgaggtctcactgtgttgcctaggctggtctcaaagttctgggctcaagtgatcctcctgccttagtctcccaaagtgttatacgcatgagtgcaccatgccagtcctattgttcactttttttttttttttcgagacaggatctccttctgtcacccacgctggagtgctgtgacgtgatcaacctcccgggctcgaggagtcctcccatctcaacctgtcaagtagctgggtgcacaccaccatacccagctaattttttattattttttgtagagatggagtctcaccacgttgcccaggctggtcttgaactcctgggctcaagtgatgtgcctgtcttggcctcccaaagtgccgggattacagatgtgagccgccgcacccagcctgaaactagtatatcagcaacctaggcataacttaatacttgttctttcagatcggctttctttggttcatatttccttttctgtctttttaaaaactgatttttcttttgttgctatcaggttttaaaggcaattggtttacagagaactggaaagcaagaggaagcctttactcttgcacaggaggtggcagcccttgaacccacagatgacaactcactgcaggcactgactatcctttaccgggagatgcaccgacgtatgtttctttcttttcattgtttttaaacttgagctgaaaattttggatatttctgactgtttgcccttgtctgatttctcactcatgatttgaatggatacagtaggtagaataacgcattagccagggtttgcgagaactgtagatagaaaggatagtttacatgcattaggatccttgaattggaatgagaattaaagtgacttcatttgtgatattttgatctgctaaatggaggcttcacccttattttcactttttaatatggaaaatttcaagcagacaaaaatagaatagaataataaaccccattgttctcattatccaccttcagcaattaacacatggcccattttattttgtttttaccctttcccctggcagattacttcagagcatatcctaagtagtccattgtttcttctgaaataaaggtttttattgttaatttcttaaatattttattgtgaaatcatacatatttttcatagtacatattatacaataatcttgtttatgtaacatataagtacatttgatgtgtaataatgaaaactcatgaacctaccacctaatttaagaaatggagcgttgccaggcgtagtggctaaaacttgtaatcccagcactttggatggccgaggctggcagatcatttgaggtcaggagttagagacagcccggccaacatagggaaaccttgtctctactaaaaatacaaaaattaactgggtgtggtggtgcacgcctgtaatcccagctacttgggaagctgaggcaggagaatcgaaacttccaccttctgagttcatgcatcctctcctgcctcggcttcccaggtagctgggattacaggcatgcaccaccatccccagctaatttttgtatttttagtagagacgggtttcaccatgttggccgggctggtctcaaactccttacctcaagtgatccacttgccttggcctcccaaagagctgggattacagccgtgagccaagtgcacctggcctcctcaatcaatcttaattctccttttacctaccaagagttactcgctatcctgaatattttttattctcttgcttccctttaaatgtttattacatttatttctcttagtaatacattattagttttgcttaattttaaacttttgttagtgcatctgtactatgtatattctatgacttgcatttttcatctaatagccaagtggctatagttaatccattttcactaccacaaaatatttcactgggttacattacaatatctaggagtagaattttcaagtcatggggtaagtgtatgtttagcttaaagcaagataatgtcaacttcttttataaatagaatagcagtttttgagttctgattgcttacatgcttgtcaacacttggtattctttctctcttcattcattcaaatagctcagattgtaacatttggtatttgtaaccttaatcatttttgccaatttcttttgagacaggattttgctgtgttgtccaggctagtttggactcttaggctcaagcaatccgcctgcctcagcctcccaaagtgctgggattataggcacgaggcactgtgctcagcttcaattttgtttttaatttttacaaaagataaaacctaagagttgaggtattatatctgagtatttacagattgtgttgatttagggatatggattcttctccagtgttttaaaaaaaatcatttactccacaaatattggtggcatgtttctctatgactggtattctatcagagtcaaagataaaaaatgcactttcagccgggcgcagtggctcacgcctgtaatcccagcactttgggaggctgaggtgggtggattacctgaggtcgggagttcgagactagcctgaccaacatggagaaaccccatctctactaaaaatgcaaaattagccgggtgtggtgatgcatgcctgtaatcccagttacttgggaggctgaggcaggagaatcactcgaacccaggaggcagaggtttcagtgagccgagatcgcaccattgcaatccagcctgggtaacgagcaaaactctgtctccaaaaaaaaaaaaaaagcactttctgttgtcatggcactcattgtctataaggggaaatagatcactagacagtatactacattatgtgttaataaatgctatagtacagcctgggcaacatggcgaaacactgtctatataaaaaataagccagttgtggtggtatgtgcctgcagaacagctacttgggaggctgaggtcggagaattacctgagcttgaaaggtcgaggctgcagtgagccgtgattgtgccattgcactccagcctgggcgacagagtgagaacctatctccaaaaaaaaaaaaaaaaaaaaaaaaaactacaatatacttacttatataagattccaagatggcagagggaggcagtggtcaaattgcagtggagaagcagagatggtgttcagagaaagtcttacagttcagcttacatttgaattgggtcttggctgatgttcactaagataaaagagagaaaaggagaattcaggcagagcgaagagtttagaggcatagagttatgtatgatacatcccagagaatctggtggaactacaaatagtttgtggctacatgataaagtgctgagggaaagaggagacagaggccagatcctataaggtcttatatgttgtaaatgctatgagaaggcttgacctattccatgcttcatttaaacaccacctaaccaagagatgaatgatgattggatgaggcaaagcagatacttcttctataatgataggagacatctatttctgccaaataggaagaacattaaatgccattagaatgttcttgaagtataacttaaatcttatttctctttatcttagcggagttagttacaaaactttatgaggcagctgtgaagaaagttcccaatagtgaggagtatcactctcacctcttcatggcctatgccagagtgggtgaatacaagaaaatgcaacaggtaatttgatccccaaacctactgggctatgggatttactattagaggcaaaagtctctttcttgtgatttaactgcactgggtatgtgtgtgtgtagaattgaatttatggatttttctgtgtggaggtcagtcagttgttttccttatgtgtttaaagttgaactattattcaagatctttaaatgttttatttggaaataagttgattgttcttttgtggcctgatgttatgttttgtttggttttggtaattcagcttcagattgtcctactgcatcagattgctgttaaattttcagaaaatgagcagatataccagagcaaaaaatgaacaactatggaaagagtaactttaaagtttacatctaatttgtaaatttaaactgttgatagcctgctaagatttttaagtccaccagggggaaaatccttgttgcctgggatgtttctttttaaatttattttttgttttttgttttttggtttgaggcagcttatttggcagctaccatattgtagatattctttacatacatctgaaggagcctcatttgaacacatttgaattaggttgcgggtaaagctaacatctcagagaaatataatcagcattattaattccataaatggctctgatgttaagctagtatttttttttttttttttttttggagatggagttttgctgttgttgcccaggctggagtgcaatggtgcgatcttggctcactgcaacctctgcctcctgggttcaagctattctgcctcagcctcctgagtagttgggattacatgcttgcgccaccactcctggctaattttgtatttttaatagagacagggtttctccatgttggtcaggctggtctcaaactcccgacctcaggtgatctgcccgcctcggcctctcaaagtggtgggattacaggcatgagccaccacacccagcccaagctagtacttttttagaaatgctttctttgtgggtataatatcttctgaaggcaaaattttttggatttttatcttattctttacattaaatatcaagttataacaatagataatttgggcagggtggcagatactatattaatataaactctttcttaaaatcagtctctatattttaagtttatgcaagttttaacataggagaagtttttttcttcttttttcttttttgtgatggagtcttgctctgttgcccaggctggagtgcagtggcacgatctcggctcactgcaacctggcctcccaggttgaagcgattctcctgcctcagcctcccgagtagctgggattacaggtacacaccaccatacctggctaatttttgtgtttttagtagaggcgaggttttaccatgttggccaggctggtctcaaattcctcacctcaagtgatccacccaccttgggctcccaaaatgctgggattacagatgtgagccagtgcgcccagctggagaaattttttgaggggtcccaatgtaattatttaataacattttgttaatttatttactgaaaggtatttagacattataatttttaaaaatgtaaaatggttatgggtgtgtgtgtgtgtgtgtgtgtgtgtgtgtatatatatatatatatatatattttttttttttttttttttttttttttttttttttttgagacagtctcactctgtcacccagggtggaatccagtggtatgatctcgtctcactgcaacctccacctcccgggttcaagcgattcttctgcctcagcctctcaagtactgggactacaggcacatgtcaccacacccggctaatttttgtatttttagtagagacggggtttcaccatgttggccaggctggtctcgaactcctgacctcatgatccgctcgcctctgcctcccaaaatgctgggattacaggcgtgagccactgtgcccagccataaaatgggtatattttttaaaattggcaatgctaacatatatacatataaatccttaatatcatttttatttgtaagattatgttttaagcaaagtatattaaatattcattcataaggatagagtaaaagaagttatagttcatccctatggtacataaaatacattcccacatctctccaaataatactgggtgtctttatatggttgacatataaagatgttcctagtatatgttaattgagacaagcaggttgtaaaatgaccttctcttcccattcttctcatgttgtcctcaaaaaagatatacttcttttctttcttttttctttttctttttttgagatagacagactctctctgtcacccaggctggagtgctgtggcgtgatctcagcttactgcaaactctgcctcccaggttcaagagattctcctgcctctgcctcccgagtagctgggattgcaggtgcctgccaccacacttggctaatttttttgtgtgtgtgatatagtcttgctctgtcgcccaggctggagtgcagtggtgtgatcttggctcactgcaacctccgcctcctgggttcaagcgattctcctgcctcagcctcctgaatagctgggattacaggtgcacaccaccatgcctagctaatttttatatttttagtagagatggggtttcaccatgttggtcaggctggtctcgaactcctcacctcttgacccacctgcctcagcctcccaaagtgctgggattacaggcgtgagccactgcacccacctaatttttgtatttttaatagagatggggtttcaccatgttggccgggctggtctcgaactcctgacctcgagtgatctacctgcctcagcctcccaaaatattgggattacaggcgtgagccactgcacctggctaatttttatttatttatttatttgatatggagtctcgctctgtctccaggctggagtgcagtggtgtgatcttggctcactgcaacctccacctcccaggttcaagaggagatcctcctgtctcagcctcccgagtagctgggactacaggcacgcgccactaagcccagctaattttttgtatttatagtagagatggggtttcaccatgctggccaggctggtctcgatctcttgacctcatggtccgcccaccttggcctcccaaagtgctgggattacaggcgtgagccactgtgccccgcccacgcctggctaatttttatactgtcattattgctgcttaaggaagttacaatttcttagcttaagtatgtttattttgagtgtggaatgtcagtctgaggtaataggtatttcacacatttaatgtcatgtttcatatggatgaaggtttttgtttgatttgttcattgttgattttccattgcctagaatagcatctgcacaataatttgttaagcaaataaatgatttgtataaactcgtggaggtaggagggagggaaacttaagagcttctgctgccccaaataacatctctggctggtgattttgaaaccaccataaatgaagagtagctagttattcatatggtgataaggcttttcttttcctgtaaatgacattctcattctgagtcaccaacttagatccatgtttttaaacttgtctgtcatcaaaaattttgtttcagcagattatcagagcctgcaagatcatagggtatggacatgaaatttttgccttgcattttatattaattcatattctaatgttatatatttttatctctgtatgtcattgtaaaaatgttttcccatattctcaagtaaaatgaatttcctaacttttatttatttttaagcatttattcattttttgtagagttgggatttcgctatgtttcccaggctggtcttgaattgctgggctcaagcagtcctcctgccttggcttcccaaagtgcagggattacaggcatgagccactgtacccagccggttttctaactcaaagacaaaattattattttttcttttgattgtaaaatcttcccagggatcaatggaatttcctaacatttttcattttatacctgtggagtatacgtaccccagtgttagaagcaggtgcctcaagccatcttagactctcctatcctgtatgtccttgtcgtctctagatcatgtttattctgccgctgctgtatcttttttttttctttgagatggggtttcactcttgtcgcccaggctggagtgcaattcagcaccagctgaattgcagtggtgcaattccggcccactgcaacctccacctcctgggttcaagcgattctcctgcctcagctccctgagcagctgagattacaggcacccaccaccacgcccagttaattttcatatttttagtagagttggggtttcaccattacttttatcttttaccttaactttattggccaagttggtctcgaactcctgacctcaggtgatcttcctgccttggcctctcaaagtgttgggattacaggcgtgagccacggtgcccagcctctgctgtatctttccaggtttcttttctatttgatctaccccatcctggttttgtgcctcatcacctcaccttttctttcttcctattttgtctcttcacagtactgctgagatactgttcctagaagagtatagatttataaatatcacttctctattctgtataggctccttttttaataccttacaacaaaagtaccttggtctacctttcaacacttttcctgctactcttaattgttttagccagacatcctacttgttttatcagcatacatccctttactttcttgaatgttttttgttcagactcatttttctcctacttcgcgttgatacatttacccattcacctcaaatatttgtagttttatatgtatcgttaccacaccccgcaccccccaccccccgccccctgccaccatgttatgtttgaccttcaaagtcatctgaaagatggctactttggaggggctttaatgataatgttctcctctctactttcccttaaagaaagaagaggtaagaaaatgaacaattttgccttccttggaaataccctaggatggtgttttatataggacatttatttttatatttagttttattattttgattttgagacagatttgattttaatttgttgcccaggctggagtgcagtagtgtgatcatagctcactgtagccttgacctccctgggcttaggtgatcttcccacctcagcctcttgccagtagctgggaccacaggtgcttgccaccaccctggttaacatacatatatatgtgtgtgtgtaaggttttacaatgttgcccaggctggtctcaatctccttgggctcaaatgatcctcctgtctcaacctcccaaagtgttgggattacagtcatgaatcatcatggctggcctaggacatttattttttatttttatttatttattttttggagacaaagtcttactctgttgcccaggctagagtgcagtggcacgatctctgctcactgcaacctctgcctcccgggttcaagcgattctgtcttagcctcccaagtagcttggattacaggtccctgctgccacgcccagctaatttttgtatttttagtagagatggggtttctccatgttggctcagctagtctcgaactcctgacctcagatgatctgccagcctcggcctcccaaagtgatgggattacaggcatgagccattgcgcctggcccaggacatttatttttattgctaaatacatttcagtcatttatgtatttgttttctcccccgcttttaaatgcctttgggacagggacgcgatctttgaatctttgtcaggaatagatagtttcttctacttcataggacctccatgtaatttttgaattagattggcagtaggcaaaagattaaaaaacatatgaaaattacctgatggagtttttagcatcaattactagttggctaattatggatagagtctcaattatgcttgaataggtctattcttttttaaaagcatgttcttgcttttaagtatttgcatattatacatttcataatgaaagatttcagttctaattattggaatcttgaaggaaccatattattttcctaagctaagaagaatttttgaattatggcatggtaatcttttctgatattgaagtttaagtatattctctgggcatgtttatttgtttttgctaataactggttagtatggtatcttaagtaaagtttattgatgtacacttacaagccaaattttgtgtttgctttgtagtctcctagaactatattggattgcagcatattctggaaatgttggactttaattttagtaaattctggttcaaaaagtaaagtatcactcataacatgaaaattcacctttgtgattactgctgttgctaaagccatcaagtcactaggaatttacactaactgggatatgtaaatatattgctgttctcccaagaaactttttgtcgtgtatctagatcattaatccccttctgtatggtgttttctaaataaaatatttatggttctcttttaggctggcatggctctatataagattgtccccaaaaatccctactacttttggtctgtgatgagcttaattatgcaagtgagtatggcattcagaatgggattgaggtttggttttattttttatatagttattgtcctcagtgtgtcttctgaactggttttttttgtttgagacagggtcacgctgtcacccaggcaggagtgcagtggtgcaatcatagctcactgctgccttgacctcctaggctcaagcaatccctctacctcaacctcccaagtagctgggactacaggtgcacaccaccttgcctggctaattaaaaaaaatttattttttggtcaggtgtggtggctcacgcctgtaatcccagcactttgggaggccaaggtgggtggatcacgaggtcaggaaatcgagaccatcctgaccaacatagtgaaaccccatctctactaaaaatataaaaattagctgggcatggtggcatgtgcctgtaatcccagctactctggaggctgaggcaggagggtcgcttgaacccaggaggcggaggtttcagtgagccgagatcatgtcactgcactctagcctggcgatagagcgagactctgtctcaaaaaaatgttgtagagacagggtctcactcttttgaccaggctggtcttgaactcctggcctcaagcaatccttctgcctcagcctcccaaagtgctgggattacaggcatgagcctctgtatctgactgtgaacattttgtgtaatgtgttgcagcatgtcaaacagggactttgtgttgtcaattgacttaagttaggggttttgagttttttgggttttttttttttttttttttttgagacagagtctcgctctaacccaggctggagtgcagtgacgcgatctcagctcactgcaagccccacctcccaggtttacgccattctcctgcctcagcctcctgagtagctgggactacaagcatctgctaccatgcccggctaatttttttgtatttttagtagagatggggtttcaccatgttagccaggatggtctcgatctcctgacctcgtgatccgcccgcctcggcctcccaatgtgctgggattacaggcatgagccaccgcgcctggcccttgagtattctttatgagttggtatatcagtttatttgtgggtagcatggactgtatttcccctgaatctctaatctattgctgggttgcttgatcaagcatgagccttgaaatgtttgatattacaacttgaggtttgcttttaagacaatattgctgattagttaatggctcattgaactgggtggccttcttttatcacttctcctttctgagcctcagtttgctcttttgcagaaaggagacacttttctcccagggaccaaagtgagattctgtataggagaggatggggaggaaggatttaaaagtagtgtttaagaacagatgttatggggtcagacaggtctgccttcatacattagctttaccgcatgtctggtaaagctgtctggggaatttcttaaccttagtttttttttttttctgttgtccaagctggagtgcagtggcatgacctcagcttactgcacctcctaggttcaagcgattctcatgtctcagcctcccaagtagctaggattataagcatgcaccaccacacacacctagctaattttttaaattatttttcagtagagacgggggttttgccatgttggccaggctggtctcaaaatttctggcctcaagggatccacctgccccagcctcctggagtgttaagtttacagtcatgagccaccacgcctggcctaaccttagtttctttgtaaaataagcataatatctaccttgaaaggttgtttacaagggttaagtgagctgtgagcagaatctggtgttattaactttattaatttcatgtgttaattgttgttaccaatttaaggtaactagctactagtaaactgtgtaatgaaaggaattggcatttctcttctagtatgtgaacatctcaaagatacctggaaggctttcctcttcaaatacctgataatactcataaataataaacagcataggcatgctccctctttacattcttctagaaaaatgtataaataaccgacttaaatgctaggttgtattgtggaagctcagtatttcaagaacacataggataatgaatctttagcaaagaaatcttttgtaaaacaaactgctccgtaatgtacctccttggcagggaattcatattaggtctgatatttgacatggtggattgataattatgtgcccaattaacagtaatgttaatatcaatagtgcaagcaggggagaattagaatgaaacattatttttcttctttcagtctatatcggcacaggatgaaaacctctcaaaaacaatgtttctgccccttgctgagagaatggtcgaaaaaatggtgaaagaggacaagatagaagctgaggctgaagtgagtattttaagccttacttttgtgttttcatttttttgctagtgctacaatattatgttataatactatgaactgttgttttgttccagtttgatagctgggtcctcacttttggcctttgggtaaatctgaagccctcagcgtaggtctaatcactgacctgtttccagcaagtactctaggctgagatgtgtatagacgggagagatatagatggagaagatcctgttacctgcttcgtactgtcagtttcatctcatttgaagacatgctctattaaataactttttaaaaacctataaatgactgtctttttattattgaaaagtttcagaggttgcacttcttgttttttttctgtaaggttgaactttattatatgatcctggaacgtttgggaaagtaccaggaggccttggatgtcatcagagggaaattaggaggtaatttttaaacattttcttaaagctttttttttttcctatttaaacatgaaaaatgtttattgtagaaaatttccacataaggatataaagacataaacacttttgatcattttgttatattcttccagacttttctgtatgttgtaaatttatttttaaaaatgtttttacttgaaaataacagattcagaaacttcaaggagtgtgaaaggttatactccagatctctagccgtcttcccctaggttttcctccagttacactttatattcttgtaaagattcatcttccccacttttttttttaaacacgaatgaaaacataatatacctggctcatagaataatcttattcagttagcacaatgtttttatttaaaaaaaatttttctttaaaaattttaaattaattaatgcccctctagtcaggatttgtactctgtagataccgcaaacattccttctttatttgtatgtctgtcttatgaaggcatttgagtttgtgacctctgctgtgcatactcttatacccatactttatttttattatttatttatttattttaaagagatgaggtctcactgttttgcccaggctggacttgaactcctgggctcaagtgattctcccatctcagcctcccaagtagctaggacgacgggcacacaccaccacactgggctccattatttctttctttctttttttttttggagacagagtctcactctgtggccaggctagagtgcagtggtgcgatctcggctcactgcaacctctgcctcctgggttcaagtgattctcctgcctcagcctcgtgagtagctgggactacaggcacacaccaccacgcccagctaatttttgtatttttagtagagacggggtttcaacatgttggccaggctggtttcaaactcctaacctcaagtgatctgcctgcctctgcctcccaaagtgctgggattacaggtgtgagccaccacgcctggcctccattattttattattattattattattttaactaaatagtatttcctagagataaagttcactacctcactcctttaataactgtccagtgttccacagtgtgaatgtagaaatttacttaaccagtttttgatggatatttaggctactcacaagaaacttcttgtttttttttgttgttgttgttgtttttgagacagggccttgctctgttagccaggctagaatgcagtggcatcatcacagctcactgcagccttgatctcctgggtttaagttatcctctcaccacagcctcctaaatagttaggactccaggcgtatgccatcaaacctggctaatttttatattttttgtagaggtggggtctcaatatgttgcccaggctggtctcgaactcctggtctcaagcgatctgcctgcttcagcctcccaaagtgctgggattactacaggtgtgacctgtcaggcctggcccttttttttttttaaactacattatagctctatggatagtaaaaagttagattctcaacaggaaattcataatgtaatttttggtatccttaatctgctaaacagttgggcaaatctaatttggtcagaactatcatcctagtttttttgttttcagttgtttggaaagatttgattcctctccactcttttttgtcttcttccaacatctcatctttcttagctcatgtcagctcagtcctctttgatgttttggaactgtatggatgggcagcttgtctatggactaaatttactagtccctagatgctgttgggattttataagtatatcccatgtactattaatagatgttcaacccaatacattgtgaaacctatccttttacaaagaaaatgattataaaaatttactgtcagtaatgtacttttttctttgaagtaaaataatctttaataagatagtagtagtttgtatgtaatagtggtcccattttctaagagagtgaataagaaaatgtgacatttaggccgggcccggtagctcacagctgtaatcccagcactctgggaggctgggatgggtggatcacctgaggtcaggagtttaagaccagcctgg

SEQ ID NO: 656 - DNA, 32744 bp, Homo sapiens
  source 1..32744: mol_type = other DNA
gcttccggtagaggctggtagggtaagggagctcagtaagtcacttctgggcgactgttgttttatttccggtctatgggacccggctgcgatttgctgctgcggacagcagctaccatcactgctgccgccatcatgtcagacacggacagcgacgaagattccgctggaggcggcccattttctttagcgggtttccttttcggcaacatcaatggagccgggcagctggagggggaaagcgtcttggatgatgtgagggggtgggcgtgggggtagggctcggggggtggggctaagcagaggaaggaggtgcggggaggaaaggagagggtgctcaggcagcgagaacagggcgcagctaacgccggggaggaggatcccgtcctcatgggtgcgggagcaacgtggcgtgggagtgatcgttctgggggagagtgggcagaagagagcgcgaggcgagcccggggccaggggcgcagggaatagtggctttggagctagcgctctgccgaccagacagtaggacacatgctggtttcgcctactgagatggcttcccacccgtaacctgcttggagattcttgacactgcctgcccctctgacatcgctgccctgagatggctctatagagccagaggactggacaggacctgcctcccgctcgtttggttccggcctcaggcttaggacaatggggtgttcctagcacccgagcgggcctcctggtcacagtgcgccttttaggtggctctcccagcgtcttcactgactttcgtgaaatagtgtcctgcgccctagtgaaactaccctgccttcacttaggcccgttttcttgaggagtgaagctgtcggccgctgtggcccctcctgtgccgcaggcgcatgcgaaacagggaccgaacgagccccgcctcgacgcctccaatcccactgatccccctgcctcggccctcgttccgagaacgaccgttccattcattcagtcttggcagtagttatttgattcgtcttctcttgtagtatactttaaagtgtgggcgatgcagttggctgtggtgctttaataaagatctgatcgatgcggagtttggtagatgtatattacagttctcgaacgtgttgcttgttttggcacactgcacagtcatttttcatgtggatttgtgactttgtcgtggaccagggaaataagtcctgtggtgtgggagtcgtaggtttagttgttatcttcgactcgtgctgtccctttttcaggaatgtaagaagcacttggcaggcttgggggctttggggctgggcagcctgatcactgaactcacggcaaatgaagaattgaccgggactgacggtgccttggtaaatgatgaaggtgaagtctgggttgtggggagtaggcgggggaggaggctagccacctactatgtatgtacttttttgtgtgtgtaagacggagtttcgctctgtctccgaggttggagtgcagtggggcgatctgggctgactgcagcctccgccacccgggttcaagcatttctcctgtctcagcctcctgagtagctgggactacaggcacgcaccaccacgcccggctaatttttgtatttttagtagagacagggtttcatcatattggtcagactggtcttgaactcctggcctgaggtgatccgtctggcttggccttccaaagtgctgggattacaggcgtgagccaccgcatccagcctgtacatgtacttttaaatgggaattatctgagggagtgagggtcgcttactgttgttgcgattctccctgcttttttcatagggtgggttaggagtacagaagatgctgtggactattcagacatcaatgaggtggcagaagatgaaagccgaagataccagcagacgatggggagcttgcagcccctttgccactcaggtgattctttggtgtattggcttgaacattccagtgcattatcctgctgtatagtccagtttgggctctggtttctatacccgctgtctgccattgtttctgctctctatgcctttgctttggctcctccactccctttgtcaggtcagttccaagtagctgctatctttttttgtgttctggccagtcttaaccgtattcatgtggttattcctcacactgttcagtcatgaattcttagttaatgacaagtagctttcttgtcacctggtatttgaatacctacagggtttgtgagatacacttcaaagttggaaactatgaaacaaattcagtttttgcccttaaggaatggatagttcaagaaggatacaacgtcatacataagcaatgaactaaggcaggacgtggtggctcaccagattacctgaggtcgggagcttgagacagcctgaccaatatggagaaatcccgtttactaaaaataaaaaattagccaggcgtggtggcgcatgactgtaatcccaggtactcgggaggctgaggcaggagaattgcttcaaaccggcaggtggaggttgcagtgagccgagatcgtgccactgcactccagcctgggcagcaagagtgagacactccgtctcaaaaaaaaaaaaaaaaacccaatataaaacaactgtttttttttttttttccgagacggagtgtctcactttcttgcccaggttggagtgcggtgacacgatctcggctcactgcaatctccacctcccggtttgaagcaattctcctgcctgagcctcccaagtagctgggactacaggggcccgccaccaagcccggctatttttttgtatttttagtagagacagggtttcaccgtgttagccaggatggtctcgatctcctgacctcgtgatccgcctgcctcggcttcccaaagtgctgggattacaggcgtgagccaccacgcccggccacatctggccaatttttttgtatttttagtagagaaggggtttcaccatgttggccagattggtttcgaactccttacctcaagtgaccctgctcccctcggtctccataagtgttaggattacaggtgtgagccaccgcaccctgcctaaaacaatgaacttgatacctgcttgcaaatatgtttttttcctctctggtatagggtgctacattgtagaatcaaaacatcagacttagaaggtagagtcagtgagtggaaggagtcttaggaattatttattcgtaatctctagtagaaaaggaaaacttgaactttagagaactttataataaaatgtgggattttatcaaaagtaatacaattagctagtagtagactgactaatttagctcagttcgttagacattgtttgagcacttgttatgtactctaaactgataggcagtgtgtttcttttttttttttttttttgagacggagtctcgctctattgcccaggctggagtgcagtggtgcaatcttggctcactgcaagctctgcctcccaggttcatgccattctcttgcctcagcctcccgagtagctgggactacaggcgcccaccaccacgcctggctaattttttttttttttgtatttttagtagagatggggtttcactgtgttagccaggatggtctcgatatcctgacctcgtgatccacccgcctcggcctcccaaagtgctgggattacaggcatgagccaccgtgcctggcctaggcagtgtgtttcaaagataatgaagtccgctgggtgtggtggctcaggcctgtaaacccagcactttggggggcccaggtgggcagatcacgtgaggccaggagttcgagaccagcctaggcaacatggagaaaccccgtctctactaaaaataaaaaaattagctggacatgatgtcgtgtgcctgtagtcgcagctactcaggaggctgaggcgtgagaatggctggaacccaggaggggcaggttgcagtgagccgaaatgatgctgctgcattccagcctgggcggcaagagctaaatgctgtctcaaaagataatgaagtccattttctgatcttgagaagttcaatttagtggtctggaatctagaggtattggtccatagttcatttttggcactgccctgttctacctctcactgcttgagactcccccaccccaccccacctgacagagtctctctctgtcaccagggctggagtgcagtggtgtgatctcagctcactgcaacttccacctaccgggttcaagtgattcttccacctcagcctccccagtagctgggactacaggcatgtgccaccactcccggctaattttttttgtatttttagtagagatgaggtttcgccatcttggccaggctggtctcgaactcctgacctcaggtaatccgcccacctttgcctcccaaagtgttgggattacaggtgtgagccaccccgcctggcctgcttgaaacttttatgtgaagttgctcgttatttattcatcgtccacctcttcgaactagatttcaggcttctgataaatgtagataaaaccttggtaaatacttgaacttagttttttcgggacagcttatggatttgagtgctacttatatgaaaagaattaactgtgttgcatatacaaaaagtaacccacgaaaaatagaagatataagccctgcctttaaggatattgttatcttttggggaagatgatgtgaacaaatgcagaacaattattcatagtaagacaaaccacctatgagatcatgtttctgtatatagagtgttacatttagttttgatgggctgcaagaataggtaagtcaatagctgtcatttttgggcaccctgactggggggacatggtggcagttattttcagtagaagttataatttccaggtttgtgtttgttgtcttgactagggatggtaaggaaaaggctgggagtttccctaggtgagttttatgagctaacttcctataaaaggaggatgctacatttgacagaatctcagtactctgggatgctcatttctaagttctcttgtcctctaggggtgccttcacctatacccttagttttttccttccttggcattggctcctttgcatggcttggtttacaagggtgcttctttggaataattggaagtgggtgtagattgctaataaagctttcatggaggtgaattttgagtaaaattttgaaagtgaggcaaggtttggtggagaaggagcagcaggggattttggtttggaaacacggcttgtctaaaggtttggagatatttagaaataagcaagtagtgtgtgtggagggggaattagccagtaggttttcttgaaaggagtagaaaacatgctgccaaatagcaagaaccaaggatagagcaatttcacagtacctttatgtatgcattacttgggatttgatgacataaggaattgcaaaccaacatagactgttgagtgagaggcaggatggtataatgaaaagaaaaggattttggagtcagtgtcctaggcttagagtgtcatagattcaaattccaactccatatttagtgtgaccctgagcaggttgctgaatctctgaggcttggatttctcatttgtaataatcccccagttttcttgtctgtagtaaaggtgataatattcacacttttgtgagaattgaagttcattatcacatgatgtaaaagcacatagtataatattatggtaaatgctctgtaaatattagttggctttcctttttttctgctttgctagtttacagtcttagaggcttccctttctgaggctttagaagagtgatacttgtcgctctggggttttgattagtaaaagagtgaatgtcacaccaacttgcaggctgttcttgcaggctagagatgtaaagttattaaggtccgaagtagggtgacagttgtagaaaatgatacctagggtcaggctgggcgtggtggctcacgcctgtaatcccagcactttgggaggctgaggtggacggataacttgaggtcaggagttcgagtccagcctgaccaacatggtgaaatgctgtctgtactaaaaatgcagaaattagctgggtgtgttggcacacatctgtagtcccagctactcgggaagctgaggcaggagaatcgcttgaacccgggaggcagaggttgcagtgagctgagatcatgccacggcactccagcctgggtgacaagagtgaaactctgcctcaaaaaaaaaaaaaaaaaaaaaaaaaagatagctagggtcaaacttagaagatactgataaagtatcgtaggacttggttgcctatagtcccagctactcaggaggctgtggcgggaagataacttgagcccaggagttggaggttgcagtgagctatgattgagcttctgtgctctagcctgggcaacagagcaagacccctgtctcaaaaaaaaaaaaatacagggcttggtgagtgaggaattgtgttggaaagagtgtaggctttgttgttaaaccaggcttgcattctgattttgtcacttaaaattcagtctcttccgtatctcaggataattcctgttttgaagtgttattgggaggattatacataaaacagctagaaatgcctggcacataatggaagtttagtagtaggaagttgctatacttacttttttgtttgtttgtttgagacagagtctcgctctgtcacccaggctggagtgcagtggcgcgatctcagctcactgcaagctccgcctcccaggtttacgccattatccggcctcagtctccggagtagctgggactacaggcacccaccaccaggccaggctaattttttgtatttttagtagagacggggtttcacagtgttagccagggtggtctcgatctcctgacctcgtgatccacccacctcagcctcccaaagtgctgggattacaggcgtgagcctctgtgcctggccacttttttttttttttttttgagacagaatcttactgtgttgcccaggctggagtgcagtggcgcaatctcggttcactgtaacctctgcctccccggttcaagcatttctcctgcctcagcctcctgagtagctgggactacaggcccgtgccacctctcccagctaattttttgaattttagtggagactgagttgcaccatgttgcctaggctggtcttgaactcctgagctcaggcaatccgctcgcctcagcctcccaaagtgctgggattacaggtgtgagccacctcactggccctatacttactatttgtaatgatcaattggataaatgtatattgggggttatgagattgatgaaggagacagtggactaaagccataagctgggaaaatgcatatggatgtgatgttgatagggaatttaaaagagataaaggatatttcagtgttttataaggtacagctgttaaatatctgagtagaaagtttccttaggaagcagaagagtcgtggagttgtagaggaggtaaattagggccgcatatgtagatttgggtttaatctaggtgaaggtgattcttgagagagggaatagggaacgtataggggaataaaagcagagtctttaggacgaattcttgagtgatgccaatggttaaggggcagtgaaaagagtaataaactgcagatgacagatagaaaaagtgtgtcatctctcatttgagagatgaaagaccagtcttaagggaaactgacagagggagaagattcccaaagtgctgggattacaggtgcgagccactgtgcctggcccagtatgaaaattctaaaaaagatatggtcaggaaaggagcaaatgtttcaagcagctcttggaaacgctttcatatgttgtatgattttttcttttctttctttcttttttttttttgagacagtttcactgtgtcgcccaggctggagtgcagtggcgcaatctcggcttactgcaaccttcacctcccggttcaagtgcttcttgtgcctcagcctcccaagtagctgggattacaggcacatgccaccactcctggctagtttttgtatttttgacagagatggggttttgtcatgttggccaggctggtctctgaactcctgacctcaggtgatctgcccgcctcagcctcccagagtgctggcgtgagccaccatgcccagccatcatatcttgtgtgagatattatatatgttatagcaattgacttgcaccgtgatgtcatctctttctgaaggctaaagctatgtttcagatagatatgtaaaatattttgaggcatggtcttgctctgtcacacgattactgctcatcaaagccttgacctcctgggctcaaactgtctcccgacctcagcctcctgagtagctggtactacaggcgtgtgccaccacgcctagctaatttttgtattttttgtagagatggggtttctccatgttgtttaggctggtcttgaaattctgggctcaagtgatctgcccatcttggcctcccaaagtgctgggattacaggcgtgagccatcatgcctggccctcaccttgcttttttcacttgtgtgttcttaagggatatgcatagtgtttcatgtggtgctttaaattattgagtggccctgtaatcccagtactttgggaggctgaggcaggtggatcacaaggtcaggagttcgagaccagcccgaccgacatggagaaaccccgtctctactaaaaatacaaaaattagctgggcgtggtggcacattcctgtaatcccagctactcaggaggctgaggcaggagaactcgggaggtggaggttgcagtcagctgagattgcaccgctgcactccagcctgggcgacagagcaagactctgtctcaaaaaaaaaaaaaaaattgagtggcaaggaagcttaaggcggttgtataatattttggatattgaggagatcaccttcttggttttattagattatgatgaagatgactatgatgctgattgtgaagacattgattgcaagttgatgcctcctccacctccacccccgggaccaatgaagaaggataaggaccaggattctattactggtggtaagtagagattgtctacttttgtctgaggagcaagttttcattcctaagtccaggcttgtggcacacacataagggacaaacttaagcttatatgaagggacaaaacttctagaaataattcatacaatcgcaaattttagtattaaagggaagttttacttttaaaacatttggcaacagtattttaacatgtgctcaagaaatagtagtttagtcagtggttctcaaatctggctacccatcagaatcacttagaatctttaaaaaaaaaaaacaaatacctgactttcaccccttgagcctgattcagaagatcttgggtagagtccaggaatttaattaaattaattaaaatttttttgagaaagagtcttgctgtgttgtgcaggttggagtgcagtagcacgatcttggctcactgcaacctccgcctcccgggttcaagtgattctcatgcctcagcctccagagtaggggctggaactcctgacctcaagtgatccgctcgccttggtcttccaaagtgctgggattacaggcgtgagccactgctccctgccgaacccgggaatcttaaagagtttcttaagtaatttatgatacaactgatctgtatactggtatttggaaactacttgtttagatggctttattttaaatgaagtggttaaattaggaaggtgccctggaatgttgataaatcagatagtgtcaactaccagatattcagagatttcaaaggctagtagagtcttcagtgtttatcttacctattcctataacagtaactgtcctaggcttgaaaactggggaagagcagtgtttttgacctcctgtattttgaggcttgtattaacctaaattcttcctgttggagttttaagccatttcttttaacagtctgctaaatgtcagctgttaactttgttttatagatcttatttatgccaaagaaccttaatgttgtcccgtgggcttaaaaaaattctccagctcatgagtctctgaactaggactacctgagtggtataaagtattacatagttttgctattggtcacaacattggttacaatattggttacttatcagaaagtagggccaggtgtggtggctcacacctgtaatccgagcactttgggaggtggaggcagatgatttgaggtcaggagttcaagaccagactggccaagatggtgaaaccccgtctctactaaaaatgcaaaaatttagccagctgtcgtggcgcatgactgtaatcccagctactcaggaggttgaggcaggagaatcacttgaacccgagagagagaggtttcagtgagctaagatctcaccactgcactccagcctgtgcgacagagcaagactctgtctcaaaaaaaaaaaaacaacaaaaaatcggaaagtagtaaatgtagtaatagtgtttgttttctcatcacaaccctagggtaccaggtacgtggtgagttgggggacgatgggagataacgagttagaatgagttttctgggttgcatactagtattatgatttgggtgcttgggcctatatctcctggcattgagccatgtgtatagcctaaagtgggtgtttgcggaattcgaggaaatatgttcacagttacatgccaaaggggtttctcttccttgttgcagtgtctgaaaatggagaaggcatcatcttgccctccatcattgccccttcctctttggcctcagagaaagtggacttcagtagttcctctgactcagaatctgagatgggacctcaggaagcaacacaggcagaatctgaagatggaaagctgacccttccattggctgggattatgcagcatgatgccaccaagctgttgccaagtgtcacagaactttttccagaatttcgacctggaaaggtacattctgtggagaatgctcagattgcaaaccactgacctcttccaaataatgagttttgttgttaagatgctgagtatggaatggggtttccttactcagtgacatattattggctacataagagctcttcacactgtattaggtcttttttttaaagttgtatgtattgatagtaaatgtgatttatgctgttctcattggaaatttctctgttatcttaaaagaactagcccaaattattaaggaacgcttctttactttcttagacgttacaagtctgaatgcgacactcctttgtttctcccccacatttgaagagatctctcaagggagttttcaggcccagatgctgctgttttcccatctgactttgagtctgtgtcatagtaatgtattctgtgttctaggtgttacgttttctacgtctttttggaccagggaagaatgtcccatctgtttggcggagtgctcggagaaagaggaagaagaagcaccgtgagctgatacaggaagagcagatccaggaggtggagtgctcagtagaatcagaagtcagccagaagtctttgtggaactacgactacgctccaccaccacctccagagcagtgtctctctgatgatgaagtaggcaaaatagagacctgagattaaggcctatgagaggaacaaatgaattcaatgagttctccctaatttatgtctaaattgtaaataataccatagcagatagaatctgtgctaattttcaatgagtaatcatgggttcaatctcagtggctgccccttccctattgtaaaagaaaaatgtttggtggggtaggcggggatgagaggggtagatggtgatatgctgctgaataagaaggtttgattgataggtggaatgtgctatgatacatctccattgtttacattctaactccaggtaaatcatcctcagtttctctaagttcccctcctgactgttaactctctatagccttaggacatctgggatcaggaaattctccctgctctacttctttcttctgttacagatcacgatgatggctcctgtggagtccaaattttcccaatcaactggagatatagataaagtgacagataccaaaccaagagtggctgagtggcgttatgggcctgcccgactgtggtatgatatgctgggtgtccctgaagatggcagtgggtttgactatggcttcaaactgagaaagacagaacatgaacctgtgataaaatctagaatgatagaggtgagcaacactggtatgtaagaaaggaatcaatgtactcaggtcctattacttttactaactttactctttaattggggagatactgggtggtagggtttctttggtgggagattgaggtgtctcagccttttatttggtatggtgtatcaccctggtagctaggtcctattctaaggattctgtttgtgaaatgaatgctgtgccagactaggagtgggaagaggcaaatattcctccgttatcaggtggttgtttcaagtaaaggaccacttacaatgtgtctgatgtatctttaatgtggaatttggagtggaaaccttgaccagtgaccaatcaaggatgtgttttttcttccctacttacacaggaatttaggaaacttgaggaaaacaatggcactgatcttctggctgatgaaaacttcctgatggtgacacagctgcattgggaggatgatatcatctgggatggggaggatgtcaaacacaaagggacaaaacctcagcgtgcaagcctggcaggctggcttccttctagcatgactaggaatgcgatggcttacaatgttcagcaaggtgtgcttctgtgccagctgtgtctagcagatactgcccttaatcttagtcaccataagtgggctcagctgtgatttttttttttttttttttttttcggtgagacagagtttcgctcttgttgcccaggatggagtgcaatggtgcagtctcggctcactgcaacctccgcctccccagttcaagcggttcttctgcctcagcctctggagtggctaggattacaggcgtgcaccacgatgtctgactaatttttgtatttttagtagagatggggtttctccatgttggtcaggcaggtctcgaactcccgacctcaggtgatcacccgcctcagcctcccaaagtgctgggattacaggtgtgagccaccacgcccggctggctgtgatgttctgagctgccaagagatagtgaaatttttaggatctgaggcctaattctagtccctgtaatttttattttatttttatgctcaacctggaggaagatagtccatgtaattttttgccctgttaagaagctaggccagactcaggtttcttaaaaacatgtgataaagatcttttttttttttttttttttgagacggagtcttgcttgctctgttgcctgggccggagtgtagtggcgcaatctcagctcactgcaatctctccctcctgggctcaggcgattctcctgcctcagcctcccgggtagctgggattacaggcatgcgccaccatgcccatctaattttgtatttttagtagcgatggggtttctccatgttggtcaggctggtctcgaactcccgaccttaggtgatctacctgcctcagcctcccaaagtgctgggattacaggcatgagccaccacgcctggcctgaagttaaagatctttctgaactataacagtactttatagtatatttttgttcccaagtccctttgtatttagaattctagtttcctatttttctccttaaataggtttttttttttaaggtatgccatgattaatgtaaaaaactttgaaaatacagtatagtgttaaagtcactggtaatctatctggagattatcaactgttaagttttggtgtattttcagtgttctgtgtgtgtatgtagttgagctcatttccgtatgtacagttttgcatactgtgcttttcacttactaaatatttttctctctttcattttttatttttcattgttgagacagggcctcactttgttgcccagactggtttcaaactcctagactcaagtgatcttcctgcctcggtctcccaaagtgctgagattacaagcaagagccaccccacccagccacataaatatttttgtgtcatttagagttctttataaaaatgtttaatgacatgggaaactcgttcattttattttaattaaattattattttttgtagaggtagagtcttgctattgttggtcaggctggactcctgggctcaggtgatcctcctgcctcagcctcccgagtagccaagacttcaggggcatgccaccacgtctggcttgagaaactcattttaaatggaaataaagaagatatgaaacaacatatatgatatcctattagtgtaaatgaaaaaaagcagactatataaacatagaaagctggattacttttatattttggaggaaaaacaaaattttttcttttttgagacaagagtctctgtcgcccagggtggaatgtgttggcgcgatcttggctcactgcaacatctgcctcccaggttgaagtgattcttgtgcttcagcctcccgagtagctgggattataggcgtgcaccgctgtgcccagctaatttttgtatttttagtagagacggggtttcaccaggttggccaggctggtcttgaactcctgacctcaagtgatctgcctgccttggtctcccaaaatgctgggattacaggcgtgagccaccacacccggatacaaaaatgtctgatttttaaaacctaagaaataggttttttcccttccattctgcccactttatgggttatatattactattacgaatgtttcataatttaccgataacatgttgcatttgttaatacaatttattaccatttattgttagcatactttaccatatcatttattgtcataatttaaccaattccttcttaaacatttaggctatttaaatttcaactattataaacagtattgcagtggacatttttgactgcaacattatttttatttatttattttttgagacagaatttcactcttgttgcccaggttggagtgcaatggcacgatctcagctcactgcaatctctgcctcctgggctcaggtgattctcctgcctcagcctcctgagtagctgggattacaggcatgtgccaccacacccagctaatttttgtattttttgtaaagatggggcttctcaatgttggtcaggttggtcttgaactcctgacctgaagtgatccacctgcctcggcctcccaaaatgctgtgattacaggtgtgagccaccgtgctgagcctgcaacattattttaaagtgagaaatacactgtgtaggttccttttcagtggacacatgaataactccactaactcgctctactaacatgagtaactctttttatctttgccagaatcttgattgaaaggggcataaatgttttctctgttactatttcctccttgcactttgactaggttttgcagccactcttgatgatgacaaaccttggtactccatttttcccattgacaatgaggatctggtatatggacgctgggaggacaatatcatttgggatgctcaggccatgccccggctgttggaacctcctgttttgacacttgatcccaatgatgagaacctcattttgggtatattactggcagaggccagtgtttcttctcctttgaaaacttgctgttaatgtcaacgggcaggaggaaatcagaagggttggagatgattaggactagaaacctgtaggtagcggcttgagagagcgaagttttggctgttagtttatattatttgtgtatatgcttagggaacactcacgtaggaatgttggaaagttgcaactttgagatgtcaagagcatagtttgttccgttagtgaatcatggactcgaaacttctaggtagcagtttgagagagcaaaattgtggcagttagtttttattatttgtgtattccctagggaaaactcatgtaggactgtcggaaagtagtacctttgagatgtcaagcgtgtagttcacttagtgaatcatgtactagaagtgatttgggatgggatgaaaagatacaggtgtagttcagttagtaaatcgtggactagaagttacctgggggggggtgggatgaaaggtctagttaagaccttcactggaacatccgtcaccttaaagaagaaaactggatacttgtctgtaggaaaggtgaatcttcagggagagcaactcaagtgatttttgttttattctcagaaattcctgatgagaaggaagaggccacctctaactccccctccaaggagagtaagaaggaatcatctctgaagaagagtcgaattctcttagggaaaacaggagtcatcaaggaggaaccacagcaggtgtgtgaagaaaaaaggggcttggtgtttagaagaacaaagaaaggtaatagagaaggatagtctgaccgagatttgtttgattatctatcattagaacatgtctcagccagaagtgaaagatccatggaatctctccaatgatgagtattattatcccaagcaacagggtcttcgaggcacctttggagggaatattatccaggtacaaatagtgtcttttctgtgatagaggagaaccccatggctttgttctgacggaggatatgggaaaatcttgcttaggatggaattagctaattttaacccttctatttcctgttttagcattcaattcctgctgtggaattacggcagcccttctttcccacccacatggggcccatcaaactccggcagttccatcgcccacctctgaaaaagtactcatttggtgcactttctcagccaggtccccactcagtccaacctttgctaaagcacatcaaaaaaaaggccaaggtataattgaattctggttagaaaacagctataaaggatattggggtataaattaagggaatgtaccaggtattagattgtattagggaattggttattttctcagatgtgatagaatgttattttggttatttaggagaatgtctttattgttaggtgatgcatgtgaaaatatttaaaggtgaggtgtcagaatgactgcatctttcaaaaactgtccagcaaagtctatagaaagataaaagtttaaaaaaatggcgaaatataaacagcgacgtgggataataagtgttcatagtacagtcgtccttcgttatctctgggagattggttctaggaccttctctggataccaaaatctttagatgttccagtttctgataaaatagcataatatttgcacataacctatgcacatcctctcctatagtttaaatcacctctagattacttataatacctactccaatgtaaatgctatgtgaatagttgttaacactgttattggttagggaataatgacaagaaaagtctgtacctgttcagcacagatgcacttgtattttctgaatattttctatctatggttggttgaaatcacggatgcagaacccatacatggatatggagggccgactgtactattctttgaactttacagtatgtttgaaaattttgattatgaaattggaaaataggtaaaatgtttttggtgtgtttgtctcagattgaacaacgtcattgtgtgtagtagtgtcctgtcaggagctagatggtattttctttgttctggacagatgagagaacaagagaggcaagcttcaggtggtggagagatgttttttatgcgcacacctcaggacctcacaggcaaagatggtgatcttattcttgcagaatatagtgaggaaaatggacccttaatgatgcaggttggcatggcaaccaagataaagaactattataaacgggtgagtctctgctcagaaaatttttttcccatacataattctgcttatgcttccataaacttttatgtacaaactttttgttattaacatagctgtagtgagacaaactgcaaacttacatacaaattttttattattaacgtagctgtagttagagatctactggtaatctgtgaacatataccataaatttcttgggagaaaggagtggtacctttttttgtagttataacatgttgagcatctcaaatctcaaaattcgaaatcaaaatccaaaactttttttttttttttgagactgaatcttgctcttttgccaggctggagtgcagtggcatgatctccactcactgcaacctccacctcctgggtttgggcaattcttctgcctcagcctcctgagtagctggactacaggcgtgtgccaccacacccagctaatttttgtatttttagtagagacagggtttcatcatgttggccaggatggtctcgatctcttaacctcgtgatctgcccgtcttggccttccaaagtgctgagatacaggtatgagccaccatgcccggccaatcctaaactttttgagcactatgatgatactcaaatgctcattggagcattttggatttccagatttgggatgcccaactggtaagtataatgcaactattccaaaatccgaaacacttctggtcacaagcattttggatgagggatactcaacctgtattagtaaagtgctatggtcatattgtgtaggattattgatatattctaaataactgggtcttctgtgttccttatagaaacctggaaaagatcctggagcaccagattgtaaatatggggaaactgtttactgccatacatctcctttcctgggttctctccatcctggccaattgctgcaagtgaggaattctttcctgtttttactgttaactaaggaaattgataaatgaggaaccagtcagctcagaaagaactattataattctagttgattgagatgctttaattttaagtacaaagaaaataagtataatccaaaaatgttttaaagaaatctttttcttaaaactggctgtgaattgtgttattctcaggctaaatgtaaaataggtttttaaaaatacacactggtaagctcagtaacatctgggaagcataaggaagtcaacctaggatgaatttactataaatttactataatttatgaatatttaatttttgtgtataaaattgataacattttgatcacattagctgtggttattgtgaatattgaaccacacctgaactgtgccatctacagtccccagccatagtgaaatgctttttttttccctcctttgttctaatgggtgtaaagaggctctcttataacagcttttatatattcaaggggggaagtatgatggtccacaaatgatgtggaaaatctctagcactctcccatcttgttttttttctccatttcatttctcttggcaatcttaaccatttgtcctactcttatacctagtttattctactgttgttgttgtttattctcctaaagcatctgcaaagctcagtttttttctttatcctttacattcatagtctattgctaaccggatgtttagtatcatctttgtattgttcttctcctttccctggaactttctgttgaggttttctaccaattcagcctcttcttttgtggctacttttgtagtctcttaaagatctttttctggccgagcgtggtggctcacgcctgttaatcccagcactttgggaggccgaggtgggcgaatcacctgaggtcaggagttcgagaccagtctgaccaacatggagaaactctgcctctactcaaaatacaaaattagccgggcatggtggcacatgcctgtaatcccagctactcgggaggccgaggcaggagaatcacttgaacccgggaggtggaggttgcagtgagccgagatcgcgccattgcactccagcctgggcaacaagagcgaaactccatctcaaaaaaaaaaaaaaaagatctttttctgtattcttctgtaattctttttctgcctatatttcacatgtagaattttctttccacactcagtgatggtcttccctctttctgtctactcttctgattttcggggaaggctttccttagactcaggcttcttgtgacagtttatccctatcttgcctctacttaaactggctcaaatgtttctgttcagctgtcctctgtcctactgtcttgtgttttccttttgttttttcccagcctattctgtctagcactctttctacctcattggttgttttatgatttatttgtttggagatagggtctggctctgtgacccaggctggagtgcagtggcacgatcttggctcactgcaacttctgcctcctgggctcaagccatcctcctacctcagcctcccaagtagatgggacaataggcgcacgccaccacatccagctaattattgtattttctgtagagatggggttttgtcatgttgccgaggctggtcttgaactcctgaggtaaagtgatctacctgcctcggcttcccaaagtgctgagattacaggcatgagtcactgtgcccggcgttgttttgttttttaattagtttaataatttattcaacaaatgttgctctcacacgttgtgtgttgggctacactggggtctagggtagtagtatagtacttggtacattatgaagtgattttcatatgtaatcttcatagcagtcctgtgaggtataggcatttttaagtatctctgttttgtagatgaggaaaactaaacttagacatgttaaatagcttaaatagacatgttaaatcatagaggtaatggcagagctagcatcatctgaattcacatcctgtattttctcccctactgactctgaaagatagtggatgaaaaattgtttagtcacatttgataatctatattttaatttatttgtattactggatagaccttagatggcgtaattaagatggagagcaataagcttggtatttctttctcagcagttgactgaatttcctagggctactctgtatataatttttgtgtttttacttttgttaggcatttgagaacaacctttttcgtgctccaatttatcttcataagatgccagaaactgatttcttgatcattcggacaagacagggttactatattcgggaattagtggatatttttgtggttggccagcagtgtcccttgtttgaagttcctgggcctaactccaaaagggccaatacgcatattcgagactttctacaggtaagaatgggaggatagggaggggattgggttgtatacagaaagggtatgttggggccgggcatggcggctcatggctgtaatcccagcactttgggaggccgcggtgaatggatcacttgaggtcaggagttcgagaccagcctgaccatcatggtgaaaccctgtctctactaaaaatacaaaaattagctgggcgtggtggctcacgcctgtgatcccagcactttggaaggccgaggtgggcggatcacctgaggttgggagtttgagaccagcctgaccaacatggagaaaccccgtctctactaaaaatacaaaattagccaggcgtggtggcacatgcctgtaatcccagctactcaggaggctgaggcaggagaatcgcttgaacctaggaggcggaggttgcagtgagccgagatcgcaccactgcactccagcctgggcaacaagagtgaaactcagtctcaaaaaaaaaaaaaaaatttagccaggcatggtggcgcacgcctatggtcccagctactctggaggctgaggcaggaaaatcactggagcccgggaggcagaggttgcagtgagctgagatcaaggcactgcactctactctgggtgacagagcgagactccgtctcagaaaaagtaggctgtgtgggtttgggagcacatcgggaaagatgaaaatacattagagcttagcaaaggaagaggccctagtgaggacttttatccttttctttgccaaataaaatacacttggtttgttgggcaggtttttatttaccgccttttctggaaaagtaaagatcggccacggaggatacgaatggaagatataaaaaaagcctttccttcccattcagaaagcagcatccggaagaggctaaagctctgcgctgacttcaaacgcacaggtcgtctgttgtgactagttatttgtctgcctttttccaagaaaagaattttgatggctttgagttaaaggataagcatatagttaataaaatagaaattgatggctgttgaaaggaggtagcagatcttctaacactctggttgcttttttgaatttggctgccaggaagtttaatgtgattgttggatatcttctatgagttgtaggaaacttagcagctggggttttcttggccagtcatgccaactgtggctaggcctgttacagttttggtttgctgtccctgttgctgtcaataaatatcagggcctttggaattcagaatggtctcattctctatgtatatgtcttttccagggatggactcaaactggtgggtgcttaagtctgattttcgtttaccaacggaagaagagatcagagctatggtgtcaccagagcagtgctgtgcttattatagcatgatagctgcagagcaacgactgaaggtgaacaccttcctcttagacaccacttatgcctgtggttttttgtttttttttttcttccccccagagagatgagagagaagattctttctctgactggcttagggaggatggtttactagattattaccaattactaaaaagttcaatttgtataaagtacttctacgtacatcagttctggagaaaaactatagtgtagctaagtatcagtgggaaggcataatgaggaactttgggcatattgttttgctttgaaaatggtgactgggtgactttaatctcttctttgcaagataagcatataagcagggaaagtacttgtcagcctctcaggtaggcagagatgatgatggtgctgaatgtgtggtttagagaagcacagaattcttataaggccaaaagagaaaaggtccagctgaggtgtgacagcacagctctgtcccactgagttaatgagactcagttattgagcatctctgttcagcttgcttatgggctgtaactatctgtatatcagctagtaagctccttggcatgttgtaatgtatcttatagcttaaggatgtgccgtggtgttagatatagtgaagactttatggaatccatctatgcaaaatagactttggtattctgtacttgtattcagtaaaaaaaaaacttgtgctttgtgttttttaactgactgatttatgcatggatctgtcctcttccaggatgctggctatggtgagaaatccttttttgctccagaagaagaaaatgaggaagatttccagatgaagattgatgatgaagtaaggctttatactagtttgtattagtcattaatacatctcatttatccttttaaaagagacagctttattgagataacataaaataaactgtacacatttaaagtatactgttagatgttcttgctttattcatgccagaaaaaatgatgcgatatatcaaatattatattttatatgatatgggtttgtttttttttgtttgttttgttttttgacagaatcttgctctgtcacccaggctggagtgcagtggtggcatgacctcgactcactgcaaccttcacctaccggggttcctgcaattctcgcgattctcctgcctcagcctcccgagtagctgaaattacagttgcacgccaccatgcccagctaattttttgtatttttagtagagatggtgtttcaccatgttggccagactggtcttgagctcctgacctcaagtgatcctcgtgccttggcctcccaaagggctgggattacaggcatgagtcactgcacctggcaggattttcatttcttctagaaaaaagactttgacctgatttataagacttcacatgatttgggccttgcatattaatctgacctcctttcatctcctgtcactgcctgtcttatattctaagctccaaccataccgaagttcattcagtttcctaaatttctcttccctttcagaatttttcagttatgtcttctactgagatattttttctccactcctctgccatttgactctcatctacaagttattttctctgggaagctttcctggacttttcccctcattccaccctggatttcgattggatgataattctcctttcattatgtacatatagtacccctttacttttttctttcccaagatagggtcttgctctgttacccaggctgtaccgtggtgagatcacagctcactgtagccttgaactcctgggctcaagcagtccttctatctcagcctcccgagtagctgggacaacaagcacacaccaccacacccagctaatagtttaaattttttgtagaaatgtctcacggccgggcgcggtggctcatgcctgtagtcccaacactttgggaggccgaggcgggcagatcacctgaggtcaggagttcgagaccagcctggccaacatggtgaaaccctgactctactaaaaatacaaaatgagccgggcgtggtggcgtgcgcctgtaatcccagctacttgggaggctgaggcaggagaatcacttgaacctgggaggtggaggttgccgggagctgagaccacgccattgtagtccagcctggactaaaagaacgaatctccatctcaaaaaaaaaaaagaaagaaagaaatgggatcttactgtgttgcccaggctgattttgaactcctaggctcaaacgatcgtcctgccttggccttctaaagtgttgggatgataggcatgaaccactgtgcctggcctctactttcttcccgtggcactgatcacatagtactgaacttggttggctgtttttccctcactaacttgaggttcatgaaaaagtagtatggaggagtagtgtgtagttggtattcaataaatatttgttaaatgaattaagtgattataaaatgaagcagaaaatgaggccacacagagtgagtaaagaatcgttgtactactctcttgaggttggaatgaaaaatgagtggatatctaagaatttcagaaattaagaattcttttgaggccaggcgcagtggctcaggcctgtaatcatagcatttggggaggccaaggtgggagggttacttgaggccaagggttcaagaccaacctggccaacatagtgagaccctgtctctaaaaaagaaaaacaattttttttaaattaaaaataaaaaaagaattctgttgaatggctttccagattgaaccttagagaatggccattttcttgctaatcatatatactctttttttttttttttttgagacagagtctcactctgtctcccaggctggagtgcagtggtgcagtctgctgactgcaacctctgcctgctgggttcaagccattctcgtgcctcagccttctgagtagctgggactataggtgtgcgccaccacgcctggctaatttttgtacttttagtagagatggggtttcaccatgttggccaggctggtcttgaactcctggcctcaagagatctgcccgcctcagcctcccagagtgttgggattacaggtgtgagtcaccacacctggcctcatgtactcctgactggtctgtgtgggcaggcacattcaccccttggcttaattctttaagaatcttgcaggggttggtaaacactattcagggtcccaggagaggacagacctttttgaccaaaccagtggcagaaatagaatggactttggtttagtgtcactggaaaaggggccaatgctttgaaagcaagcatgtcaagtatttcgagaaaataggtttcattctaaaacagctgtttgagcaattggacaatcaaatgtagtcattagtctaattttgagcatcatgagggtgagggaaacactgtccttaagaatgtttattgaagcccaagggataaggggctgaagggataccactgttctttatttttctccttatcctgcctgagctcttgacctctatttaatatcatgttgtaagtattgtaccataggatagaagagaactgagtactaggtagctatatttaactgttgatttttgtggacagtttaagagagcatgaacccacagaaattaaaaattagaaaaaaagaacatgaaaatagtttgtaattattctactcttgtagatattggctagacatagaacaaatgtttcccactgccctgagaatctttttctttatctcaggttcgcactgccccttggaacaccacaagggccttcattgctgccatgaagggcaagtgtctgctagaggtgactggggtggcagatcccacggggtgtggtgaaggattctcctatgtgaagattccaaacaaaccaacacagcagaaggtgagattgtgtttatttctagaatgaaaaagtcaagggagaaagaaatgggtgagtggaggacttggaatgtagttaaggtagcagaatgacttagatgcctacttaaaaggaattcaggtttttaggagtctcacttttttttgtttgaggtaggatgataaagaaccgcagccagtgaagaagacagtgacaggaacagatgcagaccttcgtcgcctttccctgaaaaatgccaagcaacttctacgtaaatttggtgtgcctgaggaagaggtgagtgtggaagtggaaaatttagagtatactaggggctttgtatagagttggaattgctaggaggcagatgtaaagaactatctggggaactttattgtagggtatagtaagctaagtcttagatattgttttaggagttatctttctatgtaatctgctttggggtgatttttcttttttggtctaactgtgtacattggcttgtcctttgaaatccctgaatgatttgtgtgtgtgtgtgtgtgtgtgtgtgtgtgtgtgtgtgtgtatatttatatttgtgtgtggctatttgtctcgtagattaaaaagttgtcccgctgggaagtgattgatgtggtgcgcacaatgtcaacagaacaggctcgttctggagaggggcccatgagtaaatttgcccgtggatcaaggttttctgtggctgagcatcaagagcgttacaaagaggaatgtcagcgcatctttgacctacagaacaagtgggtcgttttagtgctgcagaaaatccaagctggaaagggggaggagttccaggcactatttcataataaagaggaggtcacctaaaagtttgactacctaggtagtcagatatctgacatgtcagggtagtatatgtttgtaatcccaccaccagattacctattcccttcaacccaacttggcaaaatttttgaacagaaggaaacgctagtcttgtgttctaggttccatgacaacttttatggcctacttgggcctaacaaatagcacaatggtagcaggtgacaggtagggcttttttctaaaggtttagttgtgagaggatgttaatacactattaaaaatgaccagtgtgctgatttatttatcaagttgtctccaggaattctgaaagagttactacaatttttcaaacttatcttgttgaccaaatgtctaggaaaactttgtaaagcttttctgttaagggccccatgtcttagtggattttgagtatgcctttttaaggttgatttcccaattttttacttttgcctgcaaccatatttctttagttctttctgcacattgctttttctctttttagggttctgtcatcaactgaagtcttatcaactgacacagacagcagctcagctgaagatagtgactttgaagaaatgggaaagaacattgagaacatgttgcagaacaagaaaaccagctctcagctttcacgtgaacgggaggaacaggagcggaaggaactacagcgaatgctactgggtgaggatcttggcttcacagacagataaaaaagagaagggttaaaaaaggagcctacgtaactgcagactgtaattgagggagatctggaggcagaagatgtaagggatgcatgtagaaaagtctgtgaatgaagtagaaagctttttacaaactggactctaggattgtctgtggaggaccaattgcagagatgatgccactccactaactgcctctgtatcaggtgcctggccaagcctgggctattagtgctgtacttcaaatgagctttttgtgcatttatcctagagggtaagagtttttaatacagaatttgtaaatgaatttagggagttatctttgaaacttctgaaattacatgtaaaatatgtaaatgtgcattttattatttttttattttggagacagggtttcattctgtcacccaggctggagtgcactggtgtgatcttagcttactgcagcccccgcctcccaggctcaaacgatcctcctgcctcagcctcctgagtagctgggactataggtgcatgccaccatgcctggctaatttttgtattttgtattcctcctgcctcagcctcctgagtagctgggactataggtgcgtgccaccatgtctggctaatttttgtattttatagaaaatgttgcccaggatggtgtcgaactcctgagctcaaagtgatccgcctgcctcagcctcccaaagtgttggcattacaggcgtgagccactgcgcctggccttaaatgtgcattttctgagaacattcatggctttcagaagaccctcagaaggagtcttagaccataaaaagagttttaaaattgtagaaattgagggtgggaataataaagacctgaattgggttgggatatggagggcattaaggatgaaaatcaaggcaaccttaagatttcactctgggattactagaaagatgttggtaccattgattaaagtagtgaatttcaaggtctgacatgctggctcatgcctgtaatgctagcactttgggaggtcgaagtgagaggatcatatgagccccggagtttgagaccagcctgggcaacatggtgaaaccctgtttctacagaaaatacaaaaattagatgtggtggcaggcacctataattccagctactcgggaggctgaggtgggaggatcgcttgagcctgggaggcagaggttgcagtgagctgagattgcgccactgcattccagcctgggtgacagggtgagaccctgtctcaaaagaagttaggaagggaatgtgtaatatgtggagtttgaggtccctttgacacccttgaagtatacatgttaaagaggcagttgaaaacttggttgttgatactgcgagagaggataaaggctgatgatgaagatttatatggcttctcagtcacagtagtcttccctttgtttcctcttttctgtaaaagttttgtgtaatttcattgttttgggtcctttgtaaaaatgtgatatagcccttccaccaatgtggtcatctatgttttctagtatagtcctggaacacagtatctgtatcatttgggaattagaaatgtggaatctcaggcctcactccacatctactaaattagaacctacatttgcagccgggtgtggtggctcacacctgtaatcccagcactttgggaggctgaggcaggcggatcacctgaggtcaggagtttaaaaccatcttggccaacatggtgaaaccccatttgtacaaaaattagccgggcatgatggtgggtgcctgtaatcccagctacttgtgaggctgaggcaggagaatcgcttgaacccgggaagcagaggttgcagtgagctgagagtacgccattgaactttaccctgggcgacagagtgaaactccgtctcaaaaaaaaaaaaaataacctacatttgaacaagatcctcaggtgattcctattcatattaatgtttgagaagcttatgttaggctttaagactcggaacttgttttttgtagtgccattttcccccccgagttgcgtgcttgggtactttttttttttttttttgaaacaggacctcattctgttgcccaggctggagggcagtggtgcaaccatggcttgtttactgcagcctcaacctcctgggctcaagggatcctcccacctcagcctcctgagtagctgggaccacaggtgtgtaccaccacacctggctagttaaatttgtagagacagtgtcttctctgttgaccaggctggtctcaaactcctgggctcaagtgatcctcccaccttagcctccccaaatgctgggattataggcatgagccactgtactcggccttgtgtgcttttatctgtaatgtgatcatcacccacttcctacatggtcttttctcttgcactgttgttcagaggaatctgcttctctatctcctatagcaaacatgtagttctttgaggttttttcagaactttttgtacttacaaaagttgggaaattggccaggcgtgtggcttaggcctgtaatcccagcatgttgggaggccaaggctggcctatctcttgagcccaggagttagagaccagcctaggcaatgtgacaagaccccgtctctacaaaaatttagctgggtgtggtggtacacgcctgtagtcccagctactcagaaggctgagctgggaggatggattgagcctgggaggtggaggttgcagtgagccgagattgcaccactgtactccagcctgggcaacagagcgagagagatcctgtctcaaaaaaaaaaaaaaaaaaaaaaaagtggggaaattggcagtgcctaaaatgaagtcaggaaaggacaaatcagcatattcttggggctgatgatgactttgatgctttttgtagaaccatagttttgtggcatgttgaactttgatagctccactcaatcccaagaaaatgatcatttgggagataaggggaacgtttggaaatcttttctacctaccttgcagcagcaggctcagcagcatccggaaacaatcacagagatgatgacacagcttccgtgactagccttaactcttctgccactggacgctgtctcaagatttatcgcacgtttcgagatgaagaggggaaagagtatgttcgctgtgagacagtccgaaaaccagctgtcattgatgcctatgtgcgcatacggactacaaaagatgaggaattcatgtgagtttgatttaccacttccttttttttctttgaggacagagtcttgctctgcggcccaggtggagtgcagcggcgtgatcttggctcattgcaacctccatctctcaggttcaagtgattctcatgcctcaacttccagagtagctgggattacagacatgcaccaccatgcccagctaatttttgtatttttggtagagatggggttttgccatgttgaccaggctggtgttgaactcctgggctctagcaatctgcgtgcctcagcctcccaaagtgctgggattacaggcatgaaccacggcacctggcctgattcaccactttcgagtgtgatagggagaatagtaataatggtggggaatggtgattggggtgggtgcttgaattttagtgacaggattcttcacagttatttctagaactctgctgtaattgagaactatcttgcctttagattgggtttgaatagagccaaattacagggaaaattctattcggtatttgccacgagatgaaggcatgttttgttccattttggtcctttgcattttgattggttggtttgcaaaaatcttagagattactggccgggcgcggtggctcacgcctgtaatcccagcacttggggaggctgaggcgggcggatcacgaggtcaggagttcgagaccagcctgaccaacatggtgaaaccctgtctctactgaaagtacaaaaattagctgggtgtggtggcatgcacctgtaatcccagctactcaggaggctgaggcaggagaatcgcttgaacctgggaggcagaggctgcagtgagccaagatctcgccactgcactccagcctgggcgacagagggagactccgtctcaagaaagaaaaaaaaaaaaaaaccttagagattactcaggacttattctaagagagttacctctgcaaatggagggctgactagggagggagatgggaatggcatgtagccccttttatcttagcctggatggattactttagtcctgagatgttagctatcacgatagtcttcttggttaaggtttgcttatggtcctgtgatttttcttcctctgctgctcacactgttcagtcgaaaatttgccctttttgatgaacaacatcgggaagagatgcgaaaagaacggcggaggattcaagagcaactgaggcggcttaagaggaaccaggaaaaggagaagcttaagggtcctcctgagaagaagcccaagaaaatgaaggagcgtcctgacctaaaagtaagtataatgtggtgtgattacagctaacggagcaaaggaagaatgtataccttttcctttagcttttgatatcctcctttactgggaatgagggaagtatattgtggaaagctggtttgaattgatgtgactacttgggggtgttctcaatactaatgtgagtggtattgacaattccacaccaaatctggtgctattgttctctctctcttttttttagacagggtctggctctgttgccca

SEQ ID NO: 657 - DNA, 32744 bp, Homo sapiens
  source 1..32744: mol_type = other DNA
tgacaattaaaactcatcaattttattttcaacatactttaacatggattctatcccttgggctgagctccagatcttcctcagcacctcacactctctctcattggcctgttccaactccaacttaatattacagcgaacgagggccttacattcttccagtacaattgcattgtatgaggcaagctccttaatttgaatcataacctcttgggtgaaagttccagtcaaaaatacctgagagaccaggcctttggcgcatgcctcccgtgctgtcagctttcgcccagcaattaacatttcattggcagatgctttacccatcattttggggaatgtaatagaagaacagccatctggactctgtccaaaggtcgtataaggggtttggaaccaagccttttcattagcccacacgagatcacaaagaggcaggatggatgcacctagtccaatggcagggccattgactgatacaacaataggctttttaaattgaataaaagtattcacaaagttcttgatggtgtccaccatttcaaggcttgctgtgtttctgtcattccttaagtgcctcacaaagtacccaaaatcaagaccgcagcaaaagacacttccagctgcactgaacagcacgagcttgctgtcatctgcagcagcgctattcagagcattaaccatttctttaattacttctgtattcagtgcatttttttctgtcgatctagttgatagcactatctgggtgaatccatcctctttcttcactacaatgtctctgtatgtgatggcactttctgttagccttatggtgaagtgcatcttcttgataaaaggctggcctctgctgtcatcagtaatatttctttgcccacctttcactcttggaactgaggtatgcatgtctgttgtcccattggctgctaatgggtctattaataccactataccctttcgggtagctgaacctgtggccatagaagcagtaactgagccagacatctgcgacattagtgggtgcatctgagtcttgttctgtattccagtctgttctgcaccaggatgtgacaaagggtcccggaggagtttcccttctgtcaccttgaagaccaccgtgtcctgctgatctgctgcaatagggtccagtttctcaagtttctgaaagccactcacagttttcttgtggtcaaaggggctgtcaggtgcaagggtctcaatagttgaatttattatctccatattctttgtgtcggagagagttgaagctgcctttctcctaacgttcttgctggcagcaaataacttgcagtttttggacctgtggtgtttatcagtcactggagttttaggagagttcttagaatagtttgcttttgtagatctggaagttcttcttctggcattgtttgaaaaaattctactggttgtagtccatgtcagttttttctgtttttcagtctgtcgtctattaaaatcatgtacacatttttcacagttcatgaggtgctgctctggttcccaagtgtcatcctgtttgtcataacctttccaccgaaccaaatactgtgtattcccatttttatcctgtcttttgtcaacaatagcttcaacctcaaactcctgggaagccatgaggaaagacacgggattggaacagttgctgtgccacctttgtttcagttgcgtctccacatagacacttctttctgcctccagctcttcaccaggttctgtgtatggatgaacctcttctatttggtcaccactggtgtagtgaaaattgtgcgaaatagcagctatgccatgtgcctgaacctctccacacttactgcctggtgggacagcttgggctttgtctcatggtgcatgacagcttgctcagtagcctcaggtgagagtagctaaatccacagccccaaccctctggtgtagtacagaaagctttcttcctgcctgttactcttttgtgtttctttgtttaattgtggttgctatgacgattatatggaacattctaatgttataacatttttaaagttacactagcttaccttcagtaacatacaaagcctttactcctgtataatgtacctccattatttcacttactgagttctcaaaattatacctttattgattttatgtcaaaaacacaaattagtggtagtttttttattaaatatatttgtgttttaagttgtgtggagaacaaattgtggaggtgcacattgttaattgttcgttttgttttgttttgttttgttctgttttgttttgttttgagatggagtctcgccctgtcaacgaggctggagtgcagtggtgcgatcttggctcactacaagctccgcctcccggattcacgccattctcctgtctcagcctcccgagtagctgagactacaggcacctgccacctggcccggcgaatttttttttgtatttttagtagagacggggtttcaccgtgttagccaggagtgtctcgatctcctgacctcgtgatccacgcacctcagcctcccaaaatgctgggattacaggcgtgagccactgcgcccggccaaattttttatcttacatatttgttcatgtatttatctttaccttaatctttgcttgttcatactgcttttgagtgtctgtccattctaccctgaagtactccataagacatttcttaaagggtagtctacttgtaaaaggtgccagtttgtatatgggaatgtcataatttgtccctcacctttgatggacagtttggtggatcataatgtttaggcttgacagttttttctgacatcacttgcaatatattaggctactgctttccatcgttttagttttcagataagaaatctactgcttttcagtggttattcagataagcgatccactggttatttttagggtcccttttacatgactagctacttcccctgcttcccttgaaaatcctcaagattctctttgtatttattttagacagtttaattatcaggtaagtttgagtttgtttctttgagtttttgttacttggagtctgttgagctccttgggtgcttacttattgtcttaaattgttgcattctttatgactatgttgttaaatagtatccatgattttttgtctcttccttggaacttccaaaatgcgtatgtatggctgcttgatggtgtccctcaggtttctaggctgtataaatctgccttgccccttttcagactccattggtgaccactatatggttgactgaccccaagggtgtgtatcacagtgtggggacagtgtgtcagttggtctcgcaaggctgatgcgtcccagagctcaattcccagacttcaatcattgcagtctcattagtgcactacgatctagaaatctctaattgtgaggtatcacacagagttctttgtctcatggccaagaaaattcaggaggatggatgcaaaaaggttgaatcaaaacttttataagtgaaagtaaaaaactcttcacagtgaggggtgaaatgtgagtggtttacctactatgaggctgtgctttacggtttctaagggcagagaagtaaagaaatgtgcttagtgttcttggagtaggcgttatttggcttggccctgaaacttggccttggattcatctggagctgaagtgatgatttgtagaagctacaaggctcagccttggaacttggccctggaccaagaaggagctgaagtgacagcttggcctgagaccttggcctgggatcaatcaagggatgaagtaatgtctcatggccacaataattaaggaggctggatgatgcaaagttcaagtaggaactaaagtaacacaacagccatctggactctgtccagatgtcatataaggggtttgaaaccaaggcttttcattagctcagaagaaatcacaaagaggcagtgtggatgcacctattccaaaggatgggccactgactgatacaaaaacaggcttttaaaattgattgaaagtattcacaaagttcttgatggtgttcaccatctcaaggcttgttctgtttctgtccttccttaaatacttcagaaagtaccccaaatcgagaccacagcaaaagacacttccagctgcactgaacagcacaagcttgctgccacccacagcagccctattcagagcattaaccattgctttaattacttctatattcagtacattttttatgttgatctagtttataggcacatctgggtgaatctgtcctctttcttcactgcaatatctctgtatgtgctggcactttctgctaggcctatgatgaggtacatcttctggataaaaagctggtctctgccaccgtcagtaacatttctttgcccaactttcactcttgcaactaatgtatgcacatctgtttttccattggctgccgattggcccattaataccactataccttttttggtagctgagtctgcagccatggaagccgtaactgagccagacctctgagaaaatagtggttgaatctgggtcttgctctctattccacaatgtcctgccctgggatctgataaagccctgatgatcttcccttcctcctccttgaagaccactgtatcctgctgatctgctgcaatagggtccagattctagagttcctgaatgccactcactgtgttcttgttgttaaaagggttgtaaggggcaagtgtctttcttgatagttgaacacagtagctccatattctttgggtcggacagaggtgaccctggattactgctaacattctggctggcagaacataactggctgcttttgaatttgtggtgttggccagacactagcgttttaggagtattcttagaaaagttgggcttggtagatgtagaagttcatcttctggtattgtttgaaaaagttctagttgttctggtccatgccacttttttactttttctgtttttcagtctgtcatctgttaaagtaatatatatatttttgaccggtgctgctctggttcccaagtgtcataccgtttcttcttaacctttgcaacaccaaaaatttttgttgttgttgttgttgttttgttttgtttttttttttagacaaagtcttgagctatcacccaggcaggagtacagtggcacaattgcacaatctcggctcactgcaacctccacctcctgggttcatgcgattctcctgcctcagcctcccgggtagctgagattacaggggcctgccaccacgcctggctaactttatgatttttagtagaaagaggttttcactgtattagccagaatggtctccatctcctgaactcgtaatctgcccgcctcagccttgcaaagtgctgggattacaggcatgagccactgtgcctggcctctgtctttccatttttgtctcatcttttgtcaacaatagtttcaacctcaaactcctggaaagccaggaagaaagacacaggattggagccattgctgtgccaaattttttccatttgcgtctccacatagccacttctttctgcctccagttctttaccaggttctgcgtatggatgagcctattctatttcatcaccactgacgtagtgaaaattgtttgaaatagcagctatgctatgggctttaggctctccacaattatgccctggtgggacagcttgggctttgtctcatggtgcatgatagctggcttagtagcctcaagtgagagtagctaaatccacatctcttactctctggtgtagtacagaaagctttctacctgtctgttactctttttcttttttaattgtcattgatactgtgattacattgaatattctaaaggtattccacttttaaagttatactagctgactttcaataacacacaaatcccttaaccctgtataactgcacccccatgatttccttattgagttctcaaaatcatacctttatgcactgtatgtcaaaaacgcaagttagtgatagtatttttattaaatatatttgtgttttaaattgcatgggaaacacattgtggaggtgtacactgatattctttatgttttataatagcttatatatttatctttaccttaatatatatccattcatactgctccttattatctgttcattttaccgtgaagtatcccataaggcattttttaaaaagatagtctactggtaaaatgtcccagcttttatctggaaatgtcataatttctccctcacttataagggacaatgttttgaacataagatatctgttcaaaagttttttctcacatcatttggaatatgttaatctattgctttctgtcctctgagttttcagataagatatctgctgattatttttgagggttactagccagtaacataactagccacttcttttgttgctttcaggattttctctgtctttcttttgaagagtttaattatcatataatttgagtttgtttatttgagtttctcttacttggagtttgttgcctttgacattctttaacattattgtttctaaatagtcttcctgattctttttctcatcctttgaacttccagtatgcgtaatatggctgcttgatagtgttccatggcattttaggctttattcccattgctttatactttttctatcatgtcctaacttaattatgtcaacaccctttctttggtttgctgatagtttgttcttcccccagctcaagtctgcttttaaatatctgtagtgaatatttttttctttttatccctagatttttttaggtttcaaaataattttacttttttattaatttttgttcatattttttttgtagttcttttgtttcttctattagcttattctgaaacttaattttaaatattatgtttctgtaagaccaccatttgggctgtctaaaaaaagtttcagaccataatttttttttacttcttaaaatgagccatacttctctgcttcgctgtgtggtttatctctagacttttttaggttttaaaataattttactcttttgattaataatttttgtccgtaagtgtttgtgcttcttttgttcattctattagcttattatgtagctaattttaaatattatattttagtaaggctgccatttgggctgtcaaaaaaagcttattttttcataattattttgtagttgttattaaaatgagccatacttgtctatttcactctgtggtttgtgattttgctggtgctgaaaaagagcatttaaattttaaagtgctgtgactttgaaaataagattttctacttctatggtttggtagagttttgtttactcattatataggctctttctctcctgtaaatcagctgtactgagcttcgtcttgggtctcttttgaggcacattgttttgaggcacatatcgttaaaaccacaattcattacatatatatgtgtgtgtgtgtgtgtgtgtgtgtgtgtgtgtgtgtgtatgattaattttgaatgttttagtctacaaatgtcttaagagaaaaagaagaacaatcaggaaaaaatattttcactttttaaatctattgaaagttggttgcacagagggacaaagagcctgcataatatttggggaatataataatgactattcacctctgttgggacctccataagcagaagcagcaatcggcaaatgagtcctcctgagatttggaggacagggtcctttttgtttgccatggctcttgtaagctgctccagaaatatttgcaaggcagcatcccacagtggtggttattaaagaataagtagctgctgttgatctgtgctacaaaattgataaaatttaatttttatttactttacaaatctttttttggaagctgtaaaccttcaggtagactcggaattctatagtaattgcatcatagtaatcctgccactgcacccattgtatagttgaagggacagatatacagtgatcccttgtacattgcagaactttcccagaatctagtattattttacttcgacctatttgtctttgcacctgaagtatgccttgcatagaagtcacaaaagtgactccttcgtttaagggtacacttgcaacaatgtgtgcctttttaagcaagagctcacatttacagttcttacaagtaaaatattacatactctgacatggacttacatgttttccatatgcgctttctcttgcttgatcctcaatttcttttttgctcatttaaaaaatctggataatttttaaaaactgctgttgtatttttcatattacaatttgatgtacttgggatttcaattattattgaaaacttaaaatagcctactatgaagaatactaacttgtgtgaataatttaatgtttaaggtcagcagtataaaaatatgctgctcttgtagttttccatccttctcaatttatattactttctctgattttatctgtgcacacagtattttttgtactcagcaacttaaatgtttgtgaccaattcctggcatttccgaccgagagtgacttctgagttaggcaaaggagaaataaatgtttattttatcaaattttcatatatcctctagaaagactgggaaaaaaaaacacaataatttagcacataagggtttctttgcttttatgagaagcaggaatcaggtcctcattttgacaatggggatttcaattctgtaggcttcatctgtgcctaggaggtgatatgaaaatccttaaagaaaaaaaaacttcaccattttataattgtctttctggattaaatgtttacttggtttatataaactattgattttcagggtccagactgtttttgatggtttgaaacttttttttttttttttggaatggtttgaaactgccatccctgccgttttacttttatttttatctgcgaagcactgagtgttttctaatttcagagtttattgttatttatgaggtttatgttttgtctcttgtttaaaacacttaaagtgaatgttacatttccaatttgcaatccccggtgttaggtttttgttttagtggtcattttataaagtttttgtttttttattaagtgaaattatcaattttgtataaaatgtatgaggtaagattctctgttataaagtacattttggtttttgtaaaacaaacatacaataagtggcttacaaagtgactttcaaataattgtctaaagaaaataataagaaaataatgtaagcatgcagcaagatcaataagtacaatgattcctggtggaaggctgtataaattgtttttaaaaagccagctccctgtggctgcagcaggctgtagaagggggaaaattatagaggatgagctcatagaggtaacagacagtccatgtgattttctagggtttttataggtcttcagattttactttagacttcaccctaaccctggtttgtgactcaaagtagaattggtaaggttgttactagcatctattgctgagaggttagaaatgctgctaaatatcctaaaatcttgagtctcaggcacctttgagaagttaacagtgttgaaatatctctcgagaaaattatttttaaaagctcacatttagaactctttgatgttatattttgaagatttcttaactccaagtttggtttccgtatagcagaaggatttgaaaaagtgtacataagttccattgattcaacttagggtaaacattagtaaagtaaggtcagttcagttaatcaatgattagaaactaaatgatatatttcttatttctctgcttttccttccaattgctttttcaatatttttgtaaaacatgagtgtgaaaaaataaaaccctagtcagcctctgttttggaggtaccaagggagaaatctcaatgaatggtatttgggatggagctaatctttcatacagttgaaaggcataaataatacacgtgcatacaggtgcattggcacactatattatggatacacattgtgcgttcagaaagcacaatgtgtatccataatacagtcatgaatgatcctagtcataatatagtcatgaatgatcctgggatattacaataagcaagtcaaatggaaacaaagtttgcaaggattatagctggggttataggattttcaattttgctaaagttgtttagtagaaccaatattcaagtatctcctacttttaaaaaaattatttgatagaagtttgcatagtggacagctttgatcagaatcattagttctttgccaacgtaataaaagtatgcattcacaaaaaatgcatattagacaataagagaaaataaaaatcaatgaatgaggaaactgatgtaataggaacaatttctgaaaatgttaagataaatccaaaaggaggtgaatttctacagtggaaaatctttctcatttcaatcaaaaatttgtttcagaacattagcaagtagcagcaacatggtaattatccagatttacaccgtttccttagttcctacttagcgcctgagatgtaggctctgttgctgatgctagggccttctccatgaggcagaactcctacccatatagggcttgctttttctccaaggttaataaaatgccattgaacacctaaaaggaaacggcaagtttatttttttttttgcttaatatactaagggagagctctgctgtttagacacattcttggaacaatgcagagattgtgaaattgaggcattaacagacattaagttgtgcacagaagctggcattatttgtagaaacaaagttgttcagctaaaatttgtagtgaaagaggaatatttattgaaatctgtgactgacctgatttttcaaagtgctggcactgttttattattattagtgttactatcactattattacctgtaacagctttttcactaaggaagttaagctttatagatcacttaaatttaaacctgaatttgatgggtacattttacaatgattgcagaaccactatttactaaatatttctgaaagtctaaattgtcattctctaagaagacataatacacctttgtttttaaagaaatgaagagtatttactaattggtaaccgtttgttaaataattactctgatatatgttcaagagccttgtaagtaagtaaataggaaaataagtactttaaaggttttttttttttttttttttaacatagatgcatatggaccactgaagcacatacgcacatgtgtattgtgtatatatgtcaggattttttttatggaattagtttatggcatcaccatcaaacaagctgacttattaaaagaaggtttatagttttaatatttattcaaataatgttttttgattgtatcctagggatagtgatcagctcaaaacctgaaggaagaagatgggtgacttctccatttccaactgaggtaccaggttcatctcactgggagtgctgggaagtggggcaggacagtgggtgcagtgcatcaattgtgacctgaagcaaggtgaggcatcacctcacccgggaagcaaaaggggtcagggaattccttttcctagtcaaagaaaggggcacctggaaaatcaggtcactctcaccctagtactgtgcttttctaatggtcttagcaaatggcacaccagaagaagatatcccatgcctgcatcagagggccctacactgttggaacctcgctcattgctagcacagcaatctgagatcaaactgcaaggtggcagcatggctgggggagggcgtccaccattgccaaggcttgagtaggtaaatgaagcagctgggaagttcgaacccagtggagcccaccacagctcaaggaggcctgccagcttctgtagactccacctgtgggggcagggcacagccaaacaaaaggcagcagaaacctctgcagacttaaatgtccctgtctgacagctttgaagagtgtagtggttctcccagcacgcagatggatatctgagaacagacagactgcctcctcaagtgggtccctggccccctggtagcctaactgggaggcacccatcagtaggggcagactgacacctcacatggccaggtactcccctgagacaaaaattccagaggaatgatcaggcagcaccagttgctgttcaccaatatccgctgttctgcagcctccgctgctgatacccatgaaaacagggtctgcagtggacctcagcaaactcaacagacctgcagctgagggtcttgactgttagaaggaaaactaacaaacagaaaggacatggacaccaaaaccccatctgtacgtcaccatcaccaaagaccaaagatagataaaaccagaaagatggggaaataatagagcagaaaaactggatgctctaaaaatcagagcacctctccccctccaaaggaacacagctcctcaccagcaatggaacaaagatggacggagaatgactttgactatttgagagaaaaaggcttcagatgatcaaactactctgagctaaaggaggaagatcgaacccatggcaaagaagttgaaaaccttgaaaaaaaatagacgaatggctaactagaataaccaatgcagagaagtccttaaaggatgtgatggagctgaaaaccaaggtacaagaaaaacgtgatgaatgcacaagcctcagtagctgatttgatcaactggaagaaagggtatcagtgatggaagatcgaatgaatgaagtgaagtgagaagagaagttcacagaaaaaagaataaaaagaaatgaacaaaggttccaagaaatatgggactatgtgaaaagaccaaatctacgtctgattggtgtacctgaaagtgatggggagaatggaaccaagttggaaagcactgcaggatattatccacgagaagttccccaatctagcaaggcaggccaacattcagattcaggaaatgcagagaacaccacaaagacactcgtcgagaagagcagctccaagacacataattgtcagattcaccaaagttgaaatgaaggaaaaaatgttaagggcagccagagaaaaatgtcggcttatccacgaagggaagcccatcagactaacagctgatctcttggcagaaattctacaagccagaagagagtgggggccaatagtcaacattcttatagaaaagaattctctacccagaatttcatatccagccaaactaagcttcataagtgaaggagaaataaaatcctttacagaaaagcaaatgctgggagattttgtcatcaccaggcctgccctacaagagctcctgaaggaagtgctaaacatggaaaggaacaaccagtagcaaccactgcaataacatgccaaattgtgaagaccaccgaggctagggagaaactgcatcaactagtgagtaaaataaccagctaatatcttaatgacaaaaccaaattcacacataacaatattagccttaaatgtaaatgggctaaatgctccaatgaaaagacacagactggcaaattggatagagagtcaagacccatcagtgtgctctattcaggaaacccatctcacgtacagagacacacataggctcaaaataaagggatggaggaagatctaccaagcaaatggaaaacaaaaatagacacgggttgcaagcctagactctggtaaaacagacttttaaccaacaaagatcaaaagagacaaagaaggccattacataatggtaaagggatcaattcaacaagaagagctaactatcctaaatatatatgcacccagtacacgagcacccagatttataaagcaagtccttagagacatacaaagagacttagactcccacacaataatagtgggagaatttaacaccctaccatcaaaattagacagacaaagttaacagggatatccaagattgaactcagctctgcaccaagctgacgtaatagacatatacagaactctccaccccaaatcaacagaatatacattctttacagcaccacaccacacctattccaaaactgaccacacagttggaagtaaaggactcctcagcaaatgtaaaggaacagaaattacaaaaaactctctcagaccacagtgcaatcaaactaaaactcaggattagaaaattcactcaaaaccgctcaactacatggaaactgaaccatctcttcctgaatgactactgtgtacataacgaaaggaagccagaaataaagatgttctttgaaaccaacaaacagcatctcaaggatgtgtctttgagaacaaagacgcaacacaccagaatctctgggatgcattcaaagcagtgtgtagagggaaatttatagcactaaatgcccacaagagaaagcaggaaagatctaaaattgacaccctaacgtcacaattaaaagaactagagaagcaagagcaaacacattcaaaagctagcagaaggcaagaaataactaagatcagagcagaactgaaggcgatagagacacaaaaaacccatccaaaaatcaatgaatccgggagctggttttttgaaaacttcaccaaaattcatagaccattagcaagacaaatacagaagaaaagagagaagaatcaaatagacacaataaaaaatgataaaggggatatcaccacagatcccacagaaatacagactaccatcagtgaataccgtaaacacctctacacaaataaacttgaaaatctagaagaaatggataaattcctcaacacatacaacctcccaagtctaaaccaggaaaaacttgaatctcttaatagaccaataacaggctctgagattgagaaaataattaatagctttccaatcaaaaaaagtccagaaccagatggattcacagacgaattctaccagacctccaaggaggagctggtaccattccttctgaaactattccaatcaagagaaaaagaaggaatcctccctaactcattttatgaggccaggatcatcctgatactgaaggctggcagagacacaacaacaaaaaaaggtaactttagaccaatatctctgatgaagattgatgaaaaaatcctcactaaaatactgggaaaccgaatccagcagcacatcgaacagcttatccaccatgatcaagtgggctttatgcctgggatgcaaggctggttcaacatacgcaaattgataaatgtaatccagcatataaacagaagcaacgacaaaaaccacatgattatcttaacagatgaagaaaagtcctttgacaaaattcaacattctttcatgctaaatagtctcaataaattaggtcttgatgggatgtatctcaaaataataagagctatctatgataaacccacagccactgttatactgaatgggcagaaactggaagcattccctttgaaaactggagcaagacagggatgccctctctcaccactcctattcaacatagagttggaagttctgaccagggcgatcaagcaggagaagtaaacaaagtgtattcaattagaaaaagaggaagtccaattgcccctgtttgcagatgataggattgtatatctagaaaaccccatcgtctcagcccaaaatctctttaagctgataggcaacttcagcaaagtctcaggatgcaaaatcaatgtgcaaaagtcacaagcattcttaaacaccaataacagacaaacagaggaccaaatcatgagtgaactcccattcacaattgcttcaaagagaataaaatacctaggaatccaacttacaagggatgtgaaagacatcttctaggagaactgcaaaccactgctcaatgaaataaaagaggatacaagcaaatggaagaacattccatgcccatgggtaggaaaaatcaatatcgtgaaaatggccacactgcctaaggtaatttatagattcaatgccatccccatcaagctaccaatgactttcttcacagaattgggaaaatctactttgaagttcatacggaagcaaaaggagcccacattgccaagacaatcctaagtcaaaagaacaaagctggaggcattacgctaccagacttcaaattatactacaaggctacagtaagcaaaacagcatggaactggtaccaaaacagagatatagaccaatggaacagaacagagccctcagaaataatgccacatatctacaaccatctgatctttgataaacctgacaaaaacaagaaatggggaaattattccttatttaataaatggtgctgggaaaactggctagccgtatgtagaaagctgaaactggatcccttccttacaccttatacaaaaattaattcaagatggattaaagggtggagccaagatggccgaataggaacagctctggtctacagctccccgtgtgagtgacgcagaagacgggtgattcctgcatttccacctgaggtactgggttcatctcactagagagtgccaggcagtgggtgcaggacagtgggtgccatgcaccgggtgtgagctgaagcagagcgaggcattgcctcactcgggaagtgcaagtggtccgggagtttcctttcctagtcaaagaaaggggtgacagatggcacctggaaaatcctgtcactcccaccctaatactgcacttttccaatgggcttaaaaaacggcacaccaggagattatatcccgcacatggcatggagggtcctacgcccatggcacggagggtcctatgcccatggagtctcgctgattgctagcacagcagtctgagatcaaactgcaaggtggcagtgaggctggaggaggggcgcctgccattgcccaggcttgattaagcgaacaaagcagctgggatgctcgaactgggcagagaccagcgtagctcaaggaggcctgcctgcctctgcaggctccacctccgggggcaggacacagacaaacaaaaagacagcagtaacctctgcagacttaaatgtcccagtctgacagctttgaggagagtagtggttctcccagcacacagctggagatctgagaacgggcagactgcctcctcaagtaggtccctgaccctcgagcagcctaagtggaaggcatcccccagtaggggcagactgacacgtcacaaggccaggtacccctctgagacaaaacttccagaggaacgatcaggcagcagcatttgtggatcaccaatatctgctgttctacagacaccaatatctgccgttctatagccaccgctgttctgcagccaccactgctgatacccaggaaaacagggtctggagtgggcctctagcaaattccaacagagcagtagctgagggttgtgtctgttagaaggaaaactaacaaacagaaaggacatccacaccaaaaccccatctgtacgtcaccattatcaaagaccaaaagtagaaaaaaaacccacaaagatggggaaaaaaaacagagcagaaaaactggaaactctaaaaagcagagtgcctctcctcctccaagggaacacagctcctcaccagcaatgcaacgaagctggatggagaatgactttgaccagttgagagaagaaggcttcagatgatcgaactactctgagctacaggaggaaattcaaaccaatggcaaagaagttaaaaactttgaaaaaaattagacgaatggatatctagaataaccagtgcagagaagtccttaaaggagctgatggagctgaaagccaaggcacaaggactacgtgatgaatgcacaagcctcaggaaccaatgcgatcaactggaagaaagagtatcagtgatggaagatgaaatgaatgaaatgaagagagaagggaagtttagagaaaaaagaataacaagaaatgaacaaaacctccaagaaatatgggagtatgtgaaaagaccaaatctacttctgattggtgtacctgaaagtgacggggagaatggaaccaagttggaaacttggtttccaactgagtgttggaatactctgcaggatatcatccaggagaatttccccaatctagcaaggcaggccaacattcagattcaggaaacacatagaatgccacaaagatacccctcgtgaggagcaactccaagacacataattgtcagattcaccaaagttgaaatgaaggaaaaaatgttaagagcagccagagagaaaggacgggttacccacaaagggaagcccatcagactaagagctgatcacttggcagaaagcctacaagccagaagagagtgggggccaatattcaacattcttaaagaagagaattttctacccagaatttcatatccagccaaactaagcttcataagtgaaggagaaataaaatcctttacagacaagcaaatgctgggagattttgtcaccaccaggcctgccctacaagagctcctgaaggaagcattaaacatggaaaggaacaaccggtaccaggcactgcaaaaacgtgccaaaatgtaaagaccatcaaggctaggaagaaactgcattgactaatgagcaaaataaccagctaacatcataatgacaggaccgaattcacacataacaatattaactttaaatgtaagtgggctaaatgccccaattaaaagatacagactggcaaattggaaaaagagtcaagaccatcagtgctctgtattctggaaacccgtctcacatacagaggcacacataggctcaaaataaagggatggaggaagatctaccaagcacatggaaaacaaaaaagaggcaggggttgcaatcctagtctctgctaaaacagactttcaaccaacaaagatcaaaagagacaaagaaggccattatataatggtaaagggatcaattcaaaaagatgagctaactatcctaaatatatatgcacccaatacaggagaacccagattcataaagcaagtccttagtgacctacaaagagacatagactcccacacaatgataatgggagattttaacaccccactgtcaacattagacagatcaacgagacaggaatttaacaaggctacgcaggaattgaactcagctctccaccaagcggacctagtagacagctacaaaactctccaccccaaatcaacagaatatacatttttttcagcaccacagcacacctattccaaaactgaccacatagttggaagtaaagcactcctccgcaaatgtaaaagaacagaaatctcaacaaactgtctctcagaccacagtgcaatcaaactagaactcaggattagaaaattcacccaaagccgctcgactacatggaaactgaacaacctgctcctgaatgactactgtgtacataacgaaatgaaggcagaaataaagatgttctttgaaaccaacgagaacaaagacacaacataccagaatctgagggacacattcaaagcagtgggtacagggaaacttatagcactaaatgcccacaagagaaagcaggaaagatccaaaattgacaccctaacatcacaattaaaagaactagagaagcaagagcaaacacactcagaagctagcagaaggcaagaaataactaagatcagagcagaactgaaggaaatagagacacaaaaaacacttcaaaaaattaacgaatccaggagctgtttttttgaaaagatcaccaaaattggtagactgctaggaagattaataaagaagaaaagagagaagaaccaaacagatgcaataaaaaatgataaaggggatatcaccactgatcccacagaaatacaaactcccatcagcgaataccataaacacctctacacaaataaacttgaaaatctagaagaaatggataaattcctcgacacatacaccctcccaagactaaacagggaagaagttgaatctctgaatagaccaataacaggctctgatattgtggcaataatcaagagcttaccaaccaaaaaaagtccaggaccagatggattcacagccgaattctaccagacctacaaggaggagctggtaccattctttctgaaaccattccaatcaatagaaaaagagggaatcttccctaactcattttatgaggccagcatcatcctgataccaaagcctggcagagacacaaccaaaaaagagaattttagaccaatatccttgatgaacgttgttgcaaaaatcctcaataaattactggcaaagcgaatctagcagcacatcaaaaagcatagccgccatgatcaagtgggcttcatccctgggatgcaagcctggttcaacatatgcaaatcgataaatgtaatccagcatataaacagaaccaaagacaaaaaccacatgattctctcaatagatgcagaaaaggcctttgacaaaattcaacaatccttcatacaaaaaactctcaataaattaggtattgatgagacgtatctcaaattaataagagctatctaggacaaacccacagccaatatcatactgaatgggcaaaaactggaaacattccctttgaaaagtggcacaagacagggatgccctctctcaccactcctattcaacatagtattggaagttctggccagggcaattaggcaggagaaggaaataaagggtattcaattaggaaaagaggaagtcaaattgtgcctgtttgtagatgacatgattgtatatctagaacacctcattgtctcagcccaaagtctccttaagctgataagcaacttcagcaaagtctcaggatacaaaatcaatgcacaaaaatcactagcattcttatacaccaataacagacaaacagagagccaaatcatgagtgaactcccatttacaattgcttcaaagagaataaaatacccaggaatccaacttacaagggatgtgaaggaccttttcaaggagaactgcaaaccactgcgcaatgaaataaaagaggatacaaagaaatggaagaacattccatgctcatgggtaggaagaatcaatatcgtgaaaaaggccataatgcccgaggtaatttatagattcaatgccatccccatcaagctaccaatgactttcttcacagaattggaaaaaactttaaagttcatatggaatcaaaaaggagcctgcatcaccaagtcaatcctaagccaaaagagcaaagccagaggcatcatgctacctgacttcaaactctattacagggctacagcaaccaaaacagcatgttactggtaccaaaacagagatatagatcaatggaacagaaccaagccctcagaaataatcttacatatctacaactatctgacaaacctgagaaaaacaagcaatggggaaaggattccctaattaataaatggtgctgggaaaacaggctagccatatgtagaaagctgaaactggctcccttccttacaccttatacaaaaattaattcaagatggattaaagacttaaatgttagacctaaaaccataaagaccctagaagaaaacctaggcaataccattcaggacataggcatgggcaaggacttcatgtctaaaacaccaaaagcaatgccaacaaaagccaaaattgacaaatgggatctctttaaactaaagagcttctgcacagcaaaagaaactaccatcagagtgaagaggcaacctacagaatgggagaaaattttcacaacctactcatctgacaaagggctactatccagaatctacaatgaacaccaacaaatttacaagaaaaaaataaacaaccccatcaaaaagtgggcaaaggacatgaacagacacttctcaaaagaagacatttatgcagccaaaaaatgcatgaaaaaatgctcatcatcactggccatcagacaaatgcaaatcaaaaccaccatgagataccatctcacaccagttagaatggcgatcatgaaaaagtcaggaaacagcaggtgctggagaggatgtggagaaatagtaacacttttacactgttggtgggactgtaaactagttcagccattgtggaagtcagtgcggtgattcctcagggatctagagctagaaataccatttgacccagccatcccattgctgggcatattcccaaaggattataaatcatgctgctatgaagacacatgcacacgtatgtttattgcggcactattcacaataacaaagacttggaaccaagccaaatgcccaacaatgatagactggattaagaaaatgtggcacgtatgtgccatggaatactatggagctataaaaaattatgagttcatatcttttgtagggacacggatgaagctgtaaaccatcattctcagcaaactatcgcaaggacaaaaaaccgaacaccgcatgttctcactcatagctgggagttgaacaatgagaacacatggacacaggatggggaacatcgcacaccagagcctgttttggggtggggggcgtggggagggatagcatttggagatatacctaatgttaaatgacgagttaatgggtgcaacacaccaacatggcccatgtatacatatgtaactagcctgcacattgtgcacatgtaccctaaaacttaaagtataataaaaaaagaaagctttttgaaaatacttacaaactcttttattttccatccctttatatatttttatatatgcatgtatatgtgtgagtgtgtgtgtgtgcctgtgtatatgtatatataaatatttaggggaggttataagtacttacgtacatgatcacaataggctgcctgcaagctgaggaacaaggagagcaagtctgagtcccaaacctggaagaacttggagtccactgtctgagagaaaaagtatccagtatagaagaaagatgtatgctttggaagctagtcccatctcgctttttgacatgtttctgtctgcttgatgttcgctagaagctcatgagattgtgcccatcagattaatgtagatcttcccattgactcaaatgttaatttttggggggggggaaccacccaagaaactcatccacgattaatactctgtatccctcaatccaatgaatgagacactcagtgttaaccatcacaagtccaccccttgttaactcgaatcaaatcacatctcctgctataatacataatcttcaaatgcagacagaaatgaggtaataattacacctaacataatacaattatcctcttacagccaggaatgcagcaatccccaatccaaacactatttcataaagtttacaatacacaaatgttgataagaactcaataaatcttacgtagcatgataaaggaaaataaaaaaaatattttcttagtacatgtgtatacatgcacaaactttttttttaacaaaagaaggaggaaatacttaagacaattaacgtcctcatttctgcagctggtcacttgtttatagcggatatggatgactaacttcttctaacacccattctgccttccttttgtcttcctcaagcacctcagcaggttgcggtttttattgttttgttgttgttgttccttttgttgttgttaccctggtgagtgacccaaaccttaatacctgaagggtctgatccaactgtagcccggtcagaattgggctgttgtagttttccactgaccttaatcgcacgtcatggtaattctggaacacatcttaatgcatcttctgtattttatgccacactctttcttccctccattgtggaggagtaggctgatttcatcttgatagttcaggtcaatcaacccagtcaacactgtaactgcctttttacaatgctgacgtaaaggtaggaggaggcccaagtgtccaggtgacaatcttgacttccagtttaatggaatcattattgtttcatctggtggcagcgcttttcctcggggagctaagacctctaggccagcagaacataatatcataagaaacaggaaacagaaatgttgctggtgaaacaccaggagcgatagtgagtggtgaaatttctacttctattgcttgattcctggaccagcgaattttggctacagaagtaacaatgccatatattggatgctgattcagagaacatatggtcttctggagaactttgccacagccctgcaaagtattgtcacatagttggcattgcaattgtaacttcaaaaggccacttcacaatcttattaatttagttgcttcaagataatgagaaacatggtaagaccagcagatttaatgagcaggagcccactgccacatttctttagctgtaaagttagtgcactggtcagaggaaatgttgtgtggaatactgtaatggtgaatatggcattttgtgagttcatgaatggtagtcttatcagaagcattgcatgaagaatggggaaacccatatccacagtaagtggctattccagtgaggacaaacctctgccatttccttgatgaaagagttccaatataattaatctgtcaccaggtagctggctgatcaccccaagaaactgggccatactgagggctcagttttggtctctgctgctggcaaattgggcactcagcagtggccatagccaggtcaggctttgtgagtggaagtccatgttgctgagcacatgtgtaacctcagtttctgccaccatggccactttgttcatggacccatcgggcaatgacaggggtggctggggaaagaggcagagtggtgtccctggaaccagtgtttttatccacttgattattaaactctttatctactaaggctgctcgttggttagaactcacatggaatacaaatattttgacagcttttgaccactcacaaaggtccgtccacatacctcttcctcaaatatctttctcaccaatattctgatcatgcatctaccaagtgcctgacacccagacaaaccattggctatggaccatgaatcattatatagtcagaaatctggccatttgggtattgacataggctgaaggagagaagatggggtggctgcagtggagatcgtgagcatttgaaccactttctcatgtaacttagttgtgccttaggacctgcttaagcctggccacgtgtataccacatccatttcatgatgaaatgctgctgcgcacaacccactttaagactcgatgggtcagaaagcaccaagttcatgatagacagtgtacttcacatggtgacttgatgaccaacattgaaatgttccaccaaagcccagcaatgggccaggagctgtctctccaaagaatactagttatctgcagaaaatggcagggccttgcttcaaaatcctagaggtgtatggtctgattcacctgtgggagcactgcaaagtattgtcacatcgttggcattgtaattgtaacttcaaaaagccacctaaccgttctatttatccagctccttcaggataatgggaaacagggtaagacaagtagatttaatgagcaggacactgctgccacagttatttagctccaaacaacatccctatctgccactgaaatttcaagcaccattgaatctcctggttcacatggcccaaagagtagaggggtttgcaacgcagcctgaagtagttgcagagtcttttcctgttttggatgcccctgaaagctggcagccctttgggtcactaataagtgggccagtgggacatattcaaataaaaaatgtgctgcttcaaaaatccaactaggcctagtaggtattgtgcctctttcttggttataagaggggcctcacgcaacatcttgttcttcaccctggaaaggatattttgacaggcttcccaagactggacctctaggaacattacggaggtagaaggtctctgaattttagtcacatttatttcacatcctctggtacataaatgtctcaccaataattcaaatgtgcttgctacttcctgctcactcatcaaatcagcctaatttcatcaatgagatggatgaaatcatcgtgatactttacagaagtgaagagcaatcaaggtctctctgagtaagattatgacaggaagccagagagttaatatacccctgagcaaggttaataaatgtgtattgctggccttgccagctgaaggcaaattgcctctggtggtccttatagacaggaataaagaaaagggcactggccaagtgaatggctgtataccatgtgacaggagatgtattaatttgctcaaaaaataaaccatatctagaatatcagctgcatgttgattcacaactgtattaagttgcaatactccaatgtgattatccaaggtccacctgtcttttgcacaggccaaatgggagagttgaattagaatgtgctggtaattaccaatccagcatctttgaaatttttgatggtggcacccatcttcacaatcttctcagggttttgatatcatttcttatttactatttttctaggtaggggcagctcttgtggcttccatttaaccttttctattgttgtagccctcaccttggaggtcatggaaatgtgggattctgccagctgctaagtatatctatgccagttatgcaatttagcactgggaaaatgaccacaggatgactccagggactcactgggcactctgtaaatctgacctaataagctaaagcactattaattacctgacctccctgagctcctactttaactgcaggaccacagtaacattttgggtcccctggaacccacatcagcacagagctagtggccagtagtttctccaaagtctgactatttccctttccctagtacacaattactttggtaaagcctggaggtcttcttggggaaagattgtgtaaagattcactgcataaatagtcagttgtgttgtgggtttcttggtcaagggaacccagcctcctcttcattcgatggattctcggtctttaaactgtctctagcctggtaattgatggaggggccgtacttctctgttttcatcattccgaatagtgatttgtccttttgacgcaacgatttctgtatgtataacataagtatgaatgcagtaagctttccatcaatttcacttgcacgaacaccgtgactaattaaccaatggcaaggctctacaggagtcacattatttgactgccactatcccttcgctgtgcccacattacctttgatggttgagtggtgccacttgacccctatcacactgggatccaactattctcatcatatttaaattttgtcgttgcatgactgtggtttccatagaagagcaattacagggcaattgtgcccaccagattaagggtggaactaccttctccagcccactgtccctagtgttaatctcttttaggcaacactcacacagacacataccaaactaatactctgtatctctcaatccagttaaattgatactcagtgttagccatcacaggctcttggcgataaatttgctggtccccactaaggctccaccttcaagccggttacagcctgaggtccaggttccaggctgatggacaagaatgggaaccactgttgcttttttctgaaacgcatgcattgttgccaaataatccaatcagcaagcactttctttcctttgaagcaaataatattcctggactcagccacatttgaggactattcaaactaccagccgtggagaggagctacctacccaagggccatctctctcctgcaagcttaggagatgtcaggactatcagcagtgggctggagctacccaccacagtctctgctgaaagctggggagataatgggatgaccagctagagtgaggagctacccactcgagggtcttctctttgctgaagtcttagccaatcttggaaccaccaggtgtgaagtagacctacccactccagggtcttcactctgtggagagcttaacatctcataatatgaccagctggatggagaagctaccaagtccagggtttctttcctgctgagagctggacactaagccttgacaacttgcctgtagagataagccgcccgctctaaagccgtctctccgctgagagctggaccctcatcagaacatccagcctgtggagaagagctacccaatcaggatctcttttgagttctgtccctcagtaaatcttgtctataaaggtctcactctccacgtgtccatctacctcattcttcctggataaagaactattatttgagaatcactgaatggtggtgctgaaagaactgtaacacaaacagggaaaaacatgtctcttgctcatcacattgtgaaagacaaaaataagaggacagctaggctatctcaaaaccagggctgtgacaccctctttagggctttgctgtttctggcatcctgaaacttctgggcaccactacattccccagtatcagctgtggaagctgcttgcagtatgcctggtccagctgctgcatctcagtgagatggcacttctgttggtacctaaaatttcctgctttgcaacagctggcaggcctggccgtctatagcggctggaccccacacttgctcaaacaccattgccactctacctcacgtttgcccttggcagctgttaaatcctggcccataatgcaagctgagtgcagcctgtcaggcagagtgggtagagctagcttagcaggcctgagaaaacacaggcaaaggcaccactggccacagaggttttcaattggtaaggtgactctcccaaaatcccatgacaaaaggagcatagctagttgcgtttaaatgcctttcttctattggatcttgaaatacttaaaattcagtctcctacaatttggaatgtttaaaccttatttgaaaatcattatatttcaaaatcttttggaaattaaagttgaaagactggtatttccactgaaacaccctatccctcttacttgcacagacatctagtctctgagaatatacttctgtaattcatggcattgggcttcaggttagcactcttccactgtgttataaagctttctaatgaaacagaatttctgattttgacattttgtactcataaaatttctttatgtgcggagcttttgctgtgcattgcaggatgatgagcagcatttcgggccccttccattaagtgcaattgtaaacgccttttttttttttttttttttccccatggaagaaatgcccaaatatgtttgtgtcttgtggaagcaaaattgatggctatctttatcgtataagttaatacccatgaaaaaactgatggtagtgagctagtgcagtcataggaatgtttttacattgttctttggaatgtctatcagtacagacaatgtggaaaagtgtgtggtgattcacacttttagtctttcagaatgccaatcccactggattcagcaatttcattactgggtgtatagtacctgcaaaattagtcattctattacaaggacgcatgcttgtgtatgtgtattacagcactattcacaaattcaaagtcatggaattaacccaaatgcctatgagtgacagactggataaagaaagtgggaaaacaacaccttcaggacaaatagctaatttatgcagagataaatacctaggtgatggggtaatgggttcagtgaacaaccatggcacacgtttacctgtgaaataaatctgcatgtcctgcatacatatcatgaaacttaatataaatttaaattaaattaaatttaaattaaaaggctttcatttttgtagcagttatagtaactttggaatgtgtgccacaccttatttaagagattttataaaataactataaatcagagttttgacaaactgcaccaaaaagtaaataagtagtatatttcaattctcagttgattgaatttcttttctttcattttgaggatggaatcttacacagtgtcttcagctggagtgcagtggtgcaatcttgacatgctgcaacccctgcttcccagcttcaagggattaagctgcctcagctatttgattagctgagattacacgtgtgcaccaacacagctgatggggtttcaccatgttggccaggctagttccaaactcctgacgtcaagtaatctgcctgcctcatcatctgaaagtcctgggattataggtgtgagtcaggatgtctggccgttgaatgaatttctaattgagaaacttatccatcttgcaaaactttattttctatatcatacttttatgagtttcttcatatgtctcataagtcaagaaaaataatataatgttaatgcattctcttttcattggaaatgaatgtatatccatttatatgtaattaaaagagaaagtctatttagaatgtcatttttcttttgtgtaaaactctggggttttagaaatttctttaaaaatataactttggaaactaattacatttcttgacataaatggttgttttttaaggatcttttttggtaagaaaattcaaaattgtttgaagatacaatgagttgtttaattatatcaaataaacataaaggtattttctttgagaaaacaggtttttcttaatttaggttttctacaaataatattatgattactttctcttcctaaaattaatttatgttttcatcttccctgtatcaagagttcacctgcaatgtataagaagtaagaactgccagcagaacaggcatttccaagatgtaggtcacccactaccatgaatcctagcttgagctacttgttgcgccagctattgactgtgtaaaaaaatctaaaaatgagagtaggctctttgactgcaatatatgacacagacaaagcaataactagtgagtagtttaaattataaatctgattttattcatcaatattcatttactttggtttgaaatactactttttcatttagaaaaagaagtaactcactttttttttgtttgtttgtttttggtcaactagcccaacattttgtagtcatcaggtatgtaagtagaagaactttaatgagagaatacaatttttttgaagacgatgcctttctttaatggtttcctatagctggttttggtaacttaacacatgagttgtttttatcatatgtgaaaaaatacggaaatgttacattaacgaggggccaaacttaatgctataaaatgttatatttaaaatgtatgcactgaagttgcttaatgttattttaattaaattctaaaagaggaatggttttgaaaatcatgatattagaaggaaacatttgagtgcactttattacttctaaatgtccaaataagatccacaaaaaggtagcaatgtttaaacttacacagaactgaaactcaaagtgggaggtaatgtaagcaaattaacatacagtaacataaaacttagtgtatttcaagattaaactaagtgttaagtacgtaattaacaaacatattcagtataggcctgtaataagtaaatatgaaattatatatatatatatatatatatatatatatttccatgtaagtttttttttaacacattgtaggagtttccagctaactcactgattaaaagatcaaatcttcatttgcattgtgagatccatgtagagggaaagatttgcttttaaaaaacactttttttgttaatttatttaatgattgtattgacgtggtaaatatatatttgcaaatgagtgtttttaaacaaacactgctgttgttaaatgctttagctaactgttttacatagttaatatatatatatattttcactatacaggatgatatatactaacaattattaactgatcaccaattttatattcctgttccagagattatctctgtgcctgcagtaatccatatatatagctatttatttattttcttacacaaatgaatatatacaatagactatattgttaactttgtacttcgtcacacatctgtcagtatatgaagatccatttaattttgtttgtagatgcataacttgcaattcaatgtgctctaatttatgcagtccaccgctgagatggattgacgtgtaagtggtattcagttttacactaaataaagaagaatttacacttccaccataattttaaacacaccatcgcattgacttcatctcacaacaaaattctgagtgcaggcaaagtgattatcattatttgctgaggaaagaagcagatatttgcatgaaagttatagctttatgagtcagaacaataacttaaaggaagtgctcacttaaaactgggaaaactctcatttttttttaatgtaaagttctaatggcaatgaattgaatacaatcattttaagtgcaaaagtttttaatgagtaaactcataatgatcagttaagtctgcgtttaacacatgaaaatttaatactacgccgtcttctataactcaaagaaagcttttttttttttttttttttttttcttatctcagcttgtgaaatatttactgagtgggactatctgcccccgttggaccccacccaacaaaagtatttgtgggactcaaagacgctggtgctacttatcaaatacatgctgtgatccagcagctatacctgatccctgtcatcggccacagcatttctaccattgaaaacacaggtagtgacatagatgatgatcgtggggctgggaaatgagggttttcatccttcagacttcagaatggttggtccattgacagcttgatggtgtgcccagaaaagcccgtagacactcaatgccagatagtgaaagcagttgggaggaaggctgtaccccataaagcctcatggggggatctgctcaagaccatggaaacccacctcttgcatcagcatgacctggatatgagacatt

SEQ ID NO: 658 - DNA, 32744 bp, Homo sapiens
  source 1..32744: mol_type = other DNA
acaccccgcgcggttccacgcccctggccgcggcccgggcgctgcgctgctcgacgcggcgggcggcgggcggggaccgggggcgggggcggcggcggcggccgggagagcggaggaggcggagcagggagccgggagcgggctggcccgcgctcctcctgctggctggggattttccagcctgggcgctgacgccgcggacctccctgcgaccgtcgcggaccatgggcgacaaagggacccggtgagtgcagggcggccgcccggcggggggcgcgtgggggcgacctcggcgaggacacgggcgggggctccgattgcgtcctggttctgcgttcgcggccaccgcgggatctagtaccagctctcctccacccgaggtctcctgtgtggtctccccggcagggccgtgggcggggggacccaaagggcgagggccgggccgccccatgtgggccgcagctcctggcccggacacacagctcgctgacacccagcattggccggcagccgcagagacgcacgggggcaggttgacacacaatacacgcacgggcacactaacccgtggcacaggcatgctggcgcacacactggcaaccgctagcacacgctcatcacacgcagtggcacgccgtcatacacgcctcggtcaacacattcttgctgacagccttgttggcatgcacagctcacaatccaacacacaccaattctagcacaccctcgtgctggcacacacgtgtgggcatacactgatacgcacactgtcacctgcactcgctgtagcaaacactcttgctggcacacacatcaccctcactggcacacacacttgtgctggcatgtctcaccaacacagcggagcgcaaggccacaccaacactgacccccacagacacaatcagactgatgccctcaaagactggcaccccacaggcacgagctgctagcccaaggcccgctgacacacacgcttcaggccccacatggccagaagtggaaacacacacatcacacagggtagagcgccccccgccacccccagcctggggaaaacagatcgcatttcatccaaatagatcccatccatctactctgttccctttccctctgacctcctgaggagtggctggccaggggctgttttgaacctagggctgggagaacccctcccgttctcctagaacctgtcctgaaatactcagaaacagtctctgcctctgaaaggggaaactgggacaaaaggaggagggggctggagcaggacagcccctgggggcagcccttcagacaggaccagcgctggtcaggggctcagcgttgccaccctattttccccgttgccctccccaccccctaagtgggcacagcagcctctccctgggctccccctctttctcattgttttctgtctttctcttctattcttgtgtccgacttctgcctccttcctttcctcccctcccctctcctcgtttccatttattattaagctcttgctgtatactaggcgtagtgtgggggatcaaagatgcgcaaggcccactcctcccctgaaggagctaacagactagagagacaccaccccggtgggcaccacctttcagggccactgacaaagctatttctcacccactgccatctaagactctctctccacagtgtgagaaagggcttgcagagattatttccattttctagaggaggaaacaggctcagaggcaactcaggctcttaatgtttagaaactactttccagccatcctcctgacagctcttccaggaggttaattttcctcttcctgttttctagcagaggaaccagagggctagaggccatgtgatttgcctaaggtcaaaaggggccagaggcagggcggaggctggagtccacttggtcatgtctctgtggatggccctagggcactgccaggcccctcatgggccagggaggggagccctgctctgtgctggaggcccaggctttgggggggacggcagaagatcatgctgtgtctgcatgaaccttgatggctagtccccattgcagctggctggccagcactgtgacctaggcctctgtcctcagtaggaaggtatgtgactccttccccagccacatccatctgccctgaaattaagaccctcttgacccatgaggtcaggcttttcttcctgcagggcatagcagggagtcggagccattctccactccattgtccttcctaggctgccttgtgatcggagtgactcagcctctcttgggtctctctgtacctctctgtgacttgggggataagtgtcattgttgtcctgctgacatgattgtcaggaagatgtggacaccatgggcttccaggcacctgttggagaccctgtctctgaggccaaggtattttccatggctccccctgccctgcctcaaactcactggtggacctttgggacattgggcaattgcctttacttttccggacgttagtttcccatctgtaaactggagctatcaatacttacattttagggcttcccttgtacttactgacttcactgggcaggggaagaggcactgcctgaagcctggagccaaggcccggctaaatccacctgatggtggcccagacctccccttcagactctcctgcagccccatgaggcctttctgtccctttccggacagttggctaagtaatttggaaaagaagggcaaaatcagtaatgggctgtaccttgtctttttccgtaaggcatgagtacctatgacttagaagaggaatctgcagatatcaaaaactgaacatcaggaatcatcgcaaccatccctccatctggaattgcacccccatgtgaaagtgacaatgaaaatttatcacaaactgtcattgccctctaggaactcccagggtcaagggggaaagaggtgttaaatacctggacagggctgtgcgcggtggttcacgcctgtaatcctagaactttggaaggctgagatgggcagattgcttgagctcaggagttcgagaccagtctgggcaacataccatctctacaaaaaacacaaaaattagctgagtgtggtggcacatgcctatagtcctaactactctggaggctgaagtgggaggatcacttgagccctggaggttaaggctgcagtgagccatgatcatgccactgcactccagcctggatgagagagtgagaccctgtctgaaaaaataaaaaaaaaaaatacctggacaggactaatcacagggcaggagtatgatggttgctgcaaggtgctctgggaacaatcatatattcattcaacaaatgttgatgagtgccttctgagtgcccagggcctggggattcagcaaggaaggagtctactctgtcctccagggatttagagcagagcaggtggtcataacgcaggatgacatgtgttgtgggaggcttaaggagaagtccccaacccaggcccaggcagggagcatggtacaggaagctctcctggaaaggaggtggcgttggaactactgagcttcatctggaaggatgaataggccaagggggcgggattgggaatgatatttctggccaagggtgcagaatgtgcagtggcttggaggcaggaagcaaggcgtgcagcctggggcctgggctggggatgatagtgagccttaagaggtaaacacagaccggtcaccagcagtctgggaatgtcaggctaaggagagagcattttctcctgaagtggatggtgattcagagaagagtgtgaggcagcagagggctggaagcagatgttttcatttcagagagatgtctttggcagcgccaagtagggtggatgggaagagcaggcctagaagcaggaagaccagtgaggaggctggggagaaacctgagaactaaggctgtgagctctgaacttaggctgcagagaggatagagttgagaaatatgaatgtgaataggaggtggagtccatcaaccttgctggtcgattggacctttgccaggtatctggtgtgtgttagaattacacgcataatctcaatgaattcaactgtaatctagtagtgtagtcattgttgtccccattttgcagatgaggaaacagactagaagagattaagtatttgttcactgccattcagccagcaagcataagaacccaggcctattgacccacaaagccctctctgctactcgacgcttttgcccaagagagggggccttgtctggctcacagttggcctccccagcagctcccagcctcaagttgtgcgtcctttctgggccttgccgtttccacttactcaacagacaacatgaaggatcagatttagacaacaggagggacttcctgagaggcagtggtagggaatggaatttcctttcctgcagatgaactcctcttttttcagagaaaggagggtgatgaggacatgtaatcaccagctctctgtgaactttggctgtcatttctcttggtggttaagccctgtgtgacccatcttggctggaacatggggaagtcctgtggctttggccagggctgctcatggggccgctgggagtggtagcatcaagtctggcccactgtctctgatccctgattccaggccggcctctgggcttcagacttctccactgctctcttccttccaagtttgggcctccttgcctgaggctgacgcctcccgttggcatgggtccagaggtcctgagttgtgggcttgccacttccagggcttctgacactttgggttggtggcagtagaacagcaggctgggagtcagcacaccccaagtgaggtcctggcctctacacagccatgctccgctactgccagagtgcccgcgcctaccatctggctgaggcctgcatggctgggagcagcttggtgagggagccagggcagtctgttataggctggacgtagtggggcttctgcatagaagggtctggatcctggggtaagaatcaaggtgcgaggcagggctttggaaatgtggatgaatgacatcgcatagggaggaggtatagagtatgaagagaggatgattagggacagccagggccttggagagcaccagtgcctgggtatggagagaagagggaggaaactgacggaaggccatattcttggagccaaagaagcagggacagacccacagaggatgagctggagcgagacccctcagattcagccagaaggcattagctggtggcatgggttttggtggagtggtgagggcaaaactaggctacagcgggcagagaggagtgggaggggaccctgcttttctacatgcctggagcaaggcttgagcctcttggaggaagggcgtgaggccctgggctgggagcaagcagtatggcggcaggcagtgaagactgggtatgggaacctaggggttttatctcatccaccccctccctctgccttatgtccagaggcagaagaccactgccctgtgctctcctttcaggctcaggctgaggggttgtgaagtgtgagctggtcctggggaagacatgtaatgtgctggctccagaaaggaggggcttctgactcaggtgggggacttggaggaaggcttctttgaagaggtgaccccggagctgggtgctggagtatgagaaagacttaggcaggagtaaggtgttctagacagaagaaagagcctaggccaaggtgcagatactggctgcaggtgtgggagtgtgaggggtgaggctgtggaggaagggacagccttggccagcaggtcttggatgctggagggggtggtttcaaggtactttcttattcattcatacctcaggctgagtgagctccccatttggtaagcagcttgtggttcagggctatttctgtttctcagttgatgcttccttacccacgctgggtctgcttccccaggagatgcctggcagaggtttgctgaactggactgaaaatttttttcccttcttgcctctgctatcggtccagggactccctaagtgctgaaattaggcctttcccattagtgaatcgtaagactgaaagcgatatttcccacattaggcaagttctcaaaagagaggggtggggtcctgactcctccatcagactgggaagtcctgagggacagggttataccactcctattagcatggggcgcctgagcgggaggcctggggctccctcatctgattggcttttgcaggtgggagccatgtctccctcctcagactggaggcttctgaaggaaggatgtctcctccatcacaccgggggctcctgaggttggggccttgtctcccatgtgagccctgggattagaacaggtatcgtctcagatggtccctgggcaccctgtgttcttccctcctatgtggacaggatggttcctgtcccaggggtggcttgagtcctagtagggggttggagaacagagggggttggcaggacagggtggctgcttttgagagggtaacaaaggactctgttgtcccagccccctcccgccttccctaaggggccctggcagggtcatctctcgggagacgcgcctcctccttcctgggactggccccatctttagccccacttcagaagaactgcttgttccttcccaggagacctggtgccagatgaagcccctgggagttggacaagacaggtccccagaattgtgtgtgactaaggtcaccgcaggaactgaacagcttttcctctgcctggggctgggcggcacctggctgaggccacagttgagcttctgcctccctgcacctggagagggatctgctggtctaaagggccttcagcactggaagcactgtgactgatgtcgagtcagcgggaggcaggatgcaatgtctgaaccattcagtggttcaacagcccgtgtatgggcctggatgaggcaggaggtccctttcatgctggccctgggcctgtagcccacaaccaactcacttggtccttgtgcggccacacccttccctcagccttgcagggaggcttgtcgaactggactgaactctttcttcctttcttcccccatcacactgggggctcctgaagttggggccttgtctcccacatgagccctgggattagaataggtatcatctcagatggttcctgggcaccttctcttctgccttcccgtgtgcaggatgcgtccatcctaggggtggtttgagtcctagtagggggttggagaacagagggttggacagagggtgagcaaacctctgctaggtttgttccctcttcacccttgcccctgccttgtgcaaagggcatggacaggttttggcatagggccaggggaggggtggggagtagactgctgtggctcaccatctcagaatggtcccagaggcatgctctactgcttacttattgctgtgtgaccttgggcatgacatgcaccctctctgggtcctagtttccctgtgaagtcaaatcaggtgagaggcccttttgctagcaggtccaggagtgacctttcttctgggcggccaaagtctcaggcctctgctacaggccagtgggactgagaccaccagggagtgtgtcctgggtggggatgggtgttgggtgctggcggccaggaaggaattggctactgctcgaaagggtagtgctgtctcccatggtatcaggtccttgaacagcagtcatgttcacctccagggacataaagcatctgtagcaggtccagggcagtggctcatgcctgtaatcacagcactttgggaggccgaggcgggtggatcacttgaggtcaggagttcgagaccatcctggctaacacggtgaaaccttgtctctactaaaaatatgaaaaattagctgggcgtggtggcgggcgcctgtagtcccagctactccggaggctgaggcaggagaatagcatgaacccgggaggcggagcttgcagtgagccgagatcacgccactgcactccagcctgggcgacagagggacagagcaagactctgtcttaaaaaaaaaaaaatactcaggtcaggaacacttcctccaggaagccttctctgctgctctggggcctcctctgggcacctgcaggcccttcggtgatctgattagcatggattattagcagattagcatagcggttaggctcttggaagaaccagatttcctggtttccagtcccagctctgacacttaccagctgggtggcttccctgattacttaaccctttctctgctgtggctcccttatctgtaaaatagggtagtaggttgtcatgaggactgagttaaaattaagtaagataaagcaaagaaagtccctgtgcaaggtcagttttatgcggttcttatcgcttatatgacgtctcaccggccctgcctccctaacccagctgtgagctcccccagggaaggaccctgtttgattcatttttttgagcctcccaaggcctcattacaagcctgtattattgctggctttcagtacctgattgctgacttgaccacatacaacagctgtcccatccttcaaggcctggatcacatacacctcttcctctgggaagccctcactggattcccagcgctttgtgaccttcttgtaatctctctctctcagcactcatccctccctccctgcataggtcctggttatttgcacactcgtgatgatgtcatcttgtgaggtcaagaacttttcaagagcaccctggatctgcttgtccccagcacctgcgcagacctggcatgccgctgagctccataaatatttgttcagccaaggcatttcgctgggaggagatactctagggggtgggcagtgtggttggtgaggaccataggacatcattgctgatttcaaaatatctcaaagtagcccagagccataggaattagattattctttgtgacctaaagggcagaggtcactggatgttcagctttaccttgcttgaagactgtattttctgacaaccagagctctctgggaaggggattggcggctcattcccgcctcagggcctttgttcctgctgcgcctctctgtctacttggtccaatcctacttcctaaataggtgccccggccacggagccattctctcccggcctctggagggcgcgctccattcttcatcctcatcctcagtcatgtactgagcctttcccgggtgtgggcagtggcatgggagagtagggagtccctccttaggatggacatctgggtctggctgcagtccctccagtgtggtttgacccggcctgaggaggggaccatggtttccgatgacccaccggtgatcaaggagctctttattcagctggacagcctcccttggctggcagagcacagagctccccatcggctccccactgggcaagtactcagaacccacctaattactggggacagaattctgggcactgcatccagcaggctgcggtcataatcagctaattaaaccacccaagcattgctccttggcccagagcagagggaaggggggtgaggtggtgaggctgggaggagatgtaacaggggaggctcagaaatgggtctgcagagcagggctcggagagggaagcaggaagtgcagagggaaggtgagaaagagggagagaagtgggcagatgcccaaaggtgccatctgaggagagcacccaagtggggtgaatggagggaaggggctctggcctgggagacagggatctcacttcttcactgtccctgtgctgccataggcaagctgcttttcctcattgggcctcagtttctctatgtgtcaagcaggaagtaggagaggctttggcctagaggctcctccctaggaccctttccttctctcgttaggaggggagagggcgtgagcagcagtgtgattctggcgggacagcttggcctctggcagccctgccttctggaagtggcagacagtgtaggagtctgagccagcctagactgggtgggaagggaagacagttgggagcagcagtctgcccacctggctccccaagcatgtcctgcccttgagccttggtcctgtctttgggactgtcctgtggttcccaaactagtcctcagcgagggactctttaaggccgagggctccctccccagggctgggcagtgtcatttccatctgtgtaggaattgcccaagtagcaccctcagagagtgtggaggaggggctcccagagctagaggcaggaggtttggagtttggaattcagagttaggcagactctgctctactgctcacttgctagctccatgaccttcagcttgggtcttaaactctccggcctcagttttctcctttgggaaataggtataataatattaatggggtttctgtgggcagagagggtaagggcttcataaaaagccattgtcggccaggcatggtggctgacgcctgtaatcccagcctcttgggaggctgaggtgggcagatgacctgaggtcacgagttcgaaaccagcctggccaacatggtgaaacctcgtctctactaaaaatacaaaaattagccaggtgtggtggcacacacctgtaatcccagctaccagggaggctgaggtgggaggattgcttggacccgggaggtgaaggttgcagtgagctgagatcttactattgtactccagcctgagtgacagagtgagactctgtctcaacaacaacaacaaaaaagccatcatcattcaagactgagggtggatctcagctccttccctctcccatgtccccttcctcctctttcatccctcttttccatggtccagggtagtgtacacagctgagtgcgcgggggtgggggcacagggagtgggggctgtgccggccagcggagaagctccaaggaaggcaggaagggaagtgagattgcccagggccagcagcagcagtgtggtgctggggctgctggcgccactcccctctggcccctcacccacggcagattctctaggaggaagtggggagagattggggagcaggaagctgggggcggttgtggagggaagtcccttggcatcctggccccaggctcctctttcttaaccctcacccctgtgcagagccccgagcctggctttctgccaagggagccagcaggccactgtttcacacactcagaaaacaacagctttcctggttcccaaccccaagtaggaggtgcctgcttggagctcaggcacttggaaagcagcgcctgctacagggtctgccaggtctggaggaggcagcaaaagagaagaaagacccccagcccccacagcctctcctcgtagtgctgggctgagatatgccagggactctgactccaaggcagctggttacataactgagcatgcctccctgctcctttcctccctgtttccccagaggggccttggaggaggtgctgcattgctcagaattcctgcacccagaaggtcgtggggagcatccccctgccttggatagtggtagtgccgcccacactgtgtagaatggtgagccatgtatgcttcctcagtgcaggcctctggggttggctctgagcattgtcccctccaactctcttgggagcagagctgcaaagcggggaagcctcattagaggaaacaggcctcgtcctgagataatttgcctgcaaactgcccccagagggcaactggcctctgcagccagaggaacaaatagctagcattttacagtttgttccattcaattccacaaacatttctccctccactcaaggcatgtcccgaagtggccgggcctgtcccagtggtgtgtctctctccgagtgggaaggggatttatggagcagctctgctctgcctcccgcctgaggctgccctttctccgaagttgagggcctggccttcccaggttctgggtggcaagaaacctcatgacatggaacactatctccccgggcctcgggctaggagttttcagggttagcttatatcgtttctgttaggccatcgctgccctcctgaggaggttccaaggaacaaagctttctctctgtgccacaccccgggccctgtgctgggcacctgaaatatgaagaggacccagacaagtctctgccctcatgctgctcagatgtattgggagagaggaaatagatgatctcaacagctgccagaagaggggtagtgggcatctgtttatagcagggacaaaacagggccagaggttaaggatcagaggcagctccccagaagtagggactcacgacctggttggaaagtgcgtttgtgtgagccagaggtagtactcttcctggcagtatctctgtgacatgtgttttcatccaggactgacttccttcagcagacttgagaaacctactatgtgccggcatagtgtcaggcactggtttcatctgctgtcagtaaggagtgtcttgggaatgcagactgcttgaggacaaaaaaactagggtgaaaagtgaaagttctgccacagggcatcacagtaagtgtttctgcctggagaaagaaaatggggtgggtatatcaggagacactgggctcagcaaacctgccattggaaaccagggtctactgtcctgagggtatggagaggaaagcttccctctagcccaggagacactgcagagatctgatggctcttcccagaggagcccatgggcatgagacagttgagaaactatgtcttaggagaaacagctccaggctttggggctggcagccaggggccatgtgcgctggtctctacagattggagggctatctttgggcacactgaggccacgtggagtggtggagaggaggcagcaggctggggttctcccctcccctttaccagtaattgcatgtctgtaggcaagttttccagcctctggagataatgtgttcatcctttctcggttacagctgtgctaattaaagcacccagcacattagcagggctcatcactggttgatgttatgatgggtctctattgccccagggtactgggagaaacctacagacgttttaaaactcaataaggagatttttttttgcaacagatttttttgacattctaaaaatgacaaaaatgattacacatcataatcaagtgattaatatgcgttgtcgtttctccctgcgctgactgttccacagcagcgattcagtacagcagtgattcactgtgcatacttgaaacaattcagccacctctgatgttcaccatttgcagagtaaactttgtagtagggagaactttcaaagaaccatgacctggccccacactgagccctgacccagtgtacagaaagacctgagtttctgtacactgaggctctggcctcaacttccatttgagtgtagacctggatgggggtgtgctgagctccctggagaagagaaaaccatgccttcctgtgggcagccccagttcaggggatccaaactgaatggtgatagagacatggctcccaaagtactgttctcctcattctaccgccactggctcaggtcaagccccactcctggcctggatcattacaattgtcttctagttgctgtctttctgctcagtcccaaccctccaagccatcctgttattctgaaattcacatctggtcattcttcccagcctaaggcctgatccactgctccccatgtcctatgggaaagtccccattctctaggtggcactggaggcccttcaggatctgtctctaatgtcccttccacactcctttcccagctgtccccaccacactgctaacaacctggctgcattgacttttttggatcttcctcaacagtctttgtacttttcacgcctctgtgcctttgctcaagccgatctctttagctggaatgcccttcttcctctggtgaaatattccttatattttcaggttgaacttaaaaacattttagcctgggtgcggtggctcacacccttaatcccagcactttgggaggccgaggcaggcggatcacttgagcaccattgcactccagcctgggcaacaggagtgaatctccgtctcaaaaaaaaaaaaaaaaaaaaaaaaaaaaaaagacatttcaatgaaattcattgaacaactgcacagggcacctgctgtagacatgaagccctcccttgactgctccctgcccaggtagagtgaatggcctcttccaggctcccttagcactgtgcaggcttcccggatggcactttacattgtagttgactgctaacaagtcagttccctctctgctcgagggcaaatgtgtatctcttgtctcttggactcccagctcctgactggggcctggcacagtgtggggccagacttgggttagggagtgagtcagggaagattccctggaggaagtgagccccgagctgctgacttaaagaaaaagcaccctttccctcttcttacttccttcctggtcctcgtgctgaaggaaaacagtcaaaactttttttttccttttctgtttttcctttgagataggatcttgctgtgtcatccagactggagtgcagtggcacgatcatagctcactgcagcctcgaagattttttgtggagatggggtctcactgtgttgctcaggctggtctcaaactcctgggctcaagagatccttctgcctcagcctcccatagtgttgggattataggtgtgagccactgtgcctggtctgaaactgactttgaaaagggaaatgtatggcttttgaattgagggatggaatctcctagcctggagataattaaataaggcttagatctccctctctcccttcacgcatttcctgaatacctagaacatgccagacactggagctacaaaatgaattaaataaaacatgtctatctttttctatctccataatgttcatgctggaaactgccctttttctgtttcattggatcaagttcaaatcttagcaggtcacttgtaactctgactctgggcacattgtgccacctttctgagccctagttttcttatgcataccacggaggtgataatattcccctcatagggtggtgatggatcatgtgtgtgaggggctgaacaggtgcctttgacagtggtttctcattgagtggcagccactctccgactggaagtttcttgagggcagtgactatgtttggtagataaatgtgtccttggcacccagcccagggaccaggcatgcagtacatgagggtcgtcagccatcccaattttcctgggacagtctcagtctcgcatctcaggaaacccctcagctcactcctgggcaaatcaggactgtgggtcaccctacagtatcttctcataaagattcgtagagtaggtatatccacgaattaagcaagcattagtgaaggacaggagtaggacttgaacaggccagggcaagcactgggtggctgccttgggcgctgagaggagtcagcagaagggtctggaaggcctagcatgtggacagtgggaggtaggggtggggccatctgcagcttggcagggtgtggggaggacatcaggccctgagtctgtaaggtgactgctttcaaacaggtttcaggctcccaagggccatgtgctcttcctcagacacatccagagagggcacggttgattctcacttttttgatttctattaaatatattgagccctcagctactcttccgccttggtagctggaggcctcttcttcctcaacctactgagtctcagcgtgcctgcccactgccttctgagctgtccatgccagactgagatgagacagggcagaggcacgggctgcgagatgggagagcagggctgcaggctcattctcaggcccagccccagacactgagtgagccttggtttctcacagggtatctgtgagttgtcacgtgtggaaagccccttggcatctttagtatgcaataggtgcacagcaagtctcatgttttgtccccgtctataaaagggggacaataaagcttgccctgctcacctccaggactgtcgtgtgggccaaacgggatgtggatgtgggatgtgggaacatttggtaaactgtatcataccctacaaatgtttgaggatggggttcttaatagggcagcccttgccagcccaggattccaggcccaggattccagcccaggcatggaaggctcctcttggggttgtgccccaggatcacaaagaaatctggcagtgctgcccttgtgagcagcagacctccgcaggcaggtccgagactcagctgagctctgcttcttttttttttgagacagggacagggcctggctctgttgcccagcctggagtgcagtagtgtgatcatagctcactatagccttgacttcctgggctcacacaatctttcctcctcagcctcctgagtagctgggaccacaggtgttcgccaccatcccaggctaatttttaaattttttgtacagatgtggttttgctacattgcccaggctggtcttgaactcctgggctcgagcaatcctcccgtctcagcctcccaaagtgctgggattacaggtgtgagctaccacgtccggccaagatctgcttcttctgaaaccatggcaagagaaagacagacagacttggacctactgcagggagggttaagtagcagcgggactcccatcaagaagaaggaatgtcttccggagcctcatctgtctgttgggctggaggcagggcctttgtgaaggcgggtggtgctcagatcgcctctgggcccttcctccagccccgaggcggattcaccatgaggctgatgcagcttcagcttccagcccttcacgctccagggccctttccaaggcctagcaatgtgtccatgtgctcaggggttttgtgaaatttgcaaaaggaaattatttttgtactcttttttttttaaaacaaacaaacaaacaaaaaaaaaaccttccaagctctgtaagctttaggcgcccaagcccagctctgccctgctgtggcaagttttcgtttgggctaggatgttggtgccacatctgctgcatgtcctcagggggctctcatcccacagcagagatctgtcataggttagagccctccctacagaagcaacacctgaaaggcatccaggggagccagttctggggcaggctgaacctgcagcttcacttgccatgtaaattagagactggaaaggcttctctgacttcaatcttcctcttctgcaaaatggagataagaccttcctggaaaggttaaaataatgaaccataggtgaaactgcctggtctagccccaggcttgtcctgggagctcaggaaatgctgatgaaagctggatggagatggctcaggggagcccatgcctttcattgggatagtctgtcctgctgtctgtcaaattaacctgctgtgtgccaggcctggtattaggctctgggatacaagctgctggggtgaggtggtcagacgaatcaagagggtgaaagtggttataaactgtggagcacggcttgcctgggaaggggctgttgtaaccgggatggggccttttttttttttttttttttgtttgagacggagtcttgccctgtcacccaggctggagtgcagtggtgctatctcagcccgggttcaagcaactctcctgccttgagtagctgggataataggcacatgccaccacgcccagctaatttttgtatttttagtatagatgaggtttcaccatgttggtcaggctggtcttgaacttctgaccttgtggtctgcccacctgggcctcccaaagtgctgggattacaagcgtgagccaccgcgcccggcctgggatgggaccttctgtgggagtggggcagagtagaagtctggacaggcctttcctgctcctgggactgggtcaggagtctggctggtctggtgcctgaggggagctgccagggcaggccgagctgacctttcctgctcagaaaggaagccaggctggcagggtgcggtgcatccctctgcagagtcagggaagcggagtttgttggcagcaatgtcttgccttctgtgcttccctaagacaggtggctgtggggagggcttcgaagaacaaacatgatgtccggctaggtttcagatcccacccctactgcttgttatgcctgtgacctagagacggttacataatctttctgaaccttggttttgtcatctttaaaatgggggtaataaaatcctctcctcacccccatagggttgtggtaaggcttaaatgagataatgcatggcttaacacagtgcctggtacacagtaggtgctcaatacatgctgattgtccctctcctgccccatgaccctcatcaacttctcttttacacttccccgtttgtctgtgcccccagttgggtgtgggctccgtggtggcaaggactgatttttgttcaccaatcattctattccccagccctggcacaatgccttcaatacaccctgaactggttggcaagaagctgcactgggcccaaagaaaacagtgttaagttttagctggaaacctgcttacaacacacctactgtgtgctcctgccagagcacttactgtatggtttctgccctgcagagcttgaatggccacccacaactgtggctctgcccttcttgacaagtggctttgtttttttcttcagagcacttagcacctgctgtaatcaatttggtgagcgttgttgagtcaaactctgtaaaatatttgaagatatttattctgagccaaatatgagtgaccgtggcctgtgacacagccctcaggaggtcttgagaacatgtgcccaaggtggtcggggtacaacttggttttatatattttaggaggcatgagacatcaatcaaatacatttaaggaatacattggtttggttcagaaaggtgggacaactcaaagcggtgggcaggggttggggggagcttccaggctataggtacatttttttttttgagatggagtctcactctgtcgcccaggccagagtgcagtggcgcgatctcagcttactgcaacctccgcctcccgggttcaagtgattctcctgcctcagcctcctgagtagctgggactacaggtgcgcctgaccacacctggctaatttttgtatttttagttgagacggggtttcaccatattggccaggctggtctcgaactcctgacctcatgatcagcctgcctcggcctcccaaagtgctgggattacaggcgtgagccaccgcgcctggccagctataggtaaacttaaacattttctggttgacaggtggttgagtttgtctaaagacttgggatccttagaaaggaaatgttcaggttaagataaaagattgtggagacgaaagttcttttgaagtctaatggtggctgcccttagagaaaatagatgacaaatgtttcctattcagacctttaaaaggtgctagacttttagtcattctcatcaggattgggagggcctcgaagaaaaagatctagctatgtttacagacgcagattttcccccactaaggatggctttgcagggccatttcaagatatggcagagaaacacgttttgggataaaatattctgattttcttccttatctcgcaattgtcacacacatccctgtgaagagaccaccaaacaggctttgtgtgaacaataaagctttttaatcacctgggtgcaggtagactgagtctgaaaaaggaatcagcaaagagagagagataggggtggggcagttttacaggattttgggtaggtagtggaaaattacagttaaagggggttgttctcttgcgggtaggggcgggggtcaaaaggtgctcagtggggagctccggagacttattgtccaggagaaggaatgtcacaaggtaatgtcatcagttaaggcaggaaccggccattttcacttcttttgtggttcttcagttgcctcaggccatccggatgtatacctgcgggcttgagctcagaagccttacagtaatgttatgccagagtcagactggaaagtaagtcacgacatgtagggttacataaaacccaactgatgagtttcactcgagtccgtgtgaagagaccaccaaacaggctttgtgtgagcaacaaggctgtttatttcacctgggtgcaggcgggctgagtccgaaaagagagtcagtggagggggataggggtggggccgttttataagatttgcgtaggtaaaggaaaattacagtcaaaagggggttgttctctggcgggcaggggtgggggtcacaaggtgttcagcgggggagcttttgagccaggatgagccaggagaaggaatttcacaagataaaggcatcagttaaggcaggaacaggccattttcacttcttttgtcattcttcagttacttcaggccatctggatgtatacgtgcaggtcacgggggctgtgatgtcttagcttgggctcagaggcctgacaatgagaattcatggtttgtagaagatgactccccagaccccttagacaggaatttgggcaaggtaaaaaaaaaaatcagacatggccaggcatggtgggtcacccctgtaatcccagcactttgggaggcctaggcggacggatcacttgaggtcaagagttcaaaaccagcctggccaacatggtgaaaccctgtctctactaaaaataccaaaaaattagccaggcgtggtggcaggcgcttgtaatcccagctacttgggaggctgaggcagaattgcttgaacctgggaggcggaggttgcggtaagccgagatcgcgccactgggcgacagagcgagactccgcctcaaaaaataaaaatcagattttagtcctcaacatctgaaatatgcctctccctgctggaatgcaagtgctgcaggagctgtgtcaccaggtaccagtgtctggcacgggggacacgggatatttttgttgaatgaatggctgtctttctttttctctaaagtccagccagattcaactttcagcccagctgccttctagttggggaaagttccctgccactttcattcagcttcagtttcttcatctttagaatgggaaaatagctgtaccatataaagcaagtgctcagccgggcctggaacaaggtcatgatgccaggtgctatttttcaaatgatttccaagggtcctctcagttctgaccttcagtgatctctctgcctccagcttagaggaagactggggagaacattccattcctagcagaccctttctcttggcctcacaatggatttgaagctctgtgcaaactgtttatatttcttcggcagagtttattacccaggcaggccttctgcaattaattacaagcaaagcaaataacttgtccttaggaggctgggcttggcataaacatttacatatagccaggggccagcccaggggctgggctctttcctgcagcctttggaacagagagattagaggatcagggtggtgtggggtgttatggggtggggtggggagaaacagctttccttcaacagcttttcctggactcctccttagcccttgagatgctgtgcttatgctttctttcaatcttcctaattacccaagtagagtccctgtttgtagttgaggaattgaaggctcagctaagttcagcaatttgtctgaacacacagcttgcaggagcagcaggatctgaaggttcacgtggcagctgtgtaggtaaatagactagaagagagaggctagaagttgggaaatgagtgacagattgttcgttcgttcatttattcattcagtgcaaatttgtcaggcctctgtcatgtgtgaaagggagtctgagaggcagtagtgactttttttttttttagagacagggtctcagtcttgtcattcaggctagagtgcagtggtgcaatcacatctcactgcagcctcgaactcctggggtcaagtgatcctcctgcatcagcttttcaagtagctgagacttgtagcacaggtatgtgctaccatgcctgggtagattttaaaattttttgtagagatggagtcttactatgttgcccaggctggtctcaaactcttgggctcaagcaatcctcccaccttgatctcccaaagcactgggattacaggcatgcaccacagtgcccagccagtagtgattattgtgactgttcgtccccacatggaatgtcagaaaccctctgaggatggtcccattaacaggctaatgtgtggcagaaggtggtttcgtgaaaggccaggaaggcagtggtccgcgtagtggtcatagtcacaccatcttacacaaagagacagcttgagtggatgtagtctttaacaggaggggctctgcaaggacaacccactcctcccaccctagaatctggaattctagatccctgaaccctgcttttaggcagagatggctcagagaaggtttggctcaaggttacacagcagcaaggttcagtggctcacacctgtaattccagcactttgggaggccaaggcaggaggatcacttgagcccaggagttccaggccagcctgagcaacatggtgagaccctccatctctataaaaaatacaaaaaattagctagacatggtggtgcgtgcctatagttccagctactcaggcggctgaggtgggaggatcagttgaacacaggatgttgaggctgcagtgagccctgtgagccgtaattgttactgcatgtcagcctgggtgacagagcaagaacttgtctcaaaaaaaaaaaaaaaaaaaaaaagttacacagcaggaaggaatggtcccagcgaagtgctgtttctagtgtgtttacatttgagaggtgcagtgaccaatttgcatgggaaacccttactggctgccccactctcttcagggctctgagttcagtgttttctgacggccctctcagcccagccgttcccgttccactcaatggttttgctgtgcagatctctggagccatctgctgggggccatcttcctctgtgcattgaggaatactgggatccagggagggcaggagcagggcactcctgtctatacgcatcttggatgtggtatgcctggcccctggccctggatcctgggactccttggctggacaggagcccatcccagagggtgagactgcagcctccaggcctctgcagcttcagactatagtagagtctgggacttggcctgagctgtccacaccaggtggccagcagttggcacagagcccagaatgtggtaacagatgcccagggaaggcatgacacttgggatgggtgaatggctggtgggagacaaggatgtaagaagggcactttcatttgggcggcaggggcttcagttcaagtcaccatctgtatcacaaatgaacctcaatgttgtcttctggggaatggggatgaacaactgtcctcattcacagggttttagggaggaggaacaggcagcaactgactattcacaatagccaaaaagtgggaacagacagcctaaatgcccatctgcagatgaatggataaacaaatggtggtatatccatgctgtacaacattattcacccatgagaaggaatgaaatactgatccatgctataaagtggacgaaccttgcaaaccttacgtgaaatgaaaaaagccagacacaagaggtcacctatagtatgagtcaacttgtatgaaatatccagaatagagaaatccatagagacagaaagcagacactggtagttgccaggggttggagagaggaaagaatggggagagactacatagtgagtaaggggttttactttggagtgatggaaatgcgttggatctagatagaagtggcggttttgcacaacgttgtgaatggactaaatgccactgaattgttcactttatgtatttattttatttttatttatttatttgtagagacagggtcttgctgcattgcccaggctgctgtcaaactcctgagctcacccaggcgcaatggctcatgcttgtaatcccagcactgggaggccaaggtgggcagatcacctgaggtcaggagttcgagaccagcctggccaacatggcgaaaccccgtctctactaaaattacaacaattagtatggtgtggtggtgaacgcctgtaatcccagctacttaggaggctgaggcaggagaatcgcttgaacccaggaggcagaggttgcagtaagccgagatcacgccactgcactctagcctgggcgacaagagcaagactcaaaaaaaaaaaacaaaaacaaaaaacaaaacaaaacaaaaaaataaacaaactcctgagctcaagtgatcctcctgtcttggcctcctaaaatgctgggattacaggcatgaaccactgcacccacctcaataaattattttttctgctggttgatgtggttcgcacctgtaatcccagcactttggaaggctgagacaggaggattgcttgagtccaggagttagagatcatcctcggcaacctagtgagactctgtttcaaaaaaatacattttatacaattattcttttttttttttttttttttttgagatggagtttcgctctgtcacccaggctggagtgcagtggcgccatctcggctcactgcaagctccgccttttgggttcacgccattctcctgcctcagcctcccgagtagctgggactacaggcacccgccactgcgcccagctaattttttgtatttttagtagagacagggtttcaccgtggtcttgatctcctgacctcgtgacccgcccgcctcggcctcccaaagtgttgggattacaggcgtgagccaccacgcccagcacaaaattattcttaaaaataacaagagtctgggcatggtggctcatgcctgtaatcccagcattttgtgaggccaagatgggcagatcacttgagctcaggcctttgagatgagcctgggcaacatggcaaaactctatctctactaaaaatacaaaaattaggcatgggtgtggtggggcatgcctgtagtcccagctactcgagaggctgaggtaggaggttgaagctgtagtgagccatgattgcagccctgcactctagcctgggctggagtgacaccctgtctcaaaaaaaaaaaaaaaaaaagacagtaattttaaaaaggcagtgtgtagtaagaggggatggggttgcgatgagacatgggcgttagggtgagactgctggagacggtgtgtgggagagaggctgtggcaggtaagggtgctgagtgggaggcagagtggttaagaccaaggttgactgccagacttcccacactgcccaagctgtgtggccttgggcaggttatttaacctctctctgtttcagtttccctgtctataaaagaggaataacaaaatttttattatgagaatcttcatcttttgttatgggaatcttaatgtttccattaggattaaatgagttaatatttgtaaagtgcttggcacaaagtaagtactacgtgttagctgctgttgttatcactcattcacatttttatttatttgttcatttactgcacacccacgctgtgccaggccctgggctgctttctggggacgcagctgcaagcatgactcagtgcctctctcaggagctctcgcacatcctccggcagcaccctcctcctcccagcctggagccttggctgttaatgaaaattcttcatcacctcctgcttctccagagctgcctgagcaggcaccacctcccctgggaccctgcagagctccttcaaggcattagaaaatgccctaggcttgggagctggtgccctaggtttgaggggaccttaggaaagatcctaggccttagtttccctacctgtcatgggagaggtcagcctggctgagctctgagattcttctgttttctaacctccaagcctctgagtcagccggcccgagttgggcctggggcttttgctttgagcactggcagggtcagaccagagagccctgggcgtgaggtccagaagggatctcagaggtccctttacgcacaaggttagtgaggtccagagagaggctggggcatgcctgggggtgcctggaaggtaatggccaagcctggtttggggagcggctttggtggcctcagcccctacctgttcttagcatgagccgcagagttcactagtctatattttggatgggcttaaagtgtcatgcctgttgagatttattttataaaaagtaaactgggccaggcatggtggctcacgcctataatcccaacactttgggaggctgaggcaggtagatcacttgaggtcaggagtttgagaccagcctggccaacatggtgaaactcctgtctctactaaaaatacaaaagttagctggatgtggtggtacatgcctgtaatcccagctactcaggaggctgaggcacgagaatcgcttgaacccaggaggcggaggttgcagtgagctgagattgtgccactgcactccagcctgggtgacagaacgagagaccctgttgaaaaacaaaaacaaaaacaaagtaaactgccttttttgggctggcattctgggcagccagagtaggggctggggtgagggtcgggggattcctgccccacccctctggtagccattcaggctcagtctgacctcacttctcctggacaaaaacaatctgattccactgctggtcctccttacggtcaatctctccatgttggcacctcccccactgccagcctcagttgtcacccctgcaccatgtagtcctttctccaaccctgacaaccagcatacgttctctgccatttccttccacagggttttcttcaggtctctaccccaaggccctcccgcccagccctgcctgagtctctgacacctgcatccctccctgcctcacctcacgccagccaccagccctgggtccccatgtgctggcttccctcccagaggtttctcccagggacaggggtgggggtggttagagaggcagaaaagtctaggaagggccttgctctcttctccttttaaaaacagctacactttgagtgtagacgtagcagttagaaccttccagaacttttctgtggtctcagaaggggaccaaacaggcaaagtcgcagcagaaagggaaggggcccgaggaggcaggtggagttggagtcaggtgcacaggctctctgggttctcagaagacccaggtatgtttccattcttgctgccccctattccacacccacacccacacgcacactccccaggcctccagggctcggcaacggtgatcagggagggcttctttgggtaggatgttcatttattcagcccttcgttcattcacggcccttgctagtgcctcctcggtgccaggccctgttctgaaccctgaggacatggagtggggccagacctcatccctacctgaggctgacgagggcggctgctgtggactcagaggagcttcgcacgggcagataaagaccattcattcattcattcaccaggaagtgctcagccagcctgctgtgtgctaggcgctgtcccagcagtaaaggaagcaggcaagaatccctgccctcatggagcaactgatgctggtgctatgttcccctagacctggggggagggcgcgggcacacagcctgagttctgagggcttgaaagaactaacagttatctttcagtaattatttaagcaacaacaaaaccctccacattagacaaggagaagagagcaatcatccagaatttcatcatttagaaacaacatttctaacactttttggtgtttgtgcttcttgctgtgtgtgtgtgcatgcatgtgtttgtgtattcaagctccattgtgattaaactgtatgtaaaattttgaatacgtttttttttcttcagtatctcctatgctattaactcgtagtatctcgattcgttaatgattgttcctcatgtgggtgccctacagtttaaccagccccttctttggtatttacattatttccaggtgtttggttttgtaaatagtgctgaaatgattagctttggagctatcccgtcacttcctgaaggcagagcctggaccctgggtggctcagaggtcccaggcttggctctcagcccctcccatcttccctgcacacctttccgcttccttcctgctcagctgcttcccttcttgctcatggggggagagaaggtttcctctccaggtacacttatttttttcttttttgttttgagacggagtcttgctcttgttgcccaggctggagtgcagtggcgtgatctgggctcactgcaatcttcgtctcctgggttcaagcaattctcatgcctcagcctcccgagtagctgggactacaggcatgcaccaccacgcctggctaatttttgtatttttagtagagatgaggattttaccatgttggacaggttggtctccagctcctgaccgcaagtgatccacccgcctcggcctcccaaagtgctgggattacaggcgtgagccaccacgcccggcccctctaggtacatttcaatgagggttgttccatttatcttttgctacataacaaatcacccaaaaacttagtggctcaaaacaacaacattcattttgttatggactgtggtttctgtaggtcaggagtttgggaagagctccgctgggcagttctggcttagggtctctctgatggctgcaggtggcacaaggtgggctggagcagctggttgcttggagcaagacctattgattttatctctgaatctgtccagttttctctttctctctcattgctacctccctaatctgggccaccctcatttctgacccagatgaataatatcagcaaaacatacagcacttcctgtggtccaggtattgttccaagttctttacatgcgtaaagttgctcatttaatcctcacaacaacccaggaagtagacactgttgtaatctccattttacagaagggaaaactgagaccctgagaggtttcccatctaataaacggcagatctaggatttgaacccagagcagtctagttgaatctgcctcctaactggtctctctgcttccactccagtctctctgcccttccattcgcctcccagcagccaaagtgaacgtactaaagcatgactgcattgtgtcaattatctgctgaaaccccaccaacatcttatcacggtgacagagtaatatccacacttctgatctggccttctggtgaccaggccctgcccccatgtccctgctggccttgtaccttcagtgattcccctgtcttcccctagaaccctcccatagtaggtttggtgttttttgttgttgttgttttgttttttgagatggagtcttgctctgttgcccaggctggagtgcagtggcatgatcttggctcattgcaacctctgcctcctgggtacaagcgattctcctgcctcagaatcccaagtagctgggattacaggcatgtgccaccatgcctggctagtttttgtatttttagtaaagacagggttttgccatgttggccagactggtctcgaactcctgacctcaggtgatccatctgcctcaacctcccaaagtgctgggataacaggcgtctggctggtaggtttggttttgttttgccccagttcagcaccccagcccttgtcccttttggagttagtactgctgcttcttcaactcttagcccggatgtcactttcttggggaagacttccctgactccttaggctggtctgtgcccatcctgggctcttggagccctccactttatagcatttattgtgagagtcaccatatacttgtttgtatgatgcctgtcttgcagggctgctgtgttacctgcttgtaggaacgctctgtgttctgtttgcactgtgatctgtgtcatggtaaccaaaggagttgtgtagtgcagagccctgcagtttccctggccagacgggaagctttatgtagacagggccctttgcccaaatctgccctattcaccatatgtctgatggccaacagcatctgacacacaataggtgctcaataaattctgttgaatattcataagaagatctaatgtgtattactaggtgccagacactacactcacttaatcctcagaacaacctgatggggtgggcactgctatcatcccattttacagatgaagaaacaagttgagtgaggggaggtcacttgactgatgccctctagccggttccaaccaaggcagaccagttcactaggataaaaaagtgaatgaaagaaggacccctaaattccagcagcttcaagtaactcagatgagggctgtaaggaaaacacagactaaagtcatcccataaagcctctctcaaatggtggtgagcatgtgtgtaaggaaggtggtttccgccagcagggagagaagaaggagagaaaaggccctggacaggagatgggttactttggtggtcactctccccttgggctccaagcctggctgcctactttcctgaccacagcttctgcctcccaggctcactctgccataatagagtcctgaggaagaggtggggggatggtggtgggggggggtgagcaggaatggggtgggattttcttccacgtggggtgggattttcttccacgtgctgaggtcataccagaggcctttgttcttacctacctggaggcctaaactttaccttgtgcctctcctgaaaggaaggagggcaggaaagcaggtgtgcaggtgagggaaaacagagaacaagagaagtcaaaggatttgtccaagacacataggtccctgggagcctcttagcccccactagtgagtgtatgtgtgtgtctgtgcacgtgtgttgtgttgagggcagaggggcaaagatgatgtctccctattgctcagctcccatggcccctcctgtctcctcatcccagcctcctgtcccaccagaggaaaaggcccccatgaaggctttgcgaatggaaatgaagtgtgtcccagcgcccagtggtctgggagtccagggccatctctgtgctggcacttcctcttctgggttccttgggtttcctagcagattccaggctttccagagactaggatgaattttactctacaatgtttttgagtttgtgcggtgctggagccagcccagctgaggtcaggtctgagggctttgggaagagttgggtacttgagtggggtctcgaaggaggaatcggagttaccatgtggagcccatggcctcttcctcctggagccttcagcccttgcgggaacagagctgagcaggccctgatgactgatccctccccatctctggtggggctatccagccccccaagctttcagaggctccagcctcagggccaccatccagccacccgcccttggaggcctcagcttctttcccgcctccttctccacaggtctcagtctgctggggattctgttttggttggaaggaggaggcggaggagtttgcatgtctggctctttcctcctttctcattcctcctcctttcctcctgcttgctgatcaagatgtttcctccgccagcctggctccactccagccccctccccaccttgggcaggcagcagccatcctctccggcctggggcttctgtgggctgtggcttcccagggtgcacccttaatgccctcttcaccagtggagggtctgtaggcaaatccttcaggatgggggcacctcacctcttctcttcctcctctgttgaagcccaaatctcctgggagaagaggctgcaggaccactccagggctgcctcctgctctgggggggactttggtctcatccctgtccccgatggggcttcggtttcctggggagttcacagccaactgggcctcttgacacagaggtacatagcatgcttcgtatttgtttggtaggagttttgtgctgctttgccaagcatctttactccaggcctggaagcactgggtgggggctaccctccaccccaccacctaggcaagtggcctggaatgtagaatttgagtacttctaatttttcaaaccccaaggggtccccctggggacccttacggtccctttccctgtctgctcctcctggcttacagagcttcacagggatgaaaccagcgtacatcctggcctgacagagcccaacctcggccttgtagccttagcaccttgcactgtgcctggggcagggcagatgcttattaaatttttgtgcagtgaatggctggaggagcagccaggaaatcgcagggtgacctgatggagcagtgaggacggacaaggtgctgagggaacacttcccagagcccaactgcattttgaaggatgagtaagagttggacagagaggcagggtgggaagggcattccaggcaggagcagcctgtgcaaagtctgaaacagtgtggtcagatctggcacttaggacatgtgtgaggaacctttcatctgggcatgggcaccctggcctcctggagtggcaccagtgattggccccctcacctggtcccgggtctctgtgctgcgggcctgggcttggagagcacgcaggcagtggaaggggaggatcctgggggcttgccagggctccccagggcttgaggctgtgctaatccttccctcctgaggcttgggctctgctcccctgggcgagcaggttatggggtttgaacctgttggagccagctgtggttcaagcaggttctagctacctaacatagatagaaccaggttcagttctggtctccgtaat

SEQ ID NO: 659 - DNA, 32744 bp, Homo sapiens
  source 1..32744: mol_type = other DNA
gttccggcccatgttgtttcggccgaggagccgtcgccgccatttcaagaccgtactaggtagatggtcaattagagttcccagggtttgaagcctgtaactgctgccgccgctcaagccctccagagcattgctacggctgctgcccttgtactactacctccaaatacgttcttgctggtagtggcggcagcaggaccaattacctcttttttgctctccctcgagaagctccagatggcgtcttccgtgggcaacgtggccgacagcacaggtaccggtgtcccgttctaccttggcagatgcccccttggggtctcgcgccgtcctctaccttgtatcactccttccctcccttccctcgaaccatccccattacatcagtgacattgctaagcttttcgtggtctactggcatctgatcacatcgggttttccgctgttgtccgcttcccgaacatttcctcctcctcccttgcttgctttttgctgcctttcttgctttgtttttatttcgtaaatgttctagcattccactctctccaggcgcttttatcacacgtgcgcgcttagaatgtcgtggaatggactgcattggaatccctgccctttcactcctttgcagcggttttctcccctaattccagctcatcgcctctcctttttcccctccatctcctccttcatctccccccccagtcttttccccttagccagatttggtccttctctgccaatctagggcgggggtgccgttccgatgtaatcatatcctcactttgcatcacccgaggacgatcaaaagctcgtcgatggtgccacaagtcacctcgagaagaggggacattgagcagcaccctgctaggcagtgcctttctggtgttctttcggttgagcggtcccggtttagattggaaatttccaggggtttcctttgccatcgcccaattccaccgctgccctcagcctggatttcccaccctgtccgcggggaaccacacccttcccttcgcgaggttgccagccctgttcacttcctatccttgggggagaaaccaccccgatgctgctgctttggcgttgaccaccctgcccgcccaattctcgctttgtgttactttctcgatgtattcctccgccgccgcctctgggtctgccatccccattcttcagcccagtatctctttattcacagggtgtaatattcttttaagtttccatccctgcttgaagagtttgtaaagcaactggagtgtagctgcacaagtacaaggcggttgcccttttagacacttcagtcgcgagcatttggtactgaaaatacgaaaacaaccaaattgtaggagtgtccttcagctgcctttccatattgaggcgatttgggcggaagggggtggggaattgggctgcgcttctgaggtttcccgcgaggttattttttggttgtttctcagttgagatgtgtggagggttttagctactgttcctggaagttgtgctgtaagtagtaggtgaatcgtcaatagtgtcttatccgtaattgtagggagtgggattaataattagtccgtgctcctctccccacgtctccaccgtgattttcaaaggtttaagattctgtactggattctgtactagcttgccctttttaatgtgttatttatttgagaaagctgtcgtttcaagtgttaaaatagcagataagcggcattgaaaagtgacaaagtaatgtgtgaaaacaaggagctaggaagttctagagacttagctaaaatgtaattttagtttctattaaagatataacctctcccagatgtggatgcaagtctcaatgctctttgtgttggtggtcagctgtgcattctgtcaggaaatttactttgctttcctcagtatccggaacgctcatcagctctgatgattggggagctgggctcaaatttgaactagtcaccttaaccttggtagaattaaataatttgtccatggtttcccatttcaaccagctagtgaagtgctacggtcgaattcccagtttaagtatttacagttgtgacaagcagttttttttttttttttttccctctctgggctttagctatatcctttaaagatctttatgtatctggattaagtcacttgcagcgaagtgcttttatttattcattatgttgcgctttatcaaatatattttagcgtccatcctccctccctcccaacgttttgaccattgcagttgcaggtaactgcctggcttatataggcttgtttgcaatgtcttaatcctttagtcaataccagagctgtttggaaaatgttagtgctaaaccaacgtgggtgggatttagccaatttagtctccttttgagtttgggatggtagaggagcagtgtaatcttgggtctttatttaaaatgtttgatgacccctttaactattttggctgttgtcaaatgacaaacatcttgtttatcagctgttttaaaaatagcactttgactttttggtttttcccttaggctcgtttctacttgtccttttaaagaattaaattctgaaatatacaaaaattgatataatttaaagaattaacacatctggtgtcctcactgaggttaagattgatagattgttaccagtactccacctcaacaaatccaacctgaaatatggcacaaaatattacgtttcccaatatgttattctgatattattaagtctttgtgaccttgcaaatcacacgtttaatattttgtttctgtatgttaactaaggtataaggaataatgttcagtgaatccttagatgctacctatgatttataatttaaaagtacaaagtatttttggtcataaaatgtaatctcatatggaagtaaatattcctttctagtttgggaaagaaagtattaatgggtgaattctaaaaatgccaattctgcacttgatgttaacttgaagatatacataacgtgcagaacactctagtgctttacatagtttcaagcatttccatttttaagttaaatataccatatttttacatttttttggtttacatttctaactttttgttttcccccctccttccctcaaatgttttgatgattctccagaaccaacgaaacgtatgctttccttccaagggttagctgagttggcacatcgagaatatcaggcaggagattttgaggcagctgagagacactgcatgcagctctggagacaagagccagacaatactggtgtgcttttattactttcatctatacacttccagtgtcgaaggctggacaggtaggagatgttggggtacctgctcgtgattgctgcctctgggtgctgagcttgaaaaatgatacttaaatatttgaacttgaaatttttccagtaccgggtttcaactgagccgccaacgcacatctgctctcttgcccacttgtgacatgcccagctgccagtttttctccttccttttgtggtggtggttatattatcagtatgactagggaccttttctagatttttctatctgggtctgctgctttctagactctgttcaggtaataaattattatcaatgtatatctgagcatccagtctccctttcatgagacctgtcagtttgagggactgaaatgctcagaaatgatggttatgtatgctgtggcaggagatgcatacctggagtttcattaagttgttatggtgtgttgcttttagttaatcagttgaattaatcaaaagggaagaatttgtgttcctgtccttttaataattgttattctggcatatttagacacttaaagatgtgcatcattaaatcttaaatggaaaatgagactcgtgcacatagctttccattttttatcttaatgatcatgatttccaatgtggtgggtttttttttttttttttttttttgagacggagtttcgctcttgttgcctaggctggagtgcagcggcgccatctcggctcactgcaactctgcctcctgggttcaagcgattcttctgcctcagcctcctgagtagctgggattacaggcatgtgccaccacgcccagctaatttttgtatttttagtagaaacggggtttctccatgttggtcaggctggtctcaaactcccgacctcaggtgatctgctcgcattggcttcccaaagtgctgggattacagacatcagccaccgcgcccggccaatgtggtagttttgtaacaagactctagttagaatttttttcttttttttgaggtggagttttgctcttgtcacccaggctggagtgcagtggcgcaatctcagctcactgcaacctccgcctcccgggttcaagcgattctcctgcctcagcctcctgagtagttgagattacaggcgcctgccatcatgcgtggctaaatttttgtatttttagtggagacggggtttcaccatattggccaggctggtctcgaacacctgacctcaggtgatcctcccgcctcagcctcccaaagtgctgggattacaggcgtgagccactgcgcccagccaataattttatttaataagaaaaagcttttcattttgaaatctagaatacctccacttttgaaaatctttgatttcccaaatttttcttgctatgcactagttaaaagataaggtattatataatgagcaatagcacagatctcaaactgtttgagttgcatatgggccataccttcttttctgtaacgtgcatacccatgcattaacacttgtcgccttttccagatctgctcactttagcactctggcaattaaacagaacccccttctggcagaagcttattcgaatttggggaatgtgtacaaggaaagagggcagttgcaggaggcaattgagcattatcgacatgcattgcgtctcaaacctgatttcatcgatggttatattaacctggcagccgccttggtagcagcgggtgacatggaaggggcagtacaagcttacgtctctgctcttcagtacaatcctgtgagtaaaattttaatggttactttcccttcctagaaacccagaaagaaacatagtgtgatatttcagacactaaagtaggttttcacatggaataaagtcaaaagtttagaaatgcgtatgtacttaaaatggtgaaattgcttttagctggtctgcgttatgctaaaatatttgttttatttagcaagttatattaaaaagcataaaaattcttattgcaagaaactacatcaattttaaaataacacgtataaagtacagagcacatgacttttttctgttgtgattaactttggataaattctgataagtgtttgcaagttaattgattttcaaggaatggtggataatgggtcttaatctgtaaaatctgtaatataaaatagtttgaaacaagatgccactatatggaatgatgtgaaaattaggctacaaaatttcttcctcaatatcctattctcttctctttcaatgtaattagaagtcatagaatttagatgatactacttatactgggcttttgattagtttaaaaattttttttgtctaagttgcagatgtgttctgggaacaagtaaggctcagctggcagaccttaaattcatactgtgtttaggatctccgaaagatacaaaaacataagactttccctcagaacttatgatgtagttagagaaagtagatgtaaacttaagaggtaaatgatagtggggttatagaaatctagaaaaagttcccaagttacattgtcaacattcagttttgtaaccaacctggaaatggctaatagtttattttagctaccgtttactgaaagtctgtgtggtcagacactctactgacagctttaaatgattggtcttagttaatcctcacaataattcttcaaaatagatgatattatttctgatttttatcaattaaaaaaaaaccatggactcagggttatgtggctttcatggggacaaagctagtaatgaagtattaatagatattaaaacctgagtctgaatatcctcaaagcaaatgttgaagtgaaaagaaataaaagtgggatgatgtgcccagagggcactcacccatcaaagcagcccttgagcacagttaaaaaaccattgatcatattttgctgtcccttattttttggttaggaaactgaaactaaatttagtagtttgttcaaagatccgaagtcacttctcatgatgatatctattaacaatttttgtagttaattttgagagtttaaacgtgtcctttttagaaaatccattgctttaaaaaacatttttttttaagagatggagtcttgctatgttgcccaggctgtactcatactcctgggctcaagcagtcctcctgcctcagcctccagagtagctgggactataggtgtgtgccaccacacccagcttctaaatttattggtttttgaatggatacagtgaatacctccagttagcactcttggaggtagcaaatgaaactaatttcttgtctatcttttctgagacactcagtgtatatatatgtacatttgagtgactttttgtaagttttattgcaatactaatctagctagttacccacataaagttttagggagcctggtatgtactgccactgggccttggaccccatttttcccagggctcagggctcacctctgtacccagttgtcacagtaagttctttacctttattaatcaggttgattctactcttattgatagtgtaccctcttacacagctgtggttcttgccatctttaactctaatgcccttggctcaggtttccagttgcctatgtgtgtagcagagcagtcattgctactgatagtgtacccaagcagtaggactatgctgagaaggaaaactaaagtgagagatggaaccttgctatttaatatctaacctgctgttagcaggaagcttattgttgtaccctaccaaggaagtgagatagtactaaaataaatcatgggattacctcttgaatgcattgaatggccatgtgttgtcatctggttctatgtttcttctagtggaaggtgctgctttacttatttattactgtttttaccaataagaatgaaaatgggattgtgcaagttcccttgatttcaactaaacatgccatagtgatcatattttaatttatttcaggatatctaaagtcttaactagatttaaacttactgtcaaatgcccgttgtcagttcagtactggtagaaccttgcgtctgttccttatgttcttgttgacagtgcttaaatgcatcattagtacattgtgtacctgaatcatagatgtagttggcattctatgaaaaatggttaaagaaactcaggttattttggttttgcagcagtgaaagagtagaatgttaaggtggtatctttggtaaccttggtaactgttttcaacagtgtttatctttttaagttaatagatatgtcaatttagaagttgttctctgtgacttgattatagaaattatctttgagacagctatctcatttttttcattctgaattatcttctataattataatgttgggtgttttcataattttggtaagattttagtctgtcattttttttttttttttggagacggagttttgcccttgtcacccaggctggagtgcagtggcgcgatctcggctcactgcaacctctgcctcctgggttcaaacgattcttctgcctcagcctccgaagtagctgggatcacaggtgcccaccaccatgcctggctaattttttgtatttttacaaaaacaggctttcaccatgttggccaggcttgtcttgaactcctggcctcaacagatccgcctgcttcagcctcccaaagtgctgggattacaggcgtgaaccactgtgcctggcagtctgttgtatttgaaggtgttattgcagatagcaccttgcagtgacagcacatgttctttgacatggtgactcactagagttgcctatacctggcaattccttttgcaaattatgtataaaattgtcctttctgtaacggctataaccctgagttgttttaaacaggtctgtttctgaatctataggttgttgaattgttgcttgtgctttgattgtggatgcacagaatggagagctgctggcatcctggccatcatgtgtgttcctgtcatgttatttgttacttgttactgctgagcctctcttatacagctgcactgtagaaaaccatatatttcgattcttctctgttctgctttctgttgtatatttcgattcttctctgttctgctttttgttaaggttgctgtgcaaatgtcacatttaaatatgtgagtgcttattgtgcatacaatgctttgttaggaaatggggagatgtgttgtgggggaagttgcgggttataatataagacaggacctgacccgtaaaggaaaaaatggtgtaagttccttggatgataattgttggagagtattaatcagaagatttcctcgagtgggtgcttatgacctaagcattctgtaggaaggtaaatagcaagtagacttccttggctgaagtggtgagtcaagtagtaacaagaagtgaatgtagtagaggagagtcaattggaagatttataaagaatagagaggctgaggagtttgaatttaatttgagaggcaattgagaattactgtaggtttttatcgacctgattttacttcatatgtatgtacgtgtctagatgttgtggctggtgggggtgggaggctctaggaggaaaggcaggaaactgatgcaatcttaggagaaatagttctacaggaaaatcttgctcatttctatctccttttattctcacgattttcccttgtatacagtgccctcctcctttgtctattaaaaccctactcatccttcaaggcccagcttaaacttctcttatgagctcatcatctagttctcttaaaattctttactactgagtgggcatttagtgtgtgccttgtcttttcacatagattgtaagccccttgatgataaggattctatatcttttccctatagttccaggcatgttattgaattgagtaacagtttgcctgaaatgtattaacctgggatggataaaatgggctagttttgagaaatataattgtcaaaaacattttgatttgacagatgaagcagaagtgatgtcttgggttttgaacttttgggagaatggtggtgcccgtgcgttttctagaaattagctgttcatgcacataggtttggatccccaaacaggagaattggatttcaccgttacatttaatatgatgttttagcttttcctaaaactgccttattgattatcttatagtaatcttgaagataatgtatttttaactatgagcattgtgttaacttgatatagtatactgtaatggatctagatgataacaaaatatagatatgctgtcaggacttaagtggcatccatccaagagttcatagaaactagagggtaataaaattacgcaacagctggctactatgtatggccattacagtcattgttggagaattattgcaagacttctgattattatgacttagaaaaggcataggaattggtaaaagtccaaacatgtataaccacaattatcaagtagtagaaggagcttgtatgcatggattggattatgcagtcatggtctgccaaaacaggggtaaccctttcagtttagaaaaaaacataaccatacaaagtagatagcaagattatataattcattacttctgagagtatagtgttaaaaagtgctcaggctaattagaggagaagtcaaataagattaatggtacctttgatgttttgaggattagtattagccttttgtgcttgaagtgatgggagacaaccttactctctagaacatcagtcattgcttgaaggacagtattgagtcagggagatgatggaactgacccagtatggctgaccgtaagattgttgtgtggcagcctgtactttgttggcagactttttggttcacctgatggatgatactatacaaccacaaaagctgtttatcagtagaattaagtgattttggaaaccataatatagttccagagcaaatcatatatatgatgatttttcggcacagttgacaaaatttcactttctaggacttaagtctctttcacccatggaacagtttggaataataagcatacttcctgttgtcattgtttctgcctgttgactggtagatgtgactgacaatggcaaaatagggcaaataaaaatttaagctcactgttgtgatgagtgtctcatccagatgaatggactgatgagtcagatgactagcagcacaattgagctgctaataaaaagcagagtcaactgcttttcattattcacccactcaactctaatggcacttaatactaatgagtaatctagtggcaggtgccaggattgaggctttggttggataattcttctgcccgatagtgaaatgaagtcagagtttctaaatatgcctgacagcctaagggtaggtttgctcataggtagtcatttgctaaatatgtttttttccactctggaaaattttcggtccttgatacagaagtgattcatcataaccttgaataacatagttggacaaatatttgagatgtgtgtgtgtgtgtgtgtgtgtgtgtgtgtgtatatatatatatatatatatatatatttccttttttttttgagacaagagtctctgtcgcccaggctggagtgcagtggcacgatctcggctaactgcagtcactgcctcctgggttcaaccgattctcctgcttaagcctcccaaatagctgggattacaggcacacgccaccatgcccagctaatttcatatttttagtagagatggggtttcgccatgttggccaggttgatctcgaactcctgacctcaggtgatcctcccacctcgccctcccaaagtgtggggattacaggcatgagccaccacgcccggcctgatatatatatttttaatgtgactgacatttggggaggagagaaagaagctctagtaaggtcccatagtattttatgtgaagctaatggggccaaatgcatttcaacattcagaatttttaggatattagaaagataataccatatataaaacacccagaaaagtctggagcagcaccttttagtaaaacacatttatatttctgcagcaaaagacagtattcatactaagtgagataattaaattctataaatagtttcatgtcacctcaagtcaggtttaaccctcaaatgagtttttggaactttttgggatttggaattgtggatgaggggttgtggtcctgcactgaagtttgtcaggcagtatctttagttgatagaataaaatggcagggagctagatgcttaaaagtgatttcaagatatttttaattgacaaagcagagtataattaatgacagcgtctctgggtttctaggatttgtactgtgttcgcagtgacctggggaacctgctcaaagccctgggtcgcttggaagaagccaaggtaggtgtttgatagaacacatttaaacatcagtattatgaaaacttgtactttttgccaagtcttcaactcttcattgagctatcttcacaaaacagtcctttgaaactgaggaaaactgacggcacgaatcgcctcagaatagagcagggccaggctttggcatatctgttctaaatctgggggtaaagcaagaacctgaacattttggagcctttctgctgagctagaccatctttataacactgggctccgtcatgatcttatgtgggaataaataacattccttcaaatctgaggcttgcctgctggtgacaagcagagcgcctgtgatttggctcaagactcctatatgatgcaggtgccattgaaaatgctgctcttctaagtcctttgtggcttgtaagtggagaagaatttcatccaaatgttaccctgtaatactggcatttaaaattcttatttaaccttcctcccttcatcttcctcaccctttttacagtggaagaaaggctgttaaaatgattacaaattaataattggaacatcctgtcccttgtccccactcccttcccaagttcctttttcctcttttccaatcctagttgtctaccttcttttcttcctcatttccttcttttattcctccccaccccaaccccttaaaaaaaaggtcagaaggacaaagctggtttgtttgggaaatggactgatcgaaagaaaacttgccaaagtggaaaggtggcttttagcattctgtgtttccaaataatgaatttgaacaccaggttgggttaattaaagcttttggtataatttaaaattaaatttataaatgcagttgtcttgttacaagccaccttacgcaaccgcgctgcaggggtgaggagtggggagaaaccagaatgcttctgaaactcccacctgttgctctgagccccacgcgcatgctaatgcgtggagtgtatgcgcagagtagctgtctgtttgactgcttcatccagggagggagaaggcttttcagcaccatctaatgttttaaaaggcactagttttaagtgcacagctcataaattctgctgacattttggattaaccttatgtaggttgccagctaatgaattgtaattgatttcaatcttagctgataaatctaattggtaatttatagaacaaatatttgataagctcctattaattgtcaccccaccaagcggacagctaacatgaattgcacttcactgcagctttagagatcggtttaggctgagacattgcgcctgccttaggttgctgacttctttatttcagagctctggagacacctagtttgaaaaatgttattctgtttttttgtgagaacttagtaaacaagaaaatactcttgagtgaaatgcaatgtatttcttttgtaatcagtgcatttgaaaattcaagccagcatattcctagtagatggaagcaaaattaagttgtctttgtagaaaatgaagagcctttcttccagcaaaaatccctgctgtatgcaatagccctgattaaccctctcccttctgcatgtttcccatattacagacttgagactgtcctcattcccatatgtaatagacatccaaagaatttcaattgctttgttgaacttttactaatgatcttgtttttattttctctcttgtttttggtttttcaccattgatattgtatttagaaggtttcaggtgggtgaaacctcctattccatgcgtaaggtgcctcgctgaagggagctcgaggcctggatctagggcagacacacaacctcctcctcctcttccagcaaggaacgcaccgaaaagtcacatgatgagaaatatggtaacgggtttgtaactgccacagcaaaacaatttgcctccatgcctgaatcttctgtcttgtggcttcagaaacagcttaaaataattttatttacaagcaagttatgtaagagaatgttttatactatagccacaattctgtcaaagataagtaaaagttaattgatattaaaaattattagagataatttacttagtaaaagcttctaactcttcttgttgttcattttttttccttttttcttctttgtttggattgcagcattctgctcttctgatgatgcgctgtgaccctgcagtagcgcaaaggctgcgcagcgttaatgcgcattgcgtgcgaatgaacccctgtgaacggttgactagatgagtaatctgattgactggctccctcagtcctattctgtagcctttttggataaaattgggttttaacatacctcgagtccaactaatctcattaaacaaatattctccatgggcctgtctagtagattaatggatctggttggccgtttgctgcgtctaggggtgttctatgtagcgcagcagttcgcagcgattgcgcagtgcgatgctgttaggttgcgcaagcgatgtttgcgctcgcattacagggacctcaacctaggtgcaatcctgtcatgtgaggtttcagcttcagtcctccttgggagacggggcattgtgagaatgtaacttaaagcctggctttatgatatcctacttggcagaaagacatttttctcctcagtagcatagttttgatgttagtgaggaacattgttgaagagcagcatttcccaaaatgtgtttcatagtattctaataaaatgcccaatgaaagaagagttccatggtcaactaagttcagggaaccctgttacactattaaaggcttagggaagtccagtaaagaaacctattttccgaatttatttgatcatgaactcctttttttttcagccatacctcttaacacctcatagaacacactttgggaaacagtgggggtaggaaaactcggcctcaagttgcgccctctaggtagcacttgaaaacatgacaagggcccgtagttgtttggataagagaactccagcatagagccttatagcaactgacttcccagttaagtcccagtgtaagggttggtctttggttggcagaactgaacatggtggtttgcacttgggttctggtggcgcaggcgcaggagcagccagctgtggcagcgcattagttttggcgcaagcgagcctatgctgcagggtcacttttggctggtcagagaaggaataatgatatcaccttcttccccccctccccccaatcttttttttttccctttacaaattttcccctttccctttacctcctttccctcccatcttctttcattaacccctcctaaggcatgttatttgaaagcaattgagacgcaaccgaactttgcagtagcttggagtaatcttggctgtgttttcaatgcacaaggggaaatttggcttgcaattcatcactttgaaaaggttagtcattaaattaataattggtatttttgaagtgcttacgcatgtagtgtttttactagaactaaataataggtcttagccagtgacattatatctttgtttctctggcggtataggcagtatgtgacttacagagaacaatgatttgacttaaatattttttcaacttgacaatggtgcaaaagacatacatattcaatagaaatcatacttcgagtacccatgcagccattctggttttccctttcagtacaagattcagtaaattacatgagatgcccaacacactattataaaataagaaggaggctgaggcaggaggatcacttgagcccaggagtttgaggctgcagtgagctgtgaccatgccactgtacttagcctgagtgacagagtgagaccctgtctctaagattaaaaaataaaaaggtaccataaagacacatgcatgcgtatgttcatcacttcacaatagcaaagacatggaatcaacctagatgcccatcaacggtgggctaaagaaaatgtacatatatgccatggaataccatgtagccatcaaaaatgaaatcatgtcctttgcagcaacatggatgcagctggagtttattatcttaagtgaattaatgcaggaacagaaaaccaaatattgcatgttctcacaagtgggagctaagcattgggtacacatggacacaaaggggaacaatagacagtggggcttacttgagggtggagggtgggaggagtgtgagggtacaaaaactacttaccaggtactatgttcactacctgagtgacaaaatcatttgtataccaaattgctgtgacacaatttacccatttaacaaacctgcatgtgtaccccaaacctaaaataaatgttggaattaaaataaaactcatattaaagttttaaaaaagggctttgtattaggtaattttacctaaacgtaggctaatgtgttctgagcatgtttaaaatgagactagccgggccaggtgtgatagctcacatctgtgatcccagtgctttgggaggccgaggcgggcagattgcttgagcttaggagttgaaaaccagcctggacaacataacgagaccctgtctctacaaaaatgagctgggtgtggcagtgtgctcctgtagtcccagccatttgtagggctgaggtgggaggattgcttgggcctgggagctggaggttgcagtgaaccaagattgcaccactgcactccagcctgggtgacaaagtgaggccctgtctcaaaaaaaaaaaaaaaaaaaaaaaaaaaattaggctaagctaggatgttcactaagtgttacagatgcattttgacttaagatattttcaacttatgatgggtgtatcgggacataaccccatcctaagttgagaaacatctttattgcagcatttgctggatagtacatggtatggcagtttccaattttgtgttgaaaatgtactttaggctgcgtgctgtggctcacacctgtaatccagcactttgcgaggctgaggtgggaggattgcttgagcctagtagtttgagaccagcctgggcaacatagtaagaccctgtctctacaaaaaatacaaaaagtagctatgcgtggtgacacacacacagctactggggaggctgagatgggagtttgagtctgcagtgagctgtgatcatgcaactgcactccagcctgggtgatggtgtgagaccctgtctcaaaaaaaatgtactttagtaattaaaaatgatttttataaatgggctttaaagaagcagggcttcttggtgaaaaggcagattccaggtctggggcaggaatttaaaaaaaatttttggaatgtcttgtcataccagaaagcaaggaagctttgacatattactttgcatcaaaaggactcaggaagcaacttgaggaggctcccactggctaaagatgcagacttgagcatcaataggaataataactgaaatatactaaaacttatcaagtatgtttaaatctatgagcttataattatgctaaaaaattcattggtcatctttggaagacttacaaggaacaattaatttggaaaactggttaaaaagagaagaataaagtttttgaggaacctctatactagttcccaaaatggctgtgccaatttatacttcccccatcagttacaaggcttccctttctttacatcctcactaacacttgttattattcgtccttttgatgatagctatactaacaagtgtgagatgctaactcatggttttattttgcatttccttgatgattagtgatgttgagcatattttttatatatctgcttgccatttgttttttttgttttgttttgttttgtttttttgagatgaggtcctgctctgttgcccaggctggagtgcagtggcgccataatagctcactgcaacctcgaactcctgggctcaagtgatcctcccaccttggtctccccaagtgataggattacagacatgagccactgtgtctggcctgtacctcttcttttgagaaatgtctgtttagatcctttgcccgtattttaatgggcgtatttgctactgagttgagcttcttaaccctttatcagttgtatagtttgcaaatgctttctcctaatccggggttgcctattcactctgtgtaattgtttcctttactgtgcagaagctttttagtttgatgcaatctcattgcatatttttgcttttgttatctgtgctttatgctaagtgaaataaaccaggcacagaaagtagatactgtattatgtcacctatttgtggaatctaaaaaagttgatttcatagaaacagagagtagaagggtggtgaggcttgggggggtggaggagggatggggaaaagggagatattgatcaaagtttcagttagactggaggaataagttttagtgatctgtagtactgcatggtgaccacagttgttaataatgtatatttcaaaattgcaaaaagaataggtttttaatgtcctcaaccacaaaaaaataagttagtgaggtgatggctatgttaattagcttggttgactctttctaaaatgtatacgtggatcaaaccatcacattgtatgccataaatatacacaattatatatcaactttaaatttaaaaattaaaagaataaagcatatgtcttccctctcctgtatgaactagaccatagagtaacccaatagttgatgggggaagcttttctttataaaagcattctagctaataagtgaagaaggaatgatagaatatcaccattaatagtgaaagcatttattaggccgggcttggtggctcacgcctgtaatcccagcacttcgggaggccatggcaggtggatcacctgaggtcaggagttcgagaccagcctggccaacatggcaaaaccccatctctactaaaaatacaaaaattagccaggcatggtagcaggagcctgtaatcccagctactcaggaggcggaggcaggagaatctcttgaacctgggaggtggaggttgcagtgagctgagattgcaccattgcattccagcctgggcgacagagcaagactccatctcaaaaaataaaaaaaaagttaaagcatttatcagtgacaaaaacgagatacaatcaggtattaagtaccttgtggtaaacaatttcaccagtgaagtagtcttgcacaaagagaaaagaacacaaacctaattaagcttctggttctacctaccaatttacaggagatatacacgggacaggaaacatgttaaaggacaccatagggatgcagtcagcaaaattcaaactttgggaagctgaccttcttacttcaacaaattgtaataaaaatggagatttaaattaaacttttaggccgggtgcggtagctcacccctgtaatctcagcactttgggaggctgaggcgagtggatcacttgaggtcaggagttcgagaccagcctggccaacatggtgcaaccccatctctactcaaaatacaaaagaaaaaaaaaacagctgggtgcggtgcggtggcgtgtgcctgtaatcccagctacttaggaggctgaggcaggagaattgcctgaacccgggaggaggaggaggttgcggtgagccaagatcgtgccactgcactccagcctgggcgacagagtgagtgacactccgtctccaaaaataaataatgagtgacactccgtctccaaaaataaataaataaacacacaaacttttaaaggattaaaagaaactcagagaggcacattgacaaattatatctgtcttatttggatcctgactcagttaatgagaaattggagcactgaatggatttttttttttttttttttgagacagggtctcacttgatcgcccaggctgaagtgcagtggtgtgatcttggctcactgcaaccttcacctcccaggctcaagggattcacttgcctcagcctccggagtaggtgggactacaggcgtgcgccatcatgcccggctagctttttgtatttttagtggagacagggctttgccatgttcccaggtcttgaactcctgagctcaggcagtctgcctgcctcggcctctcaaagtgctaggattacaggcatgagccaccacgcccagctgatatttaatatgaaggaattgctgtcttttttttttttttttctgttaggtatgataatggtattgtggttaggttgggaggaaaaagcattcttgtgttgtccctgagatacatattgaagtatttttgaatggaatatgtctgggctttgcttcaaaatgatctgcgaagagggggagtaagttggagtatagattaaataagatcaaacatgatatatgaattgttgaaaatggataatggagacttggacgtaatgttcctctgcttttgtatatgtttaaacatttctattataaagtttaaaagttcttggggtggacatctatcactatagacaatctaaattaaatgcatcatgccgtgtttactacagagttgtcatctaagtgaagatgaagtgttctttctttatttttttttgagacagagtctcgctctgtcgcccaggctggagtgcagtggcacgatctcagctcactgcagcttccgcctcccaggttcaagcaattctcctgcctcggcctcctgagtagctgggattacaggcgtgagccaccatgcccggctaattttttgtattttttagtagagacggggtttcgccatgttggccagggtggtcttgaactccgggcctcaagtgatctgcccgccttggcctcccaaagtgctgggattacaggcatgagccaccgcgcccagcagatgaagtgttctttatcagtctttaataaacatacaattactcagtgtcttaatcaaataccttttcggtgtgtgtgtttttttttgtttttgttttttgtttttggagacacagtcttgctctgttgcccaggctggagtgcagtggcgcaatcttggctcactgtaacctctgcctctcgggttcaagccattctcatgcctcagcctctcgagtagctgggactacagttgcacatcaccatgcccaggtaatttttgtatttttagtagagatggggtttcaccatgttggccaggctggtcttgaactcctgacctcaagtggtccgacctcggcctcccaaagtactgggattacatgtgtgagccactgcacctggccggtgttttgattgaagtttgcatttaccatgctgtaggagtatctttcttgatcagtgtttctcttccttggttatacatgaggagcttataaaagatctgaatatcctgaccctatcttcagagggtctgatttaactggcctgtgatagagcctcggtaccttttctaggaggtaaattcttaatatattgccaaggttgagaatcactgctctagacaacatgacagctatttggatgacaccgtgtaatggttagtatttccttgaagtattgtatcttactgtgtatacagctctaattgcatgtcttaataaggtcttgctgagcatgtagtttgtatgcatacaactgaggtatatatttaccttttcagtaagagtttgctgcctcttttgccactatttttcagaagagttagactggttaattgtgaataaaatagggccaatcattagaagtgttcagtttaatgaaattggagcaggcccaatatttaatttttctcttcaggacccattttgctcatgagaacatgaggcatgagaagttattttgataatgttgaggtttgtaaaaataatgagaagacactaaataaataattggtttattaaaatgaaatgtaattgaaagtctgcaaggaccttggagtaaaaaaattgtaattgggaagttgatctggtgaaatcctaacttgctctgagtaactaactgtcttgaaatttttaggctgtcacccttgacccaaactttctggatgcttatatcaatttaggaaatgtcttgaaagaggcacgcatttttgacaggtgagagaatgttctgtttaataaattttcttgaatctttgttgtattgacacttgacagtttggaccgaaatgatgacaatagtccattgaagcatatttgccttttctagcacgttgttctctgcccatgtcctgtgttgccttttatttatagatgttgttcgttgcctgactttttgttgttggctttcctcaaagccgttatccttctcattgggagtttagttgaaatttttttattgttaaaatggttgaaatgattctttcttagactaaattattcctttgacctgattttagaaagcaaagtaaatccagacttttaaattttttgttgttgtcaaaggaaagcctattttttatgtgggagtagaaaacttcccagtgtaaagacacattttataaaggtgtgattttggtttgaggttaaaatataatacagcatgaattatgtaattaattacaattacttgatatattttgatatagtacagcttgaatgagttgtaacaaaccatccattaagcatgagttacattttgtgtgtgtgtgtgtgtgtgtgtgtgtgtgtgtgtgtgtgtgtgtttatttacagagctgtggcagcttatcttcgtgccctaagtttgagtccaaatcacgcagtggtgcacggcaacctggcttgtgtatactatgagcaaggcctgatagatctggcaatagacacctacaggcgggctatcgaactacaaccacatttccctgatgcttactgcaacctagccaatgctctcaaagagaagggcagtgtaaggatttttactcattctatttgttatctggtaggattaagagtcttttctggccaggtgtggtggctcacacttgtaatgccagcacttcgggaggccgagatcagaggattgcttgagcttagggtttcgagaccagcctaggcaacatgacgaaaccctgtctctacaagaaatacaaaaattagccgggcatggtggcacacacctgtagtcccagctccttgggaggccgaggtgggaggatcgattgagtcctgggaggttgaggctgcagtgggccatgattgtgccacagcactccagcctgggcaacagagcacgagactctgtctcaaaaaaatcacaaaaaccaaaaaacagcaaaaaaggaaagtcttttgtacaagtattgagatggtatattggtttactttagagttttggttgagggtaagaataccaaaaaatatcaattttctgtagcattaccagccattaggcttaattaaacaattattagaacagtatcagtggaggctttatgattctgtacagtttttgaagactttgttttgttttctaggttgctgaagcagaagattgttataatacagctctccgtctgtgtcccacccatgcagactctctgaataacctagccaatatcaaacgagaacagggaaacattgaagaggcagttcgcttgtatcgtaaagcattagaagtatgtgagggtggtgtagctgggcatttagcatgatagtagagggaaagcagttaagtttaccatcatccacctcttttgtaaaaatagtggttgaatcatttacaagaggattattcattgaagtaacaattgagtacctaaggtatgatgtgaggccctatgtgacattccagaaaatccctgcattcagagttcattattctgtggataagatctgtacaaaaaaattaaacattaacccacagttcaagagaagttacttataagtatataatcttagtgcctgatggctgtatggtagtggttagtagatgtggtaggagtttagcagagagagatttcagtggtgttggagtggtcaggataaactaagaggagaagaggtgtacctcattatgtttgaaacaagaagaggtataaaatagaggaagaggtagaatttgagaatgaatagacttggaaaaagtagagacaaatttaggggtttaaatgtacttgagcaaagttcttaaggttgtggtgaattattactgctgctttagcaatttttttaacctcagttctgatcttgactctttataggtcttcccagagtttgctgctgcccattcaaatttagcaagtgtactgcagcagcagggaaaactgcaggaagctctgatgcattataaggaggctattcggtaagagacactaacagccttatttttaaaattatttttaattttaaaatgtttgacattcggcacattgcagatgctaaaatggctttaaataacaacggaataagttagcattacagtgggttaaagatttttgtattggagaaataaaacctttggcttctcttttagaatcagtcctacctttgctgatgcctactctaatatgggaaacactctaaaggagatgcaggatgttcagggagccttgcagtgttatacgcgtgccatccaaattaatcctgcatttgcagatgcacatagcaatctggcttccattcataaggtactactgtttattataatatgtgcagtttaacacctaaaatttaacttttggaaattttttaccatcctgctttatttattttccaggattcagggaatattccagaagccatagcttcttaccgcacggctctgaaacttaagcctgattttcctgatgcttattgtaacttggctcattgcctgcaggtaaagaataacaggccagtaattggctctcagtgttgtaatagctttttaattgttgtatgccataagaatccaagcctgactggaaatagtatttttaataggctatctgacattactttaggccaaagacatatcaaatattaaatcctgggataggactttctggataataacttgtttttgctttctctagattgtctgtgattggacagactatgatgagcgaatgaagaagttggtcagtattgtggctgaccagttagagaagaataggttgccttctgtgcatcctcatcatagtatgctatatcctctttctcatggcttcaggaaggctattgctgagaggcacggcaacctgtgcttagataaggtgtgattcttttgttttaatctttttgttgtaaactaaaacacaaatacagaaaactgtaaaaatcaaatctgtggcttaatgaacgattataaagtgaacaccacccaagtcgagaaataaaacttttgtgggccacttcagaaccccttccattgtgtcctgagtataaccccctgcacttcataagacggaatccttaactccttcacttaaacactaatgatagactgatggtacttttctttaagttgaaagccataatttttttttcttttatcttttttttcttttttttttgagacggggtcttgctctgtcgcccaggctggagtgcagcggtgtgatcatggcttactgcagccttgacctccccgagcttaggtgatcctcccacctcagcctcctgagtagctgggactacaggcgcatgccaccacacctaattttgtgttttttgtagagatggggttttgctatgttgcccaagctggtcttgaacctctgggctcaagtgatctgcccacctcgcccggccaaagtgctgggattacgggtgtgagccaccgcgcctggccagccatcatgtttaatggagtgcttggtattttgtattcacctttgagaattagagcagtacttgatcaaggattggatcaaaggttggataatagattggagtgctaggtgtactttttttttttttttgagacatagtgtctctgtcatccagactgcagtgcagtggtgccatctcagctcattgcaacctctgtctcccaggttaaagtgatgctcgtgccttagcttcccgaggagctaggattacaggcgtgtgccaccacgcctggctaatttttgtatttttagtagagatagggctttgccatgctaggctggtctcgaaatcctgacctcaggtgatccacctgcctcagcctcccaaagtgctgggattacaggcatgagccactgcccccagccataattttgtttttagaaaatgtttccctatagaattttctaaaatgcgggaggaaaccatgctctgtccatactgcttcatacctacaagtgttagatttgctcgtacttttttttttttttttttttttttttgagacagggtcttgctctgttgcccaggctggagtgcagtggcacaaccttggcttactgcaacctccacctcccaggtttgggcgattctcccacctcagcctcccaggtagctgggactacaagcatgtgccaccacgcccagctaattttttttttttttttttttttagtagagattggatttcactgtgttggccaggctggtctcgaactcctgacctcaagcgatccacctccttggcttcccagagcgctgggatttgctcatgctttatagatctcaggagcaggtcaaagtatgaagcatattacataaagtgctgaggttgcatctctctggcaatattaactaaatgctctgggcagacctttttcaacaggtgtgaggtataggtttggtgtgtttttcgtcagttttcctagatgaaaatttatgtagattttactaacaagcattggattctgttgatagattaatgttcttcataaaccaccatatgaacatccaaaagacttgaagctcagtgatggtcggctgcgtgtaggatatgtgagttccgactttgggaatcatcctacttctcaccttatgcagtctattccaggcatgcacaatcctgataaatttgaggtaagactagtgtttctctagaatcactatttgtttaaaaaagaaaaaacccacaatgttggcttgtcaccatgaggcatggaaacctagtgtcttttggaaagatttgagccagaaagatttgagccaatgttattaaatatgccatgtgctgcctttcaggtgttctgttatgccctgagcccagacgatggcacaaacttccgagtgaaggtgatggcagaagccaatcatttcattgatctttctcaggtagatgaaactctcatactttaactttttattttgagcaagtttaaataaaactattagcatatagtttatttttgatgataagtattaaatgctgtagtaccacatataggcaattgtgttgatcttatttccttgatcatttgtgttaatcagcatggctttttccgaggttgcaaatgaaactgaaatgtgttatgcttgtgcttggacatacaacttttctggagattgagccagcacttgtgacagaagatacttaataaatattgacaaaatggtgacttgggagaagaataaataggtcttttaaagaaaatagggccgggtgtggtgactcatgcctgtaatcccagcactttgggaggtcgaggcgggcagatcatgaggtcaggagatgagaccatcttgactaacatggtgaaaccccgtctctactaaaatacaaaaaattagctgggtgtggtggtgcattcctgtaatccccgctacttgggaggctgaggcaggggaatcgcttgaacccgggaggcggaggttgcagtaagctgagatcgcaccactgcactccagcctggcaagagcaagactctgtctcaaaaaaaaaaaaaaaaaaagaaaaaatagatgaactatggttcatcagtttccatgggcctttgcctttggttatctttatttctgtacttgttctattgttgtatcctctaggagagtaagttttatgataaattaagattgaaacctatgggggaattaatttgctgagtatgtaggctacagtgttttctttgtagactctattagccactttgactaatagagataatatactctttatatgtgtgtgtacacacatgtatgtatgtacatacacatgcaggtatgatatgtatgcatatatgtataaatatacatgtgtatgtgtatatatatatgaatcactgaagtcctagcagaaaggttttgagacttctcatttaataaatagtatgtactaacaaattttgcagtatagctgttgcttcaaaagtatacctggccatttttgatacacagttggactctttgtgaccaagaagcatacctctttctacctctgagacctttagggactcactgctgattgattgcagtctaaactcttcagcatagcttttgtaacctttctctgtttgccacaactttgtcaatactttaactcaccattcaacatcttgtataccctatactaaatagaagtgaattactcaccctttttttttttgagatggagttttgctcttgtcgcccagggtggaatgcagtggcacgatctcggctcactgcaatctttgcctcccaggttcaagcgattctcttgcctcagcctcccgagtagctgggattacaggcgcctgccaccacacccggctaatttttgtatttttagtagagacggggtctcaccacattggccaggctggtctcgaactcctgacctcaggtgatccacctgcctcggcctcccaaagggctgggattacagatgtgagccaccatgcccggcctactcaccattttctaaactccctcacactttactctagttcttcattcatactgttctctactgagattgtattctgttaaactccttcaaactcctattcgtctttgaagacctattttcaaataccaattctaggctgggtgctgtggctcacgtgtataatcctttgggaggctgaggtggaaggattgcttgagaccatcatgggcaacatagtgagaccccatccctaccaaaaaaaaaaaaaagattacaaatttcaaataccaatttctctgtgatatgttgttattcatacattcaatccagaagtgaactctccttcctttgtgttctgtttctttaatgctttgggcccattttaatgacagtcaaccatatttgtgcccgaattaatgtagttaatttgtgttcttacctcttttccatctgggaatctgaattatgttaaatgccattaaaactaaatgccattaaaactaaatgtcattaaaactaattgatctgagattatacatagtgagttcttattttgtattctgtagattccatgcaatggaaaagcagctgatcgcatccatcaggatggaattcatatccttgtaaatatgaatggctatactaagggcgctcgaaatgagctttttgctctcaggccagctcctattcaggtaaacaaattaacagtcatcacttataacatgtatttggctaagaatacagtgaggtgctgcttttcctccctctggttaactgatatttgaaactgtagggcagacatacttttaatttttttaagttgttgaaatgcacaggacaaaaagagtgtagagcacagtgcttataggtacatgtatatagagacatgcaattcatggttggctatgaacagttactctgtcttgcaaatttgaagaacattttagcattttgaaagttagtctgaaatacaggccgggtatggtggctcacgcctgtaatcccagcactttgggatgcttaggcaggaggatctcttgaaaccaggagtttgagtcctgcctgggcaacaaagcaaaacaccctatctctacaaaaaattaaaaaattagccagagtggtggtgtgcctctgtgatcccagctatttgggaggctaaggtggaaggattgcttaagcttaggagtttgaggctgcagtgaactatcactatgccactgcactccagcccaggtgacagagtaagagtctctcttatagaactgcttcattgctttcggctaaagaagtcagccttgctgtgcgtgtggcaagtgcctgtaatcctggctactctggaggctgaggcagaaggattgcttgagcccaggagtttgaggctgtagtgatctacgattgcaccactgtattccagcctagggaacagagtgagatcctgtctctaaaaaagagttagacctccttgtttatttacttatttaattttggcacctttaggttctttttttaaaaaccactttattgaggtacagttgacatacaaaaagttgtacatatttaatgtatgtgacttgatgaatttagaggtaagtgtactgataaaagttcttaatcagtttttgatctgatttttttaaggcaatgtggctgggataccctgggacgagtggtgcgcttttcatggattatattatcactgatcaggaaacttcgccagctgaagttgctgagcagtattccgagaaattggcttatatgccccacactttttttattggtgatcatgctaatatgttccctcacctgaaggtaggtatgaaacagtgctatggacgaatttcaaagaactgtagctttttatttccttgctattgtctatgtaaatcctaaaagacatgtctgaaactattttttccattagaaaaaagcagtcatcgattttaagtccaatgggcacatttatgacaatcggatagttctgaatggcatcgacctcaaagcatttcttgatagtctaccagatgtgaaaattgtcaaggtcagaacctagtcagtattgtcattgaaataaagttaactgcattcacgatcttttccctaatgatgcatttttttttcagatgaagtgtcctgatggaggagacaatgcagatagcagtaacacagctcttaatatgcctgttattcctatgaatactattgcagaagcagttattgaaatgattaaccgaggacagattcaaataacaattaatggattcagtattagcaatggactggcaactactcaggtgagaagataataatacaccattatatgtcccgccaagtatgcatttatttcccttaacctcatgataactctaggaggcaagtatcattatcaccatttttatggatgaggaaatgagtttagtggaaacgtgcatcttatataggtgtgtctgattttaaaagtctcctggattcagccagcagattattacttactgagaaactgctgtgttaatatcttgttattccctgcctgtggctttactctcttacatgatgaactatgtgtagattccatacagtttcttgcttctgtaaacccatcctttccctagctaaatcctactcaaacgttcagttcagacagctcttccaggaatccatttccgtacttaccgctaacgtctccatccctacttcattggtacctgtcttttatacctctgtaatgtttggaatatatcattacatacagcacaacagatgataattccctgtgtttgtatcctctactgaattgaattactgagcccatgtcttaatcacagtaatgtagtatgtactcaataaataatatattgcatgcttaaataagtagctctatcaagagagtgtaaggcaaagatctctgacctctagaggtcatagatgtccttgcacacctggaatagttatataacaatgtaaggcagtactcaaatgtgtgagaattacaagatgaaactaattatgtatgtagaagctcagaaacggtgaggatcaatgtgaagagagacactcttgggagaagagaccatttggaggagtaatttagccttgaagagtagatgtgatttagaaaaggacatttcattcatgaagaaaagagtgatcaaaagctgttggaacgttaataggattttgagaccttttttggttagagcaagaagtttcatagtgcagtctcccccaacttaagataatgctgcaacggtttgccttttcttaaacttcatatatcatgaatattttctcatggttcagtgacttttaatggttataccattttggatcttatggattgaaatattggactccttttgcctttaaatataaccatcatttttttcttgttctagatcaacaataaggctgcaactggagaggaggttccccgtaccattattgtaaccacccgttctcagtacgggttaccagaagatgccatcgtatactgtaactttaatcagttgtataaaattgacccttctactttgcagatgtgggcaaacgtgagtatgcaagtatgttagagactaataaagattttgtatctagagcttcttgctgaagatggtccttccactcccatttaggagctgttctgctcatttctttttaaaatttttttttggctgggtgcagtggctcacgcctgtaatcccagcactttgggaggctgatgcgggtggatcacctgaggtcaggagcttgagaccagcctgaccaacattgcaaaaccccgtctctattaaaaataccaaaaaattagccggacatggtggtaggcacctgtaatcccagctactcgggaggctgagacaggagaatcacttgaacccgggaggtggaggttgcagtgagccaagatcgtgccattgcactccagactgggcaacaagagcaaacctccatctcaaaaaaattttttttaaaaatactttttaaaaaatttattttatttatttacatgtgactcaactgggttatgccctttttttaaaaaacagaatctcactctgttgttcgggctgcagtgtagtggtgtgatcttggctcatggcaacctttgcatcccaggttcgagttattcttgtgcctcagccttccaagtagctgggattacaggcatgtgccaccatgtctgggtaatttttttttgtatttttagtagacggggtttcaccatgttggctaggctggcctccaactcctggcctcaagagatctgcccgccttggcctcccaaaatgctaggatgacatgtgtgagccaccgcacctggccttgtgctcatttataatcttcaagagatgtagatttttcaggcatttttggtttctccttccagtgtctaaatatgacattgtgaaccttttaaatttacatattcaaagcattcttctgtctaaagggtcagcaaactttttcttaaagggccagatggtaaatattttcagttttgtggtccatgctgtttcacgtctactcagctttgccgttgtagcacgaaaataaccataggcattttgtaaatgatgagtgtggctgtgttccaataaaat

SEQ ID NO: 660 - DNA, 1427 bp, Homo sapiens
  source 1..1427: mol_type = other DNA
cgcggcgcgagcggaagcggaagcggctctgttcgccgcctctcccaccggcccgatgagctgcagcggctccggcgcggaccccgaggcggcgccggcctccgccgcctcggccccgggccccgcgcccccggtctcggctcccgccgcgctgccctccagcaccgccgcggagaacaaggccagccccgcggggacagcggggggacctggggctggagcagctgctgggggcacgggacccttggcggcgcgggccggggagccagctgagcggcgtggggcgggtgagggccgggacgggtgagggcgagggaagcgtcttgggctgggtccagcggcgggtgagggcagagggtatagacagacctagctggggccctgcgcctcccacctctgtgtctcattttgctggttctcctccagctccggtgtcggcgggtggcgcggcgcccccggagggggccatatctaacggggtttacgtactgccgagcgcggccaacggagacgtgaagcccgtggtgtccagcacgcctttggtggacttcttgatgcagctggaagattacacgcctacggtgggcttccgcccgaacaaggccacctagcctgctgtcaaaactttcagccacatcgtgcttttcagcgttctcttccatttgctcccctagtcgctcttctgtgtttgccctctgctcacccaaactgtgagcttcctgataatcaggcctatccatttccctcaccctcctcccgctctgctgacagttctcttaattgatttctcagatcccagatgcagtgactggttactacctgaaccgtgctggctttgaggcctcagacccacgcatgtgagtaaacccagggcaggttagttttgggtgcttgtgcagtatgttgtccatctccttctcatctaagttttttctctctagaattcggctcatctccttagctgcccagaaattcatctcagatattgccaatgatgccctacagcactgcaaaatgaagggcacggcctccggcagctcccggagcaagagcaaggtgtgaggggaggcttaatgaatcagtaattaccttccacaacagtggaggcttatcctgccacccctttggggaaactgaatcgtaggggaggtgtaagacttactcagggtcacccatctgggattgaagtccgggattcctgtgctcagttggtgctcttccctcttccctcaggaccgcaagtacactctaaccatggaggacttgacccctgccctcagcgagtatggcatcaatgtgaagaagccgcactacttcacctgagccacccaacctaaatgtacttatctgtccccatgtccccacaccagcctgttttcataataaactttattgtgacaggcggggctgatccctcccatgttggg

SEQ ID NO: 661 - DNA, 19742 bp, Homo sapiens
  source 1..19742: mol_type = other DNA
agctcaatccctgggcagggaaaagggggtcctcggggctccccgctcgctgtcctttttctggacaggcagttccttggccacctggtagggccgcgttgcctggcaacggcggggtccttcttggctcggcggcgctcggggcctgaggggagaaaaccgccgcggagggcgctgggggtggcggcggcggtccgggaggtggtcgcgcgactgcgtggagcgccagggcgtccgacctctgcacctgagagaagatgaacacggccgaccaggcccgggtggggcccgcggacgacgggcctgcgccgtctggggaggaggagggagaggggggcggcgaggcgggcgggaaggagccagcagcggacgcggccccggggcccagcgctgcattccgcctcatggtgactcggcgggagccggccgtgaagctgcagtatgcggtgagcggcctggaaccgctggcttggtccgaggaccaccgcgtgtctgtgtccacggcccgcagcatcgctgtgctggagctcatctgcgacgtgcacaacccgggccaggacctggttatccaccgcacctcggtgcccgcaccgctcaacagctgtctcctcaaagtaagtcatcccccgccatccctggggtcttcccctgtccccctctcgcggccgcatcatccgtcccaggggaatccgatcccacactctgtccggggatttccctcttcgcaccgagcgctggggatttattaagcagccagggttaccacagcttaaaaaaaaaaaaagaaaagctctgcagctgtctgcaccctgtttccccaggtcacccgccgccgcaaacacaggtacacacccagggggcttcccggagttgagtcccaggaacccctccttcgcccctccgtcgggcccgcacatggagcgggttactcgatggtgctttctgagactccaccccctgtagatccaacccggggcctgcctctgtcgttgctgctattgtttggggccgactttccgaggttcttggctggctttgtctactgtgtgtgtcctcctctcgcgcctctttagcttcagaaaagaaaaactggtcccatccattgtcttaattgtttcagtgactttattatgaatggtcctcgcctctccttgggcaaacgggtaaatactggatctcggggtttgtactttagtttttctttactagctaaacatctttgggatgttgaatgaaaataaagattcgaaacaactacctatcttaaacttcaagcgcaaggtcaagtagtaagccatagcgttccttttagttgcttagaggtgtaaaaactttccatatatccttgatagaggtgtacgcttacatgtgaactgtcagtgtatattcatacattcaatagatatttgaataccattctgcttggtgctgccccatgttctggaaataaagcagtgtacaaaacagaacccctgccctcatgaagcttacattctttggcaagtcaagcacaaatgataaggtcctgtcaggtagtgataagcactgtaaagatgtgtatccgcacatagagaacatgtttatgtgttcgtaaactcttattttggaaaaccattgaaaatatgagtcattagctataggtagggtgcagataaccctcatcactttgtagcatacttaattcaagtttcaaacatctttctgttgttagattgttagtcagcttgtatgactaagcttcctctaagatcttcttgaagaagatatgaacacatttgttcaagtgtaaacaaatcagatagacagatgcaaccctatgaaattgagaaatacaaaaggagggaggcagaagaaaggtgatttaaaaggtgtatcttctgctgtaaaggaatttaactgtttccaaggatgttcatccgcacagcaactcaaggaaagtatgtatgtcagtatagtagacatcgaataccttagcagagagaatgtaaagaaaggagggagtagtaaggggagagacttatggggcaggtcatctggtggtgaatctgcagcagtcctaaagaaggtagtgtttggtttgtaagaggaaggaaggaaagggcattccaggcggcaggaatgaggcattcatcccatgtgcatacacgtttaagtcatgaacataattaattattgtttgtataatgacggatcagtacatgagctcaagtaggtcttctagagagtccgagaaagtaagatgagaccagtttgtggacttggaaggtcggtatgaggaagttggcttcaatctaggaagtctttaagatgctgttacagtttcattagcatagagtgacctgctgtggttcaggaacattactggatagaggcaagaagatgattgttgtgatcagtgtaaaataaaagtgaagagactgggctttggcacaagataggcctatctataaaagggggataatgaagcgttgtttaggttttttggaagattaaacacacataatcacttggcccagttcttggcacgctgtaaatgctcaaggtgaaaatataatgagttgggccgggcgcggtggctcacgcctgtaatcccagcactttgggaggccgaggcgagcggatcacgaggtcaggagatcgagaccatcctggctaacacagtgaaaccccgtttctactaaaaatacaaaaaattagccgggcgtggtggcgggcgcctgtagtcctagctactgggaggctgaggcaggagaatggcgtgaatccgggaggcggagcttgctatgagccaagattgcgccactgtactccagcctgggcgacagagccagactccgtctcaaaaaaaaagaaagaaaatataatgcagttatacaggtatgaaggagtaggagtctggattaatgtcgtggttgtggacatgagtattctgataaaattttgactgtcattttgcctcagttaacatttaccacaactgctaactagtaacaggaaatccttatatagctctcttatagttgacaaatggcttctatgaaattaattagtaacatcttccccttctgtactgttgttttttttttaatatgcacatcacataaaccatcagtcatttagcagtctttttagactgattgaagtgaatgaatgctgagttgaccctgcagttctacaagagccctctgtgggttaaaactggtgtgacggtaggaatgtaaagaagtctgtgtcagcactttgatgactccacccattggcagtctgtggatttaaatctgctcggtgccgtgcagcatgccttcgcgctaacctaaatggtggacagtctgcagcgcagatgacagttttagtgtagcactgttagaaagctaggtactaaacacctttgaagcttttgctctataattctgttatttagattatgaatttgcaggaaaatctgcagttatgtaatagttcagacattaattatcagctgttttataagattgtatgatataaaggtggacagtataaatctgaaaagcaatgaaatagtgatttaagaatgtcagaattgtttttcccattggactactgatttagtgactcatctagtgagacatttgtgtatagttccaaattctgataatatttgtgtaccgaattgtattgtgcatcaattgttaggagccttagaaagtattaacttcatctgctacattaagttaaataactgttgcctgtctttggactctattacctgtcctcaagaagcttactgtctaaaagcttcaagtgaatttttgtcaggtgcttacaaaatgcctaacagttagtattaaaagtatttgccattaaaagtgatggtgaaaaccgcaattacttttgcaccaacctaatagtggtcaactggaaactggatggtgtacaattaaatgattggctgcgggcaggcctctgggagctggactttttaagtatactccttgggcatctgaatacttgatttgttaacagttttgtgatagggagagttggagggaggttcagtagtctagttgaaacatatgtcagaaattgctacacaaaaccctaagactttttcctaccagtcaagatctgtactgctctccatcctgtcaagaattcttcccacaatgagtaggaccaagggttgcttaagcttcctttatttcatcccgtgctgctgctttgggttaccaatcctgtgagtttacttctacagtagcttttatttgtagcaaatttaacctattctaaggagtattgcttagttcacagtattaaaggatttgatgaacaattttatatctacctttcatttggtacacaactttatgtctaccttgcatttttgcatacttttattagcattaaatatcttattaacatttacttaaggctgagtgctgtggctcacacctgtaatcccaacactttggaaggccaaggccggaggatcgcttgagcccaggagttaaagaccagcctgggcaacagagagagaccgcatctctacaaaaaattttaaaaattagccaggcatggtggtgtgcacctgtggtcctagctactcaggaggctgaggtgaaaggatcacttgaccccgggaggttgaggcggcagtgagctgtagtcacgccagctgcactgcagccagggtgacagagaggaatctcaaaagttttttttttaacttagtcctcagagtatattaacaattatcataggtaactttattgagcgcttaatatatgctttgatatattgacttatttaaccttcctaactttctgggacatgtattagtctcatttataaatgaggaaattaaggtcagaaggtttaagcaatttgcgcacacagagctggtatgtagcagagccagcatttgaacccaggtagtctggcgtcatagcacagattttcagttattatgttgtgcttcattatgtcatctcacaaatttcatctgcctgtagaaagcaccgggctttgattagcattgttttatttccaagccagccacctacacctcatttaattggcattttcagtctatgattctccagcaagtttcatagtgtatccaagagactactttaaaatgccttcctaaaatcaagatacactgcctaaaacaccattcccaaagtattccacatacttttggataataaagggtaataactgcctccctcacctccaaaaaaaaggctctgttgtttaaaaaggcaaaaaagtttggcttcctgtggctcagtaggtctttatagtagttccctggccgaggcatttagtgtcctcgtgtcacttttcaagggagaacgacatataaatatagtatttccaaagcttgtttggccatagaactatttttcaagggacaattaaagggagtagtgtactgtgaaacacactgtaggaaaagttagttctctattttgtggacaattttctatttacatttcattttatttgcttatctattatgtcatctagcaattttagcagaaaagagaataagaatagactattccagttaccctttttttttttttttttttttgagatggagttttgctctgttgcccaggctggagtgcagtggtgccatcttggctcactgcaggctccacctcccgggttcatgccattctccttcctcagcctcctgagtcgctgggactacaggcacccaccaccatgcccggctaatttttttgtatttttagtagagacggagtttcaccgtgttagccaggatggtctcgatctcctgacctcatgatccgcccacctcagcctcccaaagtgctgggattacaggcgtgagccaccacgcccagccatcctttgcttgtttctaatcatcactcctgtctgcacaaactattcatttgttaatacattgaggaattttctgttaggcttaatggtctgtagtttttgttatttatgtaccatttgggggatttttttttttttttttgcaaagcctggctccatcacccaggctggagtgcagtggcgcaatctcggctcacttcaacctctgcctcccagattcaagcagttctcctgcctcagcctcccaagtagctggggttatgggtgcccaccaccacgcctggctaattttttgctatttttagtagagatggggcctcactatgttgcccaggctggtctcaaactcctggtctccagtgatccacctacctcggcctcccaaagtgctgggagtacaggtgtgagccaccatgcccagccatgggggatattttttaactctttgttgcactctgattttctgatacatccccagttgtccagacttcatctaggatgtagtaagtggttctgagttaatgtcttccaagtgctttctgtgtcctggagggtaattcctctaggcttgaacatttaaactcattcaagtgacttttattatatccatgtgtgtcttaggctggaatttccttttaatcatgttctaccctttccagtttaaagagcagcctctttgaaaaaggaaattgacactaaaaaataattgaagcattctttttcttttacccatttctctaaagacagtggataaagtccttccttcttcctgctttcaacataacaaaacatcttttggctagtctctgctctttttggctttagctttcctatttttttatggttctgaaccactttcttttggtcatttatctcttcctccatctttgatgtccctttaaaatcttattaaagagctcacagctgggcacggtggctcacacctgtaatcccagcactttgggaggccgaggcaggtggatcacttgaggtcaggagttcaagaccagcctgaccaacatggtgaaaccctgtctctactaaaaatacaaaaattagctgggtgtggtggtgcacgcttgtaatcccagccacttgggaggctaaggcaggataatcacttgaaccctggaggtggggtttgcggtgagccgagattgtgccactgcactccagcccgggcgacagaatgagactctgtcttactgtcccatacatgttacgaacttggaggagggagagatgaatgaaagcttgaatgacctcaaaaggccttatagggagaattagatctggtaggatagatgggatttacatagggagaagaactaggcaagggagccggggaaagctgaggtgggaatgttcaggaatggcaactagaatagtctgattagagtgaacattattctatagaaacagtaaacaaagcagttggagttggctctcgccattatttgtcaatgaaatttcagataaaggacctaaagctggcatttgtattgcaaagatgttgtaaaaatctaaatatcaatttgtatcaaagatatatatagatacatattttcataaatttgttaacaccttttttgttttgtgactagttcaggtaaatgctctgttgaatcttaagaatcaagtacatctctcttgcatatattaattctaagaagaatatgggaaccaggctatgaataatgacattctgacttattttaaaaaattgccatctccttgagtaaatgctcatctgatagtttttatatctcttattttcaggttggctcaaaaacagaagttgctgagtgcaaggagaaattcgccgcctccaaggaccccacggtcagtcagactttcatgttggatagggtgttcaaccctgaggggaaggctttaccaccaatgagaggattcaagtacaccagctggtctcccatgggttgcgatgctaatggcaggtgcctcttggcagcactgaccatggacaatcgcctgaccatccaggcaaatctcaacagactgcagtgggtccagctggttgacctgactgagatctatggagaacgtctttatgagaccagttacaggctctctaaaaatgaggccccggaaggaaatctcggggattttgctgagtttcagaggagacacagcatgcagaccccagtcagaatggagtggtcgggcatctgtaccacccagcaggtcaagcataacaacgaatgccgggacgttggcagtgtgctcctggctgtcctctttgaaaacggtaatatcgccgtgtggcagtttcagctgccgtttgtaggaaaagaatccatctcttcatgcaacacaattgagtcaggaatcacctctcccagtgtattgttttggtgggaatatgagcacaataatcgaaaaatgagtggccttattgtggggagtgcttttggacccataaaaattcttcctgtcaatctcaaagcagtcaaaggctatttcactttaaggcagcctgttatcttgtggaaagaaatggaccagttacctgtgcacagtatcaaatgtgtgccactttatcatccttaccagaagtgtagttgcagcttagtagtggctgcaagaggctcttatgtattttggtgtcttcttctgatctccaaagcagggctgaatgttcacaattcccatgtcacaggccttcactcactgccaattgtctccatgactgcagacaaacagaatggaacagtctatacttgctccagtgacggaaaggtgaggcagctgattcccattttcacagatgttgcattgaagtttgaacaccagttgattaaactctcagatgtgtttggctcagtgaggactcacgggatagcagtgagcccctgcggtgcatacctggccatcatcaccactgagggcatgatcaacggcctccaccctgttaacaaaaactaccaggtccaatttgttactctcaaaacctttgaagaggcagctgctcagctcctggaatcttcagttcaaaacctttttaagcaggtagatttaatagacctagtacgctggaagattttaaaagataaacatatccctcaatttttacaagaagctttggaaaaaaagattgaaagcagtggagtcacctatttttggcgttttaagcttttcctcctgaggattttatatcagtcaatgcagaaaaccccttcagaagccttgtggaaacccacccatgaggactcaaaaatcttactagtggattcgcctgggatgggcaatgctgacgatgaacagcaggaagaaggcacttcttccaaacaggtggtgaagcaaggcctgcaggagaggagcaaggaaggagatgtagaggagcccactgatgactcgctccccacgactggagatgctggaggccgtgagccaatggaagagaaactcctggaaatccaagggaaaatcgaagctgtggagatgcacttgaccagggaacacatgaagcgagtcttaggagaagtgtatctgcacacctggatcacagaaaacactagcatccccacccgcggactctgtaactttttaatgtctgatgaagagtatgatgacagaactgcacgggtaggtgtttattaacaaaaactctgaaattgtaaagcctgctttcttcatgagaaagaaatgacctaaattgagttcctgaagctcaacttttgctttgacattttttaggtaatttatttgcttgaggtgcagggtaataaataggaagcgtggattaatgcagaggatgcattcatagcatataaagaatattttgattcttcttcacactggccttgttagatatgcaaagtttgcaggatgagctttccagactggattagctcagaggctgcatttagctgagtagtatgtgatgggcaatcatggctgtagaaatatggtgcccatgctccctgcccttcctcttttgcaaaagttttgtatgggaggggtgtagtgacatgttttccatttgatagaacttaaggatatcttcagatttagtcaagaaagacatataaagtaaacaaattattactcatgtctcatttttacaaaaactgggcacagtctttattttggtaacagaacaaacttacctagaatgtattctatagaatttaagttgcttaacagagcactagggttcccagtgcatattaccactcaaagcgttctgaggattcctacagaaaagaaactgatacctttgtgtagctcggtattactcagacttcttgatcagagaatctttcttgcagctaacagttgttaaaatcctgaagaacttgtgttccaagaaatatactgtgttctgaaatattcaaaaccacaaatatctgtactcctttttacttcaaagactgatacttactgactaaagtcttatttaaagtattaattgaaggcagtatccttgttcttaatgttaagccattcacaatcacttgttgcactttcttgttggaaagaatgtgtatgtttgtgtacacacgttcgcctttgaaattattgctcatagaatgtttgcaatggtcttaagagtattaagatgcactgttcatgtaactgactttacttctttaaaagttaacttttggggctgggcgtggtggctcacgcctgtaatcctagtactttgggaggccgaggagggcagaacacaaggtcaggagaccaggagactagctggccaacatggcgaaaccccgtctctactaaaaataaaaattagccgggtgtggtggcgggcgcctgtaatcccagctacttgggaggctgaggcaggagaatcgcttgaacctgggaggcgaaagttgcagtgagctgagattgtgccattgcacaatcgacaagagcaaaacccatctcaaaaaaaaaagttaatttttaaacgttgtttcattgtgttccacattgtctggaaaagtattctggttatcacagtgccatgggacctggttaggtttattataagagtcagtgaaaaattagcaaaaacatgttagaaagtactagaggttggatttgtaatgatttagaataattgtccagatactccatgagcctgggaagttacatttagcatggtgatgtgattccaacatagccattttaaaaaccagaagattgcacacccgtccctgtttatagcaactgagtttattgaagaccacgcattcctgtcttaaaaatccaactatatgcataaaatgaagactttttaaacctaggatgttggcttattagcagttataaattattttggagattatcagcctagtatgctagtacagttaaactagcattttttaacctttttaaattatcactcccccccgaacatttttagacactttttctgaattgcccctgcccatgaagttttaatgtattttgtgtgtctgtttatgtactgtgtgtatatctatgttttatacgtaaaagtaagaactttttgtcccaagaactaatatttgctgctttggaaggactatcactcccattgagaatgtgtgagtcagaataacacagttgagagttcagcttgccgagatcagggctactgagaacaaatagcaatccttccttatgtaaaattgagatatatctgggccgggcacagtggtcatgcctgtgaccccagcactttgggaggccagggtgtgaggatcgcttgagcccaggagttcaaggccagcctgagcaacatggtgagaccctgtctctacataaagtaaaaaaaaaaaaaaaaaaaaaaaattatcctggtgtggtggcacaggcctgtagtcctagctacttgggaggctgatgggggagccatgttctcaccactgcactctagccggggcaacagcgagaccctgtcttaaaaaggaaaaagaaaaaatagaggtatgtatgggaggaattctgagtagtttttgtcactgtatcattatcaggatgtttggcctgtctagaatagcagagtgagtttggtcatctttgctgttagggaccatatgttagaattcttaagactgaaaagaaaaaaggccaaaaattaatgggatttaaatttgtagaggatatacagaagaggtaagatagctggcttaccaacttctgagctagtaagacaccctttgaaacgtaagtgaactaattttagtgaattaatccaaaatcttgtggattcatccataagaggttaagcagaaatggattcgaaactagaagggcgctatcactagtaagagaagacaactcttgagggttgtgtatcccagcctccaaattacatatccagtgaagttttaaaaaaaaaaaaagaattggattcaagttttcttttcagacttttatttttaaacagtataatctttttttttttttttttttttttactgagatggagtctcactgtgtcaacccaggctgatgtgcagtggcgcaatctcggctcactgcaacctccactcacgggctcaggcagatccttctgcctcagcctcctgagtagctggaattacaggtatgtgccaccgtgcctggctactttttgtatttttagtagagacggggtttcaccatgttggccacctggtctcgaactcctgacctcaagtgatccacccgccttggcctcccaaagtgcagggattacaggcatgagccactgtgcccagccaagagtgtaatcttaaagcagagaaaagcaaaactgaagcaaagaaaggcctagagcctgtgccattacctctctcactcccagcttcttgctcctatcgtgggtcttgccatgcctctgcagtggggtcagcttgtctcagattgcaggctactggaccatgttggccatgggtctttgggccatcagaatagacatttgtacagttctgcaaagagagcagtattccacataatattttgcctatagagattatgctttttcttcttaaagtcaaaacattataaataatagctaaatactttgtcttctaacagaactctgaaatccttgtttcagaagcaactaaaacaaggcaagtaataagattttggttttcagaacagttttctccttagtggttacagtttaccctgttatcacagagtacctgaataaatttattttatttagctagttgacacaggttgaaactctagttcttttatttttcagacagtataatcaggatttgtggaaatgcaaatctcctgtcttctgtaaaatattgctcttttctttttttctttattttttaattttccctttgtgtttgtaggctttttcttcaggaaatcctgcacttacactaaactttgctgactactttgtcttactaggtgctgattggacatatctcaaagaagatgaacaaacagactttccctgagcactgtagtttgtgtaaagagatcttgccattcacagatcgcaaacaggcagtctgttccaatggccacatttggctccggtaagccattttaaaagtttctacttctgctcatttttcagttttgtgtagcacaaactactgtatgtgacagaatagcaactttatgccagttatctgttgcccttgccaatttgttggagaaaagctgctattataaagcctgatgtggacttttttcatcagtgtcactcaagcaagttggcctttaaagacagttttttactgcttaatatataggagttttcttgttttatttgttcattttcctaattgaacaaattatggctcctcttcctagcctcactctaagaccttggtgtgtcctcatgttactggacctgtgggctgcatttggcacaattactccctccttgaagcactttcatcacctgccttccgggacacagcactccctggtttttgtcctgtctctgactcttcattctcagttgtctttgctgatgggcacctcagctgtctgtctttctgcctgtttttcttctctcagcactttccctgggtggttgcttatcatctgcacactgatgatttaaacatagagtttttgcctgtatctctccccctaagtctaggcttatatatctaactgcctgctcagtacctctatttggatgtttaataggcatttcaaattggaatccaaccttttgttcctacctctgcagccctggtccaaaacaccatcatctcttgcccagcttattacacctgtagttaccttccatctggtcttcccacttccatccttgcccctccagtctgttattatagttgtgatagtgattgtatcaaaactttgtcactggctacttgtttctgatgagtaaaactaaaaccctctcagtgatccacaagacgccacacagcctggggccccttcctccctttgtcctcccgctgacctcatctgctgtatttgtccatcttgttcgcttcactccaggcagaatggcttcattcctcaggtacgtgaggcgccctccacctcaggacgtctacactggctgattcctctacctaggatgctgttccagcagatgtccacgtggcttccttcagtttcccattatcagttaggccttcctggccaccatatctaaaattgtaacaccccactgacataccttcccctcccattactttgcatcctccttccttgcgttattattttcctccttaataattatcactatttaatatattttttccttgtccttcctctagaatggaaagctgtatgaggacaggaacttatgtgttttgtttacagctatttctagaacaatgcctagtacatggtgggcactaaattttttaattttttttttttttttttgagacagggtcttgctgtattgcccaggctggagtgcagtggcacaatcttggctcactgtgacctttgcctcctgggttcaagcgattctcccacctcagcttcccctatagctggaactacaggcatgcgccaccacacccggctaatttttttttttgtatttttggtagagacggggtttcaccatgttgaccaggctggtcttgaactcctgggctcaagtgatccacccaccttggcctcccagagtgctggaactacaggcgtgagccactgcacccggccaaatttttaacaagattgtgctacacgtaccatattaactcaccagttctgttatcaaaatgtatgtacatttttctacatcactacaaagataacattcttaatggctatagaggtttctagtgtatgaatgtttcataatttacccccttattataatttgttttttttccaatttgtattgcattcctacactttttttttttttgagatggggagatgaggtctcactatgttgcccatggcagactcgaactcctgggctccagtgatcctcctgcctcagcctcctgagcagccaggactatgggcatgtaccaccatgcctggcttctacactttttctaatttgagtgttcagactttttaagagaaaagaataggaaataagcttgtagtatattttaggttagtaataaaaataaaaacatatactgagtgctattaatatgccaggcacagtctaagctgtacacacttattaagttactatattatggtggttgtgaaaataagttactaggattacaggtgtgtgccattgcacctggctttctgttagttaagattgggtataactactgtctttaagactgacagtacattggggaaaaccctgacgaatattgaaggcaaaattaatgatgcaagaagagacaggacactaacaaatgttcacaggttcaattccatccaaagattattcattgagcctttaccagggccaggcaaataaggataggtggaatgtatttttgcaacaaccatgtatggggagcatcatgattacttttgtttttacagatgagattggggcctggggaagttaaataatttgcccaagtcacaatggtggcttgtggcatagctcagaacctgacattctgtctccagaagccacatgtgtaagcattacacattaatgtctcctagatgggttctttcaggaaaactgttttcatttttcttgactaaagttagggctgaaataccccagtatgatttctctaggtgagaaccagtgcttgctgtcactcagttgtaatctttcttcctagatattcagttctttactcaaggtgtgcctgcctggagtcccttcccctaacctctgcctgcttggagtcccttccccaacctcctcctttgtgttttctgctccttagttgctcacctgaaaactgttattttttgggaaaccttccctgcaacccagatgtaccctttcccatctcattgcatcccacctgtccttatttgcctggcgctggtagatggtcagagaataatccttggatggaattgaacctgtgaacatttgttagtgtcctgtcatttttttgcaccattaattttgccttcgatattcttcagggttttccccagtgtactgtcagagtcttaaagacactttctaatcttaactattagaaagctgggcccagtggcacatgcctgtattcccagctacttgggaggcttaggcagaaggatcacttgagctcaggagttcaaggttaggctgggcaacgtagcgagaccctgtctcaaaacaacagcaacaacaaaaaacctaacgaataattctcaatataatacatgatcaatttttaaaaaacagatcaagaatttaaagtgcggtcaggtgtggacagactaaattcttttctgatgctcaaacaggaaaactgcaatctacctggattagaaccgttgtgtctctttgctaagcatggagtattggtttggccagctttggtgcacagggggatgcattgttatgtgaatgtatgagtatcatgctttcatttggttaatgtgtggttttatgataactctctgtgatggagaaacatcagtttctgagtgttagtagagcaaaccctctcccttgccaatacagtctgtcttctttcaggtgcttcttaacctaccagtcctgccagagtttgatatatagaaggtgtttgctccatgacagcattgcccggcatccagctccagaaggtgagtgctttcccttacttgggagggtgggtgggtggaacatgctggcagagggccagcgccccagaataacagttctagtcacgctctacacttcttggtattgtgttgtcgggggtggggggtggggagtaggcccctgctgctctttacggtgttactgtgaagccacagctaactaaaacatggccattggaatatgtcatattgaagtgcttactgcatttagtatgtaagtttgtctgcgttgctattctgtcactgcaaacaaattattcattccaaaaaatgtcagagcttgtttcagtagatgacatagatagattatatttgaatgtaaactctgtggatgatactttatacgaagacattattgaaccagtaataggatattcacttggagtcattcttccagtagccatgatgggtttttttcctggttggtctatgtgctctttcctgatagttctaatgtcatccgtttctgagataactacctggaaataagattgtagagtgggcaggaattagtgatttaataatgacgcaaatgtcagattttgtcctgacgttaataatgcactctaaccaagtgagctaactaggtacagaatatacaattttatatgtattttgaggggaatattctattctcagctgaaacaaacagcattctatataaaactacataaattcttgagctttgctctaaactggcagaagctctctaattctcataagttggtatgttgataccttgtgttctgttgtagctttttattagggaaacaacaatcatacacaaaaggaaagagaagggtataataaaccactgtgtgcccatcacttcagaaattattgactcatggccttttctgtttcatgtgtagttccctcacccacctccctcctcctgatggattattttgaaacacatttttgggaacttttaaatttttactgcaattgataatggatatgctgcttaggcaggaaatctggaagagattgaaactttaaaaatcttacccattgactttgagtctagccatttaaagcttttgagaagaatgagaagctactggatctaagaagagcactggagtagagtttttcatagatgaaagacgaggaggatttgaccagtgttgccgcatttttatttctcaagggcatagcattttttaaaaattcctattactgtaattttatgagagaatattttaacattaacaatgtatgaagaacacattctcggaatatactcctttctttaaattgaataaatttagctttatgaaacattcttcattacccttattttcctgtttcattacatttaactttgtgaaccacaagtttagtccagcctcatttggaatgatagaaaccgaagcccaaagaagtgaagtgctttgtctagggatatgtagctggtttattgcagaggtgggaccagaatgcccgtctctcaacgctacagtccggtattcatcccttttgactgtcttttccgaagctaacagttgataccacttgtcctccttttgcagatcccgactggattaagaggttactgcaaagcccctgccctttctgtgattctcctgtcttctaaataatcagtgacgggaagatggaagggcatgatgaactctgccatagaaaacttcctccagcctgaagagaaggatgcactggaggaagccggaccctcacgagtggagagaagtccttggtgattgtaaagagggcccctggagctcatttctgaatcgcactctccatttccagagactaaaggatgtcctttgaaatggctggactcagagagttggagtcgttttgagatgagcattagccccagctttgtaaccaatgaggaacacttacttatttttaagtatcttgacagaagcaatttgaacacagtgtcccgtcatttctagaaacagaatggtctcttctagagagcttggataaggaccttgctgggttgagttaggttttaatccttgctttggtttggaactgccttcgggctccagaacttaaattgcttggtccgtggcatctgatgtaccaacagagattaaaagtgtaaagcaacacatgggctgatgttttgttctcagaaaatagctgctggtctgcatccctccattcttgttttttatgcatatggaaaacattttcctaaaactctatattcttaagttgaagccaagactaaaatttaatgtgtcaaatgatctggtgactattataatgaataattgtgacttatttttcattctctcctgggtcatcaggtttcctgacccaactccttaatccgtataaagatgtcaaatactgtagttcacccacgccacagccctgcttcagacttaactgtggtagcctagatgagctatttgtacacagaggaaaaaaagatattttcctcttttagtaataagactttcagtatttttaatgttgacatttccagatgtttcatttagtatccaggggtctgtctggagacttctagagagggacagctcagaagtgagacccttgagctctggtgctgtaagcttgtgcaattaagttgaacagagcctgggaatttctttcctctgcacagtcccttgatatttggaatccaggttctgcccccaacccctacccacccagtggtctgttaagatgtctcagatggggctgggcttggtggctcatgcctgtactctcaacactttgggaagcaa

SEQ ID NO: 662 - DNA, 32742 bp, Homo sapiens
  source 1..32742: mol_type = other DNA
gttgtcagtccgatctcgcgagagaggacggaagcctgtgggagcccgtggcctttaaagtgccgttcagccttttcctccaggggtgctttgtaaacacggctgtgctcagggctcgcgggtgaccgaaaggatcatgaactagtgacctggaaaggtgagtaacgatgggcagaggtcagcagggctggagactgtagggatacggagaaagaaggcgctaacatggcgacgtcgctcagcacagtccccaccccccgtttcccatcacctcgggtgctcctgacgtgctccttagcccttggggcgattgtggctgtgctgccacctcggcggcccgcgcggtgtgggctttgggaacctgactggctgggccggaccgttaggtaaccagcgttcgttgttccggcccctccctctcgcgcgctttcctaaggcagaggaaaaaggaataacggctccctcttagacccctccctccgaattatcttcaccctacttgggtcagttcagaggtcctcggggcgcgcgtcgagtcagccgtgtgcgcagggagacctctcccacccacagtccttgggttgggcggggagagggcccactctggtctccccacccagtattcaagcgattgaggaccgtgtattggtgatggtggcggggaggaggatcgggaggcgcggctgaaaatagaatcagggtccctggctgcggtgcagcttgaaggaaagaatggtgtggagaacctaggagctggaagtctcggccttttccgtcctttccgccaccctcacaatcccgctacccccagctttttcccggtggggcggggcttaggtgtgggtgcagactgattctggtattttcccttatttttttttttttaaatctctgggtggacagcagagcgtatgtaaagaaataatttgcttttcatcaatgccctagggaccagggccgaaagggagtgtgtgtacgtgttttctatgttcgctcgtttaaccgaacctaggaggaaaaagagaggaggagctgggaactatttttgtgcccctaggtagtataaaattggctttctttaatggagagtcttaaaactggtgaggccaagagcaaaactactgtgaatatcatggagtaaaagagattactcctgatggaccttaggcatcagaaattttagtgaaagaaatgtttctcttaaaattcaacacctattttaaatagtgatgtaaagcatttctttacatgtaccttcaggttttctaatgctttcctggctattatttaactggtactaagggattgactaatccctaaattataatgtgaaagtttaaatttcttagaggttttaaattatggagacggtcacaatgcatgcatttaagatatacatttaaaatcagaacaaaaactgactttctttgagcacactttttgtcctatttgaagaaacatgaccactggcgttatcattgtgagtaacagccgttctgatctttaaatagccatatagctttggtctcttgaatcaaaattatgaaggtaaagctttatttataaaagcttgttaaaaagtcaaacctacaggtttaagtgtcttaaagtacaaacacagaagcagttttatcatgtattaatttttttttccttacttgaggaatccaccgtaaaaactttgtttcaaaaatgttaggaacatccttgtaaaatacgttttaaatatacagattcccctctgcagattaagaaagttcatggatctttaaggccatcagtagttgcgtaatagttaagaatcctcgtctttgtaaaataatttctaggaatcttccaaatttaccgtgatgtgtaaaagagtttctgagaatcttccaaatttaccatgatgtgtatgttgccttcctaagacgtttaatcttgctttgagagaatgctactgccattaagttttaagaactgatttaaaatgtaatatcgtggaaatttagaacttagttgttatgtattttaattgtcaggaaggagctttcagggacttttttttgtatgtgtagtgtacataataccttctatagctccgggtgcatttcctgaaaatcctttttaaaatatcttatccgaatgtttatttcgtatttggggcactgtatttttattagttaaatatgtaacccaggaattcctgcacttttttctttggcgttttttgtttttaagctaagataatagtagaggctgggcgtgcgcggtggctcatgcctgtaatgccagcacttcgtgaggccgagtggggcggatcatgaggtgaggagatcgagaccatcctagctaacacggtgaaaccccgtctctactaaaaataccaaaaattagctgggtgtgttggctcctgtagtcccacctactcgagaggctgaggcggagaatctgttgaacctgggaggcggaggttgcagtgagccgagatggcgccactgcactccaacctgggcgacacagcgagactccgtctcaaataaataaatagtagaaatggttgtcagcattttaacaaatagtggggttggggtggtctttattggtattcaggatctgaaagctctatgactatggtagaaaaatatgccatacatcaaacatctatctgtaagtagcattaactcttcaaaaaataatgtacattttttctacccaaatttttgtattttggaaaacttcggttttaatgatacatacgttcttgtctggtaaattgttagatcgtgttagatcaggtaaacaatctcaccaatgtgtgctttttctactaattttgtctaaaggctcttccttccaatatgaaatatacctataagtaggcatttctttctcttttttattcttactaaaatgtcattggagaatataaagtagttgaagtctcccttatgaaaaccagattttcatcagaacctctcgttaaaaattcagtgaatagcaataattaatattcaactgatttttataaaagtcaatgcatatagcacctgttgggttattttgtataattaaaatgtaccctaaaaaaaatcccaccttagccaggtgtggtagctcacgcctgtaatcccagcactttgggaggctgaggcaggcggatcagctgaggtcaggagttcaagaccagcctggccaacatggtgaaaccacgttggtaggcgcctgcaatcccagctactggggaggctgaggcaggagaatcgctagcacctaggagcaggaggctgcagtgagagccgatcgtgccactgcactctagcctgggcaacagaatgagactgcatctcaaaacaaaacaaaaaccaaaaaattcacttagtattgttataatctggagtttaatttagtatttctgtgtttatctcatactcacacctgttcctcaaggctaagaacttgtctaaaatgctgcatgttctctttatgtaagttttaatgttgaagtagtaggatagtattcacctatttctatttgaaggaaaaccccagagaacattttatttcctttgttatgtttctcaaggttaaaaggttatatagtaaggtataagatagtttcatagaaaatcaaggaaatttgtggatctttaaggccatcagtaattgtattttatcttattttatttttgagacagagtctccctctggcttccacgctggagtgcagtggtgcagtcttggctcactgcaatctccacctcccggattcaagcggttctcctgtctgagcctcccgaataactaggattacaggggtgcaccaccattccctgctgatttttgtatttttagtagagatggggtttcaccatgttggccaggctgatctcgacttcctggcctcgagtgatccactcgccttggcctctcaaagtgttgggattacaggcgtgagccactacactaggcctatttttacacattattttataatataaatatatttaatgttacatattatataaatataaataaatatgtattcattatatgtgtcttttcaatttgttgagactttttgacaaccttgaaactggtgtattcattttcacttttaaggcattacaggcatgagccactgcacccgggcctatttttacacattgtgttacaggtgtatttaatgttacatattatataattataaataaatatgtattcattatatatatcttttcaatttattcttgttggcaaccttgaaactagtgtattcattttcacttttcttttttttttttttgagacggagttgctatgtcacccaggctggagtgcagtgccgctctcagctcattgtaacctctgcctcccaggttcaagtgattctcctgcctcagcctcctgagtagctgggattacaggtgcccgccaccacacctggctaatttttgtatttttaatagaaacggggtttcaccatgttggccaggctggtctcgaacctgcctcggcctcccaaagtgttggaattacaggcatgagccaccacccagcatcatttttcattttttaagtatgtttattgattttttttccttggcattttgacattgacagtaaagaagagatgtaaacaatgttttgggggctttgcctattcacccatatttgcattctgtatcttaacaaagatagtggttctcagccacttttttgcctttctacccaaggaatacaaaatacttccaacagtagtagtggcttattaccacagagattctcaacaagactggtagggaaagacagggagaaataattgtaattggcaaaataccatatggactttggttatttttgtaatatatagtatttttatctataatattgaccataagtttataaatatattccctaaatattctttagtttgctagcagaaccgaaacctttgtcattctaatttttttagctttgctccaatgttatagctttggtttttctaattttactgttcgggctagtatgtttgcttgcatttatttatttatttatttatttatttatttatttatttatttattttttgagacagagtctcgctctgttgcccaggctggagtgcagtggcacgatcttggctcactgcaagctccgcctcccaggttcatgccattctcctgcctcagcctcccaagtagctgggactacaggcacccaccaccacgcccggcaaattttttaatatttttagtagagacggggtttcaccgtgttagctaggatggtctcgatcttctgaccttgtgatccgcccacctcggcctcccaaagtgctgggattacaggcatgagccactgcacccagcctgcttttatttattaaacgtgtcggaacaatttttttatatatcaacttgttttgccatactaacaaataattgtgttcattatttttgttttcttctagtttgtgcatatatattgcagtttttacagaattatatcaaataagttttattttacttttatagcattgtatttttccatgttgtataacctttatgatatttgattgttacttgatagttgaaaaataagtattaaatttgttctaaatgcctgacaggaaaataatagttttcagtttatgcctattttgacattgaattgaacatctctgtgcattttttcttttatgaattgtttctataggatactaatctcaaatgaattactagtcaaaggatataaatgtttctacagttgccagatttttgcctccccaaagacttgagcgagtttacactgtcagcagagcatgaatgcgttagctttgccatacttttgtgaacttgggagttatgattaatgaagcgtgattacctaattgggaattatttctgggaataagttgtattatttagcagttttaaaattatttagttggccatatcatactatagttatttatctaccagtgatctatgtgatgtgacaaatattgtgtatttcatattttctgacattttactgtctttgtttcttttaaagtttaccaaaacttttgacagactggtaacaataattcttagatttcatgcagttttatgtggtttgtacactgagtattttaatgctagtttaagagttaatttctgggctgggcatggtggctcatgcctgtaatcccaccattttgggaggcctaggcaggtggatcacctgaggtcaggagttcgagaccagcctggccaatgtgagaaaacaccatctctactaaaaatacaaaaattagctgggcatgatggcgggtgcctgtaatctcagctactcgggagactgaggcaggagaattgctcgaacctgggaggcagaggttgcagtgagccaagatcacgccagtgcactctatcctgggcaacagagcgagacggtgtctcaaaaaaaaaaaaaaagagttactttctgaactatacatttcatagttctgtcttatgaatgtgtcattatgatttattaagatttataatgacaaattcatttccatgtaggaaacacttggaataaagaaagtgtatatgagtatatgatagccaaattgactgagttttgtccctggcacatagttaagtgtgtaatcaatattttaggatagttattagaagccagattatcaggggtctaccacttactgtgttatcttgagtaaattatataacctctctgcctcagtttccttctctttaaggagaataatttaactcatagtcttgctgtgagcattcatgtgatatatatacaatacttaatacagtgtcaagaacttaatgagtactcagtttgtgttgtgggaattattattgaagttcattcagaaataatctagcctagccctccaggcatgcttgtgctgtagcttgaaagcagtacagcaaccatctacttggtagctttggcaacaaagttatttttccctaagaatttataatttgtggaggaacatgccaccttagaattttcgtaaattcatttgagagaatgtctcatatttttttgttccatatgtaccccttctcagacattttctgtatcaaattccttcagtatagcatatccttattttaagatgataaaattatgatactgtgattttcataaaatccaattatctttgtatttttgagacaaagtcttactctgtcatgcaggttggagtgcagtgatgcgactaagtctcactgcggcttccacctctggggctcgagagatcttcccacctaagcctcccaaatagctgggaccacactcacatgccaccacactcagctagtttttaaatttttgtagagatggggtcttgccgttgcccaggctggtctcaaactcccaggctcaagcgatcctcccacctcagtatcacaaagtgctgggattacaggctgctccccaccccaactattcttttcttctactccaccaatcctattataaacattctagggaaacctttcatttctccttccccatagtgggattgagattatgattaaaataccacagttctaaagttgttttgaagtctctgctaattatacaattataactacactatcaatttttggccacaaagttgagaatcagtgaaatattttatcatttgtaaggtaggttttaatgattgttgatatatggatgttgggtcgagggatattttttgtagtaatacactttacttacttgaattttgacatactttgaaaacggaagaaagaggtgagcttatcattgttttaatgggcatagtacataatccatagtcttactttatttcatttttagagacagggtctctatcacccaggctggagtgtggtggtgcagtcgtagttcactgctgcctcaaacacctgggcttcagcaatcctcccacctcagcctcccgagtagctgggactacaggcatgtgctactatacccagctaattttttaattttttgtagagatggagtctcactatgttacccaggttggtcttgaattcttggcctcaagtaatcctcccatctcagcttcacaaagcgctggggttacaggcgtgagccaccacaccaagccggtagtgtattttatttgtgccctcttcataatgagaaatttttattgatgtatttttcataatggtgatgactatgaattactgtaattcttggagaactgaatttctatttctattttctttttgcttttacaaaaaataagtttctcaggagaaaaaaagcaatgaaaggtattttatcacctaccttgggcaaaaataatgctatggaccttagaccacataattctgttaccaaatctaaggtgatgttattagcacaacttgtgctactgttgtttatattcataattattactctgtaaattttttgtatttatgtatttgttattctattataattttaaactataaaactacttgctttctttacattgcctaggaataatcaagactcacttaaaaaatatttaatttaaaaattggactactgatattttaattgaatatttttgagatattgaactgatttcactcttcacatactcataatacagtctggagaagtttgtgatactttttacgtgtaccatcaactttgagaaatttcatcaaaattttagtatactcttgggaattgtgtgaaggacctctctcatgtctgctgtgagtgggggaaaaaatactgctgctttccttgttaacattgggcttaatatttttctctcagctgatgaatttgagttacctaaattgatgaactaaacattatatatcaaataaacttacagatagcatcagaatcatgggttaaagattaatataaaacttttttttttttttgagacggagtcttgctctgtcgcgcaggctggagtacagtggtaggttctcagctcactgaaccctccacctcccaggctcaagcagttctcatgcctcagccttttgagcagctggaactatagtctccgccaccacgccccgctgatttttttgtatttttagtagagacggggtttctccatgatgaccaggctggtcttgaactcctgacctcaagcagtctgcctaccttggcctcccaaagtgctgggattacagggttgagctatcatgcctggccaaaactcttatctaaaagtcaaactgagtatgtagttcagtttctggccttaaaaataaagaagatagtaagattaggtatttattaggcattagaaaaatgtacatttaaagtcaaagtaaaatgcagtaaaatttatgaacttaataaatactattttagtgtcatgcactattctgtgtattttacatatgttacttttatatattttgatagccctgaaatgtatttttttttttactgtagaggatcatagtgtaatcatacaatttaaaattttcctggccaggggcagtggctcacacctacaatcccagcactttgggaggctaatacaggaggatcattgccttgattaatggaggctttaagtcactcttattttaaattatccatttaaaatatccacttgggttcctgtagagatgacctcagtttccagtgttccccccagacgtttgcttcttgccgtaggatcaggaagctttaaggcactcttattttaaattatccatttaaaatatccattttaagttatccattttaaaattatccctggataatttaaaataagagtttgagctcaaggaattcaagaccagcctgggcaacatcgtgagaccggtcactccaaaaaaaatttagctgggtgtggtggcatgtgtacctgtggttccgcctactgaggaggttgaggtgggaggatcacttgagcccaggagatccaggttgcagtgagccatggttgggccactgtacttacagagcaagaccctgtctcaaaaaaaaaaaaaaaaaaaatcctgaattcaaaatactttagtcttgagaggcaagtgaagtcctactaggtcgtggctgcaggttttcaaactccttgatttaggtttgttattatgaccactttgctattcccaaggtgatctctaggatcatttcaggaatgtatgaagatagtcatgaatgtactgagtgttcgtatcctgcttcagttcaccttggctgtgcctacatgatgacagatattggtgtttttttttttttgagacagagtctcactctgtcacccagcctggagtgcagtagcgcgatctcggctcactgcaacctctgcctcccgggttcaagcagttctctgcgttagccttctgagtagctgggattacaggcacctgccactacgctcagctaatttttgtatttttagtagagaaagggtttcaccatcttggccaggctggtcttaaactcctgatctcgtgatccacccaccttggcctcccaaagtgctgggattacaggcatgagccactgtgcccagcccatgataacagatgtttgaaagggaataaagtcgtgtctagtgtcattgtgctagcgtgcccctcccccttcagtgttggccccagatcttccctttatttttttatgtttgtgggaaaggggccacatcagcagcaatcatcaaccaatcaataggatctacttagtggtgaacatattggctgtttaattggtaagagtcgctggcctgaccacaccacagcatggccacttgggttcctgtagagatggcctcagtttccaatgttcctcccagacgtttgcttcttgcccaatcgagaggggatctcaagactcctgattggtcattgtgagctctcaccctgcgtggctgtgtagatagactgcatagatacatgaagtggggatgggggccaaggtcctattactgctgtttggaaataacttgcctcttacagatccagccttattgtttttctgacatcctagtaatggcagatcctgcacaaagtggatttcagagttaatactgtgaggagacaaaataatgagaatagttttaccaaagacaatgaaatattgcataatgtctgcattttgccattgatttgagtgcatctttagaaaactgaatttcacgaaaacccaggacattgctggaaattgtatgccctttagaaactttatgtgaatttttatacaaatgctgttttatgagttatgtaaaatgttacaaaaatagaaaaaaaataccctgtgtctataaggtggtgctgctgttgaagtcgtggggcacaagtccatcttcctggtaccttacaactcttcttaccgtattaattttctgtttctgactcatacattaccacctacttaacatcttaaaacaataaagatttattgtctcacagttttagtaggccagaagtccaggcgggcccagccgagtcctcagcttagggacttacaaagccaagatgagtgcgttggcagagctgcattcctttttggagtctctagggaagaatccacttctaagttaattcaggtggttggctgaattcagtaggtctttcctttctttgtgtccctctttccttactggctatgagccaagggctggtcttttctcccaggagctgaagtgctttccatgtggccccctccagtaatggcaggtcaaatccctctcgtgcttctaacctgtctgacttctttttctggctgaatctctgactccagatggagaaagttctcagctcttgaggtctcttgattagattcctggataacccaggaatctatcttatttttggatctgtagtccttttttttttttttttttttttttttgttttttgagacagagtcttgctctgtcacccaggctggagtgtaatggtgcaatctcggctcactgcaacctccgcctcccaggttaaagcaattttcctgcctcagcctcccgagtagctgggattacaggcacccgccaccacgcctggctaatttttgtatttttagtagagatggggtttcaccatgttggccaggctggtctcgaactcctgacctcaggtgatccgcctgccttggcctcccaaagtgctgggattacaggtgtgagccaccatggctagcaaagatctgtgtagtctttttacatctgcactgttccttttgtggtggaaggtaacctattaacaggttccagggattagggtatggacatctttggaaggccattctgcctaatacactcatatactcctgaaaagaaacttgataaattctctacccttgtacattttaaagttgattcctacaattttcatcatagattgaaattgttgaaaaaaatataatttctgttttttccagatacaccacttttataagtacctaaatatcatagtgatttgatgctgtcattggttttaaaaaacaagcttgaattaattcatttcacagttggaagttttcagcgtccctttttcttattaaactttattttctttcgacttctccaacataattttatttgaatccaatgtattttaatgttttaaaattctttattaatgactctgtcatacttgtttgtagcaaatatacatttaatttttcaaaattttttactgatttcttcattcttgcggaactccctctctggacaatgcatttttgtatggtatttccacaatggaagaggtaatcattaaatgaaaattgttattctttctgtcatcacactatacaataaagtatatctgaattcctaaacacaaagcagaacaccaattcttaaagctatgctttgcctttaatagaaatatttgtaagacagggaaagccagaagcttgagggttaatggtgtcttgattaatggaggttttaaggcactcttattttaaattatccatttgttttgttccatggaagcttctacaacctagggcaactcattctaataagatttgggatggggataggtatggatttcttgtgaaaagtgggagaatgagggctctgggaaagtaggcagatcatctttgggaaagcaaacaaagggaagatgaagatacagaagctgattttcttaaaacttgtcttgctcaagtatcccttggaaagccttagtgtgtacctttagtaatacataccccactttgtctgtatcccatactgcctccttgaaagactgtccacctcctgcctacctcctgtcctcccacagggacagaagctaacttctctccaccacccaggattgcccttgcatctgttacacacttttgaggccatgcccaagagaggattaattcctttctcatactgatgcctactttttgggccctgtttcttgtcacagtatttggctcttaccaggaaatttgccattagcagtgtttgcacatttcagcagagattctacccacaggttagtgatatccaaatatagccatttgctgcataacaacattttgagtcagcagaccacatataagatgtggtagccatcatgatatagtataacacattactcacatttgtagtgatgttggtgtaaacaaacctactgtgctaccagttgtataaaagtatagcatttgtctttcattaagacaaggaaaaaatagcacaattacgtacagtatgtaatatttgataaacaatgatgttactggtttatgtatttaaatatactttttaatcattattttggagtgtacttttacttttttttaaaaaaaagtttattttaaaacaacctcaggcaggtccttcaggaggtattcttcaagaaggcgttgttatcataggtgatcacggctccatgttattgcccctgaagacctagtgggacaagatgtggaggtggaagacagtgacactgatgatcgtcaccctgtgtaggcctaggctaatgtgtgtatctgtgtgttagttcttaacaaaataattttaaagtaaaaaatatatatatatatatattttttttttcttttctttttgagatggagtttcgctcttcttgcctaggctggagtgcagtggtgcaatcttggctcactgcaaccgccgcctcccaggttcaagcgattctcctgcctcagcctcctgagtagctgggattacaggtgtgtgccaccacaccggctaattttgtatttttagtagagatgaggtccatgttggtcacgctggtcttgaactcctgacctcaggtgatccgcccacctcggtttcccaaagtgctgggattacaggcgtgagccaccatgcccagcctaaaaatttttaagatagaaaaaagcttattagaataaggatgaaaatatttttgtatagctgaacagtgtgtttgtggtggtggcttttttttttttttttctttgaggcagagtctcgctctgtcgcccaggctggagtgcaatggtgtgatctcgactcactgcaacctctgcctcctgggttcaagcgattctcctctgcctcagcctcccaagtagctgggactacaggcatccgccaccatgcccggctaattttttgtatttttagtagagacgggggtttcaccatattggccaggctggtctcgaactcctgaccttgtgatccaccctcctaggcctcctaaagtgctgtgattacgggcgtgagggtgtgagccacagcacccagcctaaaatcttttgtactgtgtttttactgtactctttctgtgtttagatacacaaataccattttcttacaaatggtaacagtattcagtacagtaacatcctgtacaggtttgtagcctaggagcaataggctatatcatcaaggtttgtgtgagtatagtctgaagtttgcacaatgatgttttggcctaacttcacatttctcaaagaatgtatccctgttgttaagtgatgcatgattatgtaagaaagacgtctacaataagtcaggtagtgggggcaaagcagaggctccttacatctgtgcctttcaagttacaaaaaaaggatgttatttttaatgttgttcaaagtctgggtgattatcttaacattgcatgtgttaagacataagctatacaggccagttacaactggctatcttatttctttttgcttgaaatgacaataccagtttgtcttccagttttttagggtattgtatttaatggaaaaaaccgcaattacttttgtacctggtcttttgtgagtaactgctgaaataagaacccaaatatctctatacaaataggaaaacccgaagccatactttaaaaataaacatttctctgaaagaaacaatttgcagaaatttatctctatcaagaagatgtggtcctttacattatcccacagagccatttgtcctttgaattgctgctccatttttgtagtccctattttacatttgtatggctgaatatactatttgggtcctttttcccttaaggaacagcctgtatataaagcataattttgttgccagctttgaaatgagtttttagtttctgatacaacagtgttttaaacatattaaatatttaaacatgtttcaagcaatcttgaaagtgtcaggaaatcaaagttaagtgcaacccttctttccaacattctgcacaatagggaaatctcccaatacctatatgacctggtaatggaagctcagcactgagaaaacgtagagaaaagtgtctttctctttgaatattgtgccttttcttaatgcggttggtaactgagctttctgccaggttcttactcattctcaccttgaccacaccatttatttacataatgattctgagcagtcatttctgagttttgtagactgagtatgtgagtttacctttccaaactacaacaatttaggttgtttctttgctcttatgttgtcattctggtcttcatatttttcctttcttttgtcacctatagattagccttacatattaaagaagtccttatgaatgttagtcttggctcctgacaggaccttctgctttcgaaaactctctttagtagtttgccaagccatctccatgaggtatctggacatcttacattttagaatgaaataagtatgaggacagaaacaactaattgtctgccaatattcctcctattattttttcttattggtagatgctccagttcttaagcatatggtgaaataaaggacatatttcctatccccccgatagctatggtcatatgattaagttctaagccatgaaatgtaaataaaagtttcctgtgaaatttctgaaaaatttccttaaagggaggctattgcttatctcctttttctcatcttgctgtctgatcagcagatgtgatggctagaacttacttgaacagttatttttaaaaccatgaaggagaagccacatgttgaggatggcagaccaacaaaatataaggacccttggttccaggcgatcatggttctggattgcctatgtttttttgtgaaagaaataaacttctgaatcatttaagccagttattttgagtgttctgtcattccgttgttattttgagttttctatcattaacagctgaacctaatcctaactgatacacatatatttaaaagtcaagctttttccaaataagcacatagactgggtcccatgggttttattgtgcagcaatgacataagaaaaactgttaatctccactctaaaaattttgatgctcaaattcagcactgacatttcacctgttatctatgactcctcctctttcatttttctactttcaccaaggtttcattgccttacttccatccttgaaattgttaatacctctaataggtggtaatatgccaggagttacgggaggctacaggataaacatcttcctggagcattgacaatttggagggagaaccttaagttttatattgaaaaacatggaatgggaggcaaaatttacatacatttttgaaatattaagaaaacatttttaaaaattctatggaattgaaatacaagaggctattaatttagatcccacatggtaataagttcactcttttctgcctctctttttccctaagggtactagatggaaacttgagaaaggactgcttattgataacagctaaggtattcctggaagcagagtaaataaagctcatggcccaccagctagaaaggtaagagattttaagcttttaacataaaagtattcttttcattttgtgattatctttcaaatactaccgaatttagtagatgtttccagacagttgtcttcagaatgctgaagtcctaccgtattgatagtgtttagtaaaaaaagatgctgagattcagcaaatttggaaatgtcttttggagatagaatgaatgtgagcatataaaagcacaatgaggacttaggttaaatatttaattttgtttaacatagagtttcctaaatttatctgactagggacccctctttagcaaagggttccgatataaaggtctcagttcttctaagaataataatataaactaatctgaggtattttctgtctttcaaaaatattttgggcaaaaagtttacccactctagggccgtacaagctaatgaaaatgtcaaatttatttgctttctaattgaatgatatcaactaagtttattaccacagttgtctcatgctgatcagaaacgttaattggaagttatacagtcccttatacatacctttattgaatactgtgtgccagccacagaatggtgatattagagtataaagtaaaaaaaaatttttttttctaatctcaagccatttacagtctggggatgtagcttctaaatatggaaggaaaataccaatttaataaatgtagtctggcgtacaaaatctttcaaaacatagtgatagactttgttagatatatcaaaatatacaagcagattgggttttttgtcacacctggatctggaggttcacatcaaaagaggaactatgcataaaagtatagttattctaattttgacaaaaattcggaaaataatttaaatctgtcaatacatttatatatttaaaaagcaaaaaattttaaagcaagtataaagcagaatgggtgataacacttgataattttttcttactctgtgatacctgcattaaataattttaagctgcttgactaacttaaatgatcaagtttactagaagcagtcatcataaaatataagctccattaggtcaggaactgtgtctgtgtcatcataccctgaagtctagcacattcctaccctattgcatgtgctcaataatgtttattgactgaatgatggggtaaatgagagatccaaatttgagggtaggggagtagtagatggaagaagctcggaagttagtggtgttgactaagaaaggaatggatgaatgggaaatggatgatataagggaggaaactgattaaaagcctgcatagctagagccagagattaaggggaagcctaagactggttaggaggtagtggtcagtccatgcaagggtctagaaacaatgttaagcatttgagactatcctgtgagctgcttgtttttttcataactgatccttgactctcattttgatagtactgctttagttcagaccattattctcccttcaacttagcagtagcttgtgccagttttctttgttttgttgttgttgttgtttagatttacctcttatttttgtcattttttgccagttttcttatgcatagtgtgctgcccatcttctatacttttattagtgatcttgcaaaaatcctcctcttgatttagttcacgtacttaaaatgtttcaatttcttactacagagttagacaaactttttctttaatgggggagtgggagactgggagactgatcatacatattttagaccttgtgggaaccacatgtgatctctgttgcatagtcttctttgtgtccccgcccccacctttaacaattttaaagtgtgaagaactcagcactttgacccagggccatagcttatataaccttggggcagtgggaagggaaggaaggatggtggaagggcaggtaatggtggaatccaaacattttaccatgttattaaaggcctttcaagatttggatatctctctggtcttactgtcttaatcttctatcctgttgatgagaagagtgaaactctataaaatatttgaagagatttatttggagccaaatatgagtagccagtggctaatgacacaacctaggagaccctgagaacatgtgcccaaggtggttgggctacagcttggttttatacattttagggagacataagacatcaatcaatacatttaaaatgtgcattgattgggtccagaaaggtaggacaactggaagtttggggggtggggtgctgtgttccagttcataggattcaaagattttctgattggcagttggttgaaagagttactatctaaagacctggaatcaatagaaaggaatgtctgggttaagataagaggttgtagagaataaggttttatcatgcaagagaatagactgtaaatgtttcttaccagacttaaagagtctgttctatcaatcttacggtctctgtgttgatattaatgttggtcagctgtgcctgaatttcaacgggaggagggtataaatgaggcctgtgggacctccacttcccatcatggccttaactagtttttcgggttaactttggaatgccctgggccaagggaagggtctgttggttggggggcttagaattttatttttggtttacagtcccacacttcagctatcagaggttctcagagtctcagtggactgtgctttattgtgcctcaacatgctgtctcctctttatgaaatatcccagaatggctgatgcctcttgctttgagaaaactcaactcaggcattacttcctttagtagcatttcagggccctctccaggattggctaggtatttagggaatggaaactcaatcagataaattcaagtaaaaagagggggtgggactcatactaatggtactggagactctcggatccaatcacaagacatagttgggcatcacagaaactattttccttcatgatttctcacctctgtttttctgtgcctactccattctggcttttattagtttttttttttatcagtaagaacatgacagaaaatgtctaccggtcctaaaatatgattttgaatctctgatgctcacttctgtgtgactgattttttctttctacagatttcctgaagaggtagtctgattggcttaactcggtcagtatctcccctagtttacctgaggcaggtatgtcaggatcatggatatgtaggattgcccttttctccaatgttggcagatcaagctctttaagaggggaatatgaatgcttttgatttatgttcccatagcctgtctttattattatatgtatcactgaattactattttcactttttctcttccttactagtctgattttaagggcagggactatgtcttattctttttaaaaaaatgtttatgtattttcataaaaaccatggtaacatcaagcaacttttattcttaatatggtattagatacaaaataggtagtgaaatgttttccaaataacttttataaagtaaatgatttgtattggaaatgctcagagtgctatgtattatctataacatttagtattacctatattttagaaacttgtttggaaacttgagtacgtgcttaaaaggttaagagtttgcaatgtttatagttctataaccaactaaatagaagatcaaattcatattttagaatccggatatttctaacgttagtcaccagaaatgtgtttgctccctcccatttttgtagactgatttaacagcactattttctatgaagtgaattgctttcctcatttgtttttgatagggatgtaggaaaataaaatattttatcgtgtgaatcacttcagtgatagaattaaaaatgacatgggaatattgatactacagcctaaagcatcttccttttcctcaacagacttaacctacatgtcatattttaaaaagggaacaaggagctaatagaataaatgattatatgatatcaccctttgagtcttctgatttgtaaattattctactgtagtataattttatttgctcttaaccttgcagtgcagaatgtagtttttctattctttgatatatatcatagcatgaaaattataaacaaaaaacaagcagagttcttagagaataaatatatcttgtagtgtttttttcatgactactgctacaaactacatcgatgctaattatataatggttatacagtactcccccgttatctgtggaggataagtttcaggagccccagtggatgcctgagactgtagatagtactgagccctatacatgctattttttttcctatgtagtaatgagcaggtagcatatatagcctggatgtgcttgacgaagcgacaattcacatctcaggtgggatggagcaagaagatgcgatttcatcactctatttaaaacagtacacagtttaaagcctatgaattgtttgtttctggagttgtccatttaatatttttagacagctgttgactgtgggtaactgaaaccatggaaagtgaagctgcagataagtggaggactgctgtgtaatgaattattacagtgcatattatttacatacaacttaaactccttctataagtttttattttttacttcaaaactctttaagggttctacaataagacattctgttacaaaatcacaatatgtccatgaaagtcaggaagttaacattgatatattgctactatctaatctgcaggtcacatttaagtttttccagttgttctgataatgtacttcatagaaaaaggattccgtctagaatctcaggttgcaattatttgttatgtcgcattggtcttttaaaatcggaaacagttccttaatgtttccttgactataatgattttggtgcttttggagattattatgccagtgaatttatagagtttacctcaatttggggttatataatactcttcattattagatacaggttctatatctttggcatgactattatagaagtgatgctgttacattcttattacattctatcagtggcacatgattttatctttcttatttctcgtggggttaagtcacatcacttgattaaggtgatgtttgccaggcttttgtgctgtaaattacttttgcccttagtaattaagctgtatagggagatataatactttgagatgatataaatatcctatttcttatcaaatgttcagtttattcctttatatcagtatgggttcatagaaccctctttatttacgatgtgatccattactatcattatttattttgatcatcatattatcccagatttaagtcctttcttactttctggccaaatctggcagcagtacaggatgcgtcttgaatatcttgtgccagaaagtaaggaaggacttctttatttccactacaagacccatcctgtactgctgaattagaatcagccaattcttcaaggagctgaggtcccttttggtggagaatggtatttacgcaccgtattaggccattcttgcattgctataaagaaatacctgagactgggtaatttataaagaaaagaggtttaattggctcctggttccacaggctatacaagcatggcactggcatctgctcagcttctcaggaagcctcaaggagcatttactcatggcagaaggcaaagcaggagcaggcacataacatggtgagagcaggagcaggaagagagttgcagggggcacacaattttaaaaaatcagatctcctgagtattcattcactgttgagaggacagcactgagccatgagggatctgccccaacacctctcaccaggccctacctccaacattgaagattacaattcaccatgagatttggcagggacatatattcaacctatatcacactccagagtctggatgctaagtgtgcttattggggtttcagtgttcccaggccctctcagtggacacagctagggacctacatgaccacatatgcgtgcatatacacattaacatctatatttctgtatctttatgttgagagccataagttaccattagtatcttcaaatgtcatctaataccaaggttcattctatatttataattcccttcaactgtagtatgaattcactcttacctagcacatccttgatatgtttacttatttgatcaatatccacgtatttacataatgaattgcctggtgccattaggcactcacctttcctctccatcaagtagatgtcttcctgtttgggtcctgacaccctgtgctggactagtgccactcctatcctttacttcatgtggatgccgccttagcccacttgggcattgacagctcacatcaggctgccttcccttcttttcttatccttctgagactccaacattaaatgcagggctgaccacccctttcccagcccaaccctcaactcatctatctcccagtggacatctttctcactctgcttagactcagacactgcagtgggctgccctcaggtagcctgtctgagctacctcccgtgcagacactctatatttgttttctctggtggcttaacttttatgtgaattttaagttggaagatgtgttttgccggttaatttcttccattttcttctattcatcttttcttaaaatgtttttctttattattctcttttcttattggcattttataatacatgattccatttggtaatgagcctgtctaataactctagaaattctaaaagtctctctgtactattaaaagtggtttacataaaatttctgtatagttgttagtcgtaaaatagcaggagaaatatttttgtcccatttttgacctcgaataagtcattttaccctttcagacctcagtctcctcatttgcaaaatgaatagttaggactatattaggaacctaacgacgaggtgcccgatcagaaatccatgtcataagaaaaagcctatattctatattcaagtgagagaattttaactaacatttttttttaaaaaaaatgggcaaagaatcaggtgcagtgcctcatgcctgtaatcctagcactttgagaggctgaggcaggaggatggcttgagcctaggagttcaagatcagcctgggaaacatagggagatcctgtctctacaaaaaatgtaaaaattagctggagatggtggtatacacctgtggttccagctatttgcgaggctgaagtgggaggattgctcaagtctgagaaggtggagcctgtagtgaaccatgatcatgccactgcactccagcctgggtgacagagcaagacctcatcttgaaaaaaaggcgggggctgggcagaggaggcattttacatagaactacaaataaccattatatatatgaaaaagttcagcctcattagtgtgtcaagatatgcaacttaaaaattagttttttttactaatatgacaaaaatgttaaaaaatgatatccactgtttgtgttggtattaagaaatgaggtctttctctgctggtaaagtagaaatcaatactgtatatttggagggcagtttagcaatataaattgaaagccttaaaatatgcctttactttgatatagcagtttcacttctagaagttcatcttgtggaatttattacagatattgcacaaagatttgtcccaaagatattcattgatgataaaagcccattaataattatatgatggagtactatatagccgttaaaaatgacatctatttaatgacattactatttaattatatggcagaatttagataattgcattttagaggaagttgtaatactatttatatatttttcttctttttttcattgtcatagagtcatgtttttataatttataaagttatgtatcaccatacattgacaagactagactatgtactctgaaatgttaacagtagttatctctgaatggtagtattcaaggtaacttttattttctttttgcccttctgtattattcttggagcagatttaaagttccttataatgccttagttcattaggtgtagtttagtttacattattaggatataacaagtgatctccttctgaacgccaatgaaaacttcagcttttagtcaggcatggtagcattgcctgtaatcccagctacttacttaggaagctgaggcgggaagatcacttgagctcaggatttcaaggctgcagtgagctatgatcatgccactgcactccagcctgtgtgacagagcaaaactctgtctcttaaaacacacacagacacacacacacactctctctcttgctcgctcgctgttgctctctctttctgtttctctctgcagctttagggttttttagaattatgtaagattgatcacacacacacacacacacacacacacacactctctctctctctctctctctctctctctctctctttcggcagcgttagggttttttagaattatgtaagattgatcatttatacaggatacctaatagcagaaattgctatatgttgtcacaaacaaaattgaaagtagaatttaaacaagtatggagttctaaaataacatgctttatagcaataaaatagaggaaatacgaggaacatatacatgtttgtatgtggaactatcttagaaaactggaaagagggccaggcacaatggctcaggcctgtaatcccagcactttgggaggccaaggcgtggatcacctgagttcagtagttcaagaccagcctggccaacatggtgaaaccccatctctactaaaaatacaaaaattagccgggagtggtggtgcgtgcctgtaatcccggctactctggaggcttgaacctggcaggcggaggttgcagtgagccgagacgcaacattgcactccagcctgggcgacaagagcgagagtctgtctcaaaaaaaaaaaaaaaaagaaaagaaaactggaaagaggaagccttcacttttgtactgatctaagttctgcagcagaacatcaagcaagtgttctcagttcataggatcctcttatgtctatattaaaataactgcctattacctcaatatattttgtaggtttttttcttttcttttttagaattttcagggatttgctcttccctatttttctgttccatctcttcctctaatcttgggagcaattgttagtgctcttttaccccagagctgtttttggtcatatttctcatttgaagtttgacaacagtttgtatggaggaatatttatttttttctgaagtaacacatgtagatagcatacatgttaagatttttgtagattcacatttgaaaaatatatttatagggaccaggcacggtggctcacacctgtaatcccagcacttcgggaggccaaggcgggcggatcacgaggtcaggagatggagaccttcctagctgacatggtgaaaccccgtctctactaaaaatacaaaaaaattagccgggcatggtggcgggctcctgtagtcccagctacttaggaggctgaggcaggagaatggcgtgaacccgggagatggagcttacagtgaaccgagattgcgccactgcactccagcctggacgacagagcgagactccgtcccgaaaagaaaaaaaagaaaagaaaaatatgtttatagttttatgttgattctaccagaaccacatacctaggtgaaatttttaagtgttgaagataaagcttcatgttgtatttaatttggataaagtgccgggggcactttattaagcccctgccagtaggagacagagagaaagttgccatttcaaacctggaaattatgctgagtttttgtaggatgtgaaatgaagaatccagcccatggtgggataggaggagggaaaaaaactagggtgagtttcactgacttaagtaattgacagataccatttatgaatggtcaaatggtcattagccctggtctttgacttcatgcagctatggcaggaaggttatttcacaaaccttgaagttgatattttaaggatatttgtgtgtgtgtgtgtgtatacatatatatacacacacatatatatatacatatatatatatatatatatattttttttttttttttttttttttttttttttcctgagatagggtcttgctctatcccccaggctggagtgtattggcaagagcatagttcactgcagtctcaaaatcctaggctcaagggattctcctgcctcagcctcctgagcagctaggactacacgcacataccaccatgcctggctaatttttaagttgcttttttttttttttgtatagagacagaaccttatgttccccagggtggtcttgaactcctggcctctgatccttctgcctcggcaccccaaagtgctatcattacaggtgtgagccattgcaccttgggcaggatttattatttttcaaacagttcaaggtatccttttaaaaacagctttttaaggtataattgacttataataaattatacatattcaaagtatacagcttgatacgttttgacttatatgtatacacccataaaaccatcaccacaatcaagatgataaatttgtcaccctcaaaagttttctcatgcccctttgtaatccttccctcccactccttctactcctgtccctcagcaaccagtgatctgctttctgtcgctgtggttttcattttctagaattttatataaatggaatcatacaatataatttctttgactgtctgctttcacttggcataattattttgagattcatccattgttgtagtgtcagtagttttcaagaaaatctctttattcgcttaagaatgccattgtcactttgaaccaagttattagtaaaagaagagcaaatccaagatgcagtctgatttgggacttttaatctttggcattttcgcctagctgattttttttttaaacccacaaggcattgtaaacattccagaatgaggacactttttcttatgtgtatctgtgcagtgactgcttcatagttacctctatgaaattaaagattatttgttacttaaatttattcctgatttcctgatgtattttgttatttttttctcaaagaaggagttatattattctgctttttacacacattggtatggcactttaattttagcttaactttttgggcattttgctttaaccttcattttactttatgttcatgagtgagtatatttcagcaatttacttaagatgccttcaccagtattgaagaattggaatggaagtatttacaatttgctgagaagtgggaaagtcatgttttagatttttcataatatttgaactttaggttacccaaatttactggtctgtctctttaataaaaatcatctgtttacacttttcctgattaaaggagtggtggtatttaatgtaatctatttctttctttcttttcttttttttttttttttgagatggagtctcactctgttgcagcacagtggcacgatctcagctcactgcaacctcggcctcccgggtttaagcaattctcctgcctcagcctcccgagtagctgggatttacaggcatgaaccaccacacccgactaatttttgtattgttagtagagacggggtttcaccatgttggccaggctggtcttgaactcctgacctcaggtgatttgcccgcctcggcctcccaaagtgctggcattacaggcgtgagccactgcgcctggctatctatttctttaaaaccttggagcgtagaggttggtagcttctccaagatgcagagttattatttccatgtgaagtaaatatggacttacccattttacaaattacagtttttttaattttttaaaatgtatccaactgatataatttcttttaacaatttaacaattactctgtgcctgctgttagcaagtaagatactgtgcagatacaacgatgaatagagacagccttataattttaataacagtagaaataatagaactgcagctgccattttatccagtactcatgtgccgagcattgtgctatatactttacatatactattttaaaatgcttacaacaactgtgaggtaggtgatactacccttgtattatagttggtgaaactgaagtgcaaagttgcttagaaccttgcacaatattgtataacttacgagtgacaaaaccaggttttggagccagttctgactcaaaagctcatattcctttggctgtgttatgtttcttcaagaagtagtaggcagtagaatggggtgggagaagcacacagattatataatagatgacattacagaacacaatgtggttgctgtaagcaaagcataaacaacatagcttgtggaagaaattttcaatctggattatggggaaggtatcacaaaggaagtgttatttgaagtgggccttgacagtgtaatatcaaaggaggcaaacattcatttgggagggtatattttagggagagctaaaataatatgcaaactgagggtgattttcagaggatggcaggcagtctgatactgttaaatgggccatggtgtattggaagtagcatttagaaggtcagattagatataaatgatagctaaatttgtatctctcaaagtatacctaaaaggttgagtctgtaggatttactaagtggataatcagatttgtatttatggtattcagtgatagttttgattcttaatttgaggttgtaagaaaaggagctctgagttggatgcttgattagttaatgtaagccccatcactatcttggaaactccatgaaggcaggtatctatcttgatttgccagtacatccccagcatctagcaagaagtactcatgccaagtacaaaatggaaactcaagagcaaggaagataaagaaatgttagaagaagagttaagagaaatcaaagaagccgacttctaaaaaattttacctagaactctcctggtgcttttcatgacagttgattttcctaccagtatagattgtagttacttgccagagagtaatgtgatatattaacaattgtctatgtgcagtcattgacttctccaacaatctatagctcagcaaaacctcccttccaggcttctgttatgagcatatttgcaacactgcaataaaaaggagataagcctggatttataggctttagattcagttagattaacaaagagatagcatttaagcctcccagaattgttatcgtttctgtctcagggtgcttgaactgttaatatttataactctcttagctaggtattagaaaatggtaataagggaatggagtttttatttgttggctaagaaatgggctgctgtgtaggtaagaaacttgttttgtagaggagggggatagtatagtggagagtagaaaagattaaggagaagggtaccaagggctaactccctctgaaagtttttctagagctatcagattgatccctccactacctctctactctcataatattttaactcttattcctaccaaattaattgaaaattgtacttccatattcctctttcctctagactgaaagtttctcaaatgcaaggagagttttcttcatctttgtgtctgtgtatagttgatgtttaaatattccttgtactaaactgagctaggcgctgttgtaggtgttaacccaaagataagttccttgccctcatggagctcatattctacttgtaatgacagaagcatggctattacagatttccttggatttttctagtgttctttttcctctcctcgcagacagcatggtaaagttgaatgtgagtgaagaaatggaaccctctcagataaaaattttgcatgggacaagggaagaaactttctctcttcttatttcctataccagatccacctttactccaggactctgaactttggctagttacacatttccccacaagaattaccaaatttttctgagcatgacattcttgaaacttcatttatgaacaaaattatgaaaaatgcaattttcctctatgcaccattagcttatttggataaccacatagttactcttatttaccactggatgaggtttcagtgaccataaggtgaagccattggtggagttttaaaaatgggtcatcaatctgagtagtttcagtatactgtacttgtccttaagctgatacaattggagctgtttatatagatcaactacattgtgggacaaataaattttgatgaattaggctgagaagctgaatatcagtaagtacattttttaaaattaaaagctttctgaagagaaatatggaattactaggttgcatcattctcatcagtgttcaaagtaaggatttttttactcttttaatggctgcccttcaatcacagccctaagggctgaattaaatgtttcttccacttttaatccctttggtggagttagatatgttaatacctatgtttaggatatttgtgtaggtgtgttgatatttcaagagcagtactctattataaaaattgttaatagtgactagttttggggtgacagtagtgttacagagagtaatttgagcactttattttctactgtttcaagaagtgtttcagaactatttttaacagtgtgaaaccactttgtttttcagtattcttgccatgagaaaaagaatgtgataagttattcaacttatgaaattcaagttacatgtgaattctgccaggtatgtgtgcaatatttggtatttttagccattttttacattttgggttgtaaaaatctttatagcttgtttctattaggtaagtatttgtggtgtttttttccatacaaaacaagtcacttacttagtatgtagtttagctgatactcctattttgtttttaaataatcaaattaaaagcatctaagtacacttagctatgacagacataaacatgttttaaggttttgatttcctctaaaatgagttctatcagtcccatgggatgttctgtgaaaaagtattcaaatagcaaatagctttggcaaaaatgccatactctgggtgctcccctagtcattttacattagcatattaaagactgtgaagagtcctgccaaaaaaaaaaaaaaaaaacaaagaaagaaagaaaagtatattttagcatttcccggatttgtttggccacacctttttttctttagtgtctactgacatccccgttgaaatgttttggggagcattgctattgaagggttaacaagctactatttgaaaaagaaacagtgttacagaattattagttgagtcaaatatatttgctatatagaatttctagaaagaaaacaagttgatggatgggataattaattgagaacttttaaatcgaaatttaaaagtaggaaagtaatcctgactcagagatgtctttttgcatttgttttgttcaaatcaggatccaaaaaggtccttaatttggttgtatgtttattaaatttcttctaatggaaaacagcaaccctcttcctttgctcttcttttcatctccatgacatttacttgttgaggagaccaggtcatttgttctaacttacagtgattcatcttagtgttttttgactttacgatggtgggaaagtaatacagtcagtatactgctcaattcatggtggggttatgtcccaata

SEQ ID NO: 663 - DNA, 19905 bp, Homo sapiens
  source 1..19905: mol_type = other DNA
gggcaccttccctgcgaaaaggcgggcggagccgaaaaccaaacaaacgacttctgagagattgggggcgggactgacggcggccggcttagcttccagagccaaggccttccgccgagttggtttttgggttgttgatcgcggtggccgggcggtctgcggtcgggctgagacacgcggagcaatggcgacctttgtgagcgagctggaggcggccaagaagaacttaagcgaggccctgggggacaacgtgaaacagtaagagctgccctagcacagcgtccaggccaacacgcgggtgctctcctggcctcgggctgccagcccgccccggagacgcccgcgtcgcccgggggcctgtgcagcctggagtccgcggcggcggggcttcggggtttctccggccggggcggggcgggccacctgaactcaccgccctggagagaccgggcctcctgggcgcccgggagacatcggcgggcgccgttgctcgggactgtctgccctgggtggggcgggagaagcgcacttcgcacccaagggcctgctgagcaggtgcgggccccagcgcgggcgtgcgggatgcgggaggctgacttgggcggagtgagccggagccctacgcgtccagccagagggcatagcgcagggcggcccgcccctggagggcttcctggaggtggaggcctgttgagctggtgtgatctgctacggattattggtaagctcttttgacagcaatttcgtaaggcagacggaccctctggtgaaatcacagtcattgaacactacaattatagtgatgatagcagtagcggacattttaaacattttaagctctctaaatatattatctaatccttacaacagatgtgagataggtacagttgttattcccatttgacagatgagaagactgagacctagtgcggacaagtaactcttcaaaagtcactgtcagagttgggacccacgcttttgattcccgactgatgcattagaggggctgtaaaggatcccagagacgctcagccagaccttcatccaggttatggcaggggacctagtgcacagtcaggttaggtgcagaatggccaagggtaaaatcagtatccagtcaaagccaaagccaaagagcaaaaaaggaacctctgggatacaaggaagagtttggaaattttcaaaacgttgttattacaactttatttttcaaaaatataggaagcaaatataaacgtttaaaattacagtgcctgtgttgttgctgctagatggcttctctggtattctacacatttgcattactcagtggatgcatacttttaaatgatgttggtggaggagcaatttgggaatacttaatttttctccaatactttcttttcatccttctctgttctttattattactggattgaaattacttaggttggatgtcatacatgaattttggagtttttccttcatgtgaaattttggggtggcagagttgacagtctacttttcatcctaacaagataataatggaaactataaaaagattaaaattaaaatctaaactgttattttagcataattatttaatttttggtgaacatttatttacgcccagagatatgtttcactttgtgtttgggggttggggtcttgctctgtggcagaggccgaagtacagtggcctgatcacacagttcacagcaaccttgatctcctgagctcaagagatcctcccctgctgtgagcctataactgggactgtaggcacgccccgctaatcctggctaaagttttttttttcagagacaaagtcttgctgtgttgcccaggctgatctcaaatcctggcctcaagcagtcctcccgcattggcctcccaaagttctgggattacaggcatgagccaccacacccgactatagtgtaccaccgaaaattgtctttcgatattgatgttcactgtgcttattgaattaaatattcttacttattttaataggtaaaattgacagctttcaccctaattactgtagctttttacttttgtaataccgactgataaaatttaccttttttttttttgagatggagtcttgctctgtcgtccaggctggggtgcagtggcatgatctccgctcactgcagcctccacctcctgggttcaagcacttctctgcctcagcctcctgagtagctgggattacaggcacctgccaccacgcccggctaatttttgtatttttagtagagatggggtttcaccatcttggccaggctggtcttgaactcctgacctcgtgagccacccgccttggcctcccaaagtgctgggattaccgacgtgagccaccgcgcccagccaaaatttacatttttaagcacataaggggcatttcactctgttccatctagaatgcttacaaatatttgaaagcaaacgtttacataccaaaataaatctgaaggacctggcttgtgtatgattgcctttaaccctgattagatgcaatggtgacctctgtcatcccatactcatcagttacaggttcagggctgccaaaagtgtttttgaagttagcattccttatttagtttttaaaggccaaagccgactgtctgatgttggtcaaatactgatgctgaagctaaatttggtgcatctggagtgtgaatccccactaaaatgcaatcaaaagagatttttatgccagaaacagttaatggtaacgtatagttctaaatttgtttttccattctctcattgttcttttcccttctccttaaaaagtacctctgggttaaatagtcagtaatactcttgtactgtacagtcatttcttatatttcctccatgagcagtttgctttggtttgcacaacctatttaagtgtggtcctcggtggtaggcaaaacatacagggttatgcacggaggctggatatgagttatttgctatttatccagtggtctgaacatccttcatgtctgactggttgggttgtgtgcccaagctgcttccaggaagacatgggctttgctaggcaactcactttgtatagtagccagtagaatgccatgttcaaataggtgcctgatttcttttgaggatttgatcatatgttatttatttatgcatttatttatttattttgagagagagtctcactttgtcacccaggctggagtgcagtggtgcgatctcggctcactgcaacctccacctcctgggctcaagtgattgtcctgcatcagcctcctgagtagctgcgattacaggcgcccaccaccatgtccgactcatttttgtatttttagtagagacggggtttcgccatgttggccaggctggtcttgaactcctgacctcaagtgatccacatcccccttgggctcccaaaatgccaggcttacaagcgtgagtcactgcgtccggccatgatcatatgttatttaatattctttaggtatatccagtgcttcgtaatctgacccacttatacttctacccattgtcctgaccttcacagggattgattggctttgtttttggtatttgtccttagtctgtgttgctataaaggaatagttgaggctgggtaatttataaagaagttagtttggctcacaggtctgcagactgtaccaaaagcatggcaccagcatcttctggtgagggcctcaggtggcttcactcatggtggaaggtgaagggaacctgcatgtgcagatcactttggtttttttttttggagacagagttttgctcttgttgcccaggctggagtgcaatggcactatctcggctcactgcaacctctgcctcctgggttcaagcgattctcccgtctcagtctcccaggtagctgggattacaggtgcgttccaccacacctggctaatttttgtatttttagtagagacagggtttcatcatattggtcaggctggtctcaaactcctgacctcaggtgatccgcccgccttggcctgctaaagtcctgagattataggcatgagccaccgcgcccggcctgcagatcactttgtgaaaggaaacaagaaatggggaaggtgccaggctctttttaaacaaccagctcttggagaatctcttgcaggaactcacagagtgagcgagctctcactcattaccaccaggaaagataacaccaaaccattggtgaggaatcctctcccataacccaaacacctcccattaggctccacctccaccattgaggattaaatgtcatcatgaggtttggtcaaatatccaaactatagcagtattgttgagggaaacagtcatttgtctgtggctatacagtgagttaacagagggaccaggattggagagcaagtcttttaactcttggtagctagttctagctctttgggctaaaagttttgccactggagaaaatagtttgcgttattttgacagagcttcctggtagagccttgttttagttctggaacaagttcactctttccaaatatacatttgcttcttataaaatactgacataggacttttaaataatagagtttttctccaggttactatttttttattttattttttttgttgttgttggatagaatgggataggaaaagacctttggttttctgtggagctttattttatttctttcattattattcctgtcctttaaaaaaatgtataaaagtgtccactgttggaaagttactgttgacctattgactaatgaatgtgcagctatcaagtggaaagggtaccaagctctagagctgcatgtgttctgttgttaagtgaaatgggcctgaaagatggcagtgtcgtgggttttgggccacttaagaccccataaaggctatgggttttctcctgaaaaacaacaacaacaacaacaacaaacatcaacccaaagctttgcatgcaactacatatgatcatagtcaattacatatagagatactaagatgacttgaagctaatccacacacagagggagatctgccatgggcattatatggcagtgaaaatattaaatcatcccgttgagaaatctgatttttttttcctgttaggaactcaagtattgagtaatttttcatcccattccataataagaagcagcttccttaagtaccaaaaccagggttgtggatgtggtgtgataagtgacattatttcactctaattcctaacactgttgttaaagtgtaaaaggttaagtcattttttttctaccagttaccaagtaatttttattattaggtgttgattttcactttaaaaactacagatatccccaggcattttctttgtgctgagatgtttagaaacccatttttttttcagccagttagattgaaagttgagtttatctgaagggaaggatgtcacctaaaacaaatataaatgactactcccctctccgttaaacacacacagtttaaaatataaatcttaaatgcaggattctggagagtaggtctattagaaaggtgacagtgagaaacaagggtatagctataatagttttgggctaagtgaatcatgagtccaattctgtgactacctgccaattcccttttatttgttttgagacaaggtcttgctctgtcacccaggctggagtgtagtggtgtgatcatggctcgccgcagccctgacctcctgggctcaatcagtccctccacttcagcctcccaggtagcagggactacaggcatgcaccaacatgcacagctaagttttgtattttttgtagagagggaggtcctgccatgttgcccaggctaatctcgaactcctgggttcaagcggtctgcctgccttgacctcccaaagtgctgggactacaggcatgagccaccgtaccggcgagtccccttttagggaggattttcctttctttgttggtattctgattcctaggtgtattagtttgctagggctgccataacaaagtaccacagactggttcgcttaaacaacagaaatttattttctcacagttctgaaggctggaagtctgtgatcaagatgttggcaagaggcctctctcctatagatgacagccttcttgttgtgtgttcacatggttatttctttgtgaatgtatctgtgtcctaattgcctcttcttataaggacaccaatcatactggattagggcccaccctaatggcctcatcttaattactatttaaaggcccaatctccaaatagagtcatattctgaagtactagggttaaggctttaacacaggacttttgtggggggacacaattcagcccatagagccagggaatgcaaaatttcctttcctcggagttggagcatgtatgctgaacttggggaagaagcaaaatgtgttcatgctgtagtcccagctactcagggggctgaggtgggagggtagcttaaagccagaagttcagagctctgattgttcccctgcactccagcctgagtgacagaataaaaaaccccgtctctttaaaaaaacaaaacaaacaaaaaaaactagaagcagccaaatctgtggttcttagtattgtttctgcctctgcagatactgggctaacctaaagctgtggttcaagcagaagatcagcaaagaggagtttgaccttgaagctcatagacttctcacacaggataatggtaaaataattatctgcagagttattttactattctgtagttttcctagatttgtagtaaagtcttttccctttttaaaaagtaaaattttggttttgtggtgtataaggttatcttaataatgtggatactttaagtataaagcatggcagaataggggatatccaaaatcttgagaagctagaccaaagttgtggtttccttatgttgaaaatgttttgaatttgattgtcactatctttcctttttcagtccattctcacaatgatttcctcctggccattctcacgcgttgtcagattttggtttctacaccaggtaagggagtggaaatacttccagtgtgtgtaagtcagcaaagcactagactttagctttctctaatagacacagctagtgtttgtaaagcagatgtttttgaactactcagaagaaaagttttattaggtagatacaaattcttttacagaatctttttttttttttaaagcagaaactctttatttttaagaaaaaggtatgatttctcattttcagttcttggcatacattttaattctttccagtggaacccaaacctcctgaacccctttcagtgtcatccaaagcttgaatttctgtttctggagaaaaagtctgttcacaaatgagctatgcaatttgatcaccatttttgacaccaaacttttctttgccaaaattgaattgtacaacaccaacacttcctctataatcttcatcttatgatgccagctcctacatcagtaaagtgtttttcagccaagccagatgtggcactactcttttctaacacccagaaggaaggactgtctgaatgtttgttttcacaagtgctttctccctaggtggtattgtgtaatcctaggcatgtccaagtcctagcccccgtggaccccttggtccgggcgtgttatgctgggagagctgggcaaggctgctctgtgtgccaccctcccccgcaggccagtttgctcaatgggggaaatagtggtgtccctcagaatagggcttgagagagccagaaggcaagcaaggagatagcccgggaacaagagggcgcagggtgagcaccacagcagggactgcccaaatctacggagccttgtaaagcaggttatgtccctgtacttatattaccttttgatattgagtccccactcagctacattttagattacttaagtaaatgagaagtgaggaagagggtgggagatcaggatgaagaaggtaagggagatgaagagagggcagttggtgttaggtgtcctgtacctaagggatacctaacttgaaaggtgtccgtagtggggaggtgggggaacccagcatatgttgggaacctggacttccactatgttcttaggtaagatagcacctgaaaggtcaagcttcagcacctgtgtttcacagattattggtagataacaagaggtaggggatagtagcatgttgagggggtaggtggaaacgaaacctgtcactttaacctgaagagaagattaagctgtaagtcacctctctcaaccatcttattttaatcagtcaaaaacaagtaattaaatacattgaaaactttcctcatgataaaagtcatactggactttttaaaaaaaattaggccaaatgatttattcagtagtttttatatttctaaattgcaatttatatctattcataagactacaaaagttaccattacaattgtgcttaccaactcctgttgtagattaaattgaaatttttttaagggcttagggtgattctgatgatcatatatcgaaagctcatgttttatctataaatggctggtattttttaatcctctctctctgtttacttctactgtatgataaagaactcaagccagggcgtggtggctcacgcctgtattcccagcactttgggaggctgaggcgggcgggtcacttgaggtcaggagttcgagaccagcccggccaacatggtgaaacccctactctactaataatacaaaaaagaaaattagccgggcgtggtggcgcacatctgtagtcccagctactcaggaggctgaggcatgagaatcgcttgaacctgggaggtagaggttacattgtgccacggcacttcagcctgggcgacagagtgaaactgtgtttaaaaaaaaaaaaaaaaaattcacataagatctcctaacacctcgttctttgaccctcaaagaagtcgttgttaatgtgtagtaaactgtgagcacctgcttgtggggttgttttagagagcagtgactgcctccctcccctcaccacactcatcaccgcacattcttacactgtgtcagatttttgatgtgctatttaatttatatacaagtagactttagccattcctcttttatgtccaaagttaaatcataatctattttgttacataaaatttaatttgatcagaaaagccaatattgtgaatcttactttttagggaagcatattgtaaattgccacatatgccaaagataaatggagtgatcagaagtaaaaaccctggttgataagagtcaagagacttaggttcaagtgtaggttttgccactagcttacataatatagttacttgggctttcaaatttataaaataagtacagcaatatctaccccgtaggattatgaaaaaacagatgaaagaacttataaaaaagtgattttaaaaataaaaaatgccagccagacacagtggctcatgtctgtaatcccagcgctttgggaggccaaggtgggtggatcacctgaagtcaggagttcaagaccagcctggccaacatggtgaaaccccgtcactactaaaagtacaaaaattagccaggcatggtggtaggcacctgtaatcctgggtactagggaggctgaggcaggagaattgcttgaacctgggaggcgaaggttgcagtgagccgagattgcgccactgcactccagcctgggtgacagactaataccctgtctcaaaaaaaaaaaataaaaataaaaaaaattgccaaacaaatgttgaagtggtattcgtaagtacaggtggctgattttaattagataaaaacctttgatattctgaatggttgttaatagttattttaaaataaatgaagaagcatttggattttgagaatgtattcttccattgaacaccccaaatttctcaaaatgaaattaatatttgttagcaacaaagagaagatttctattacaagtaaaatatagttgtttgtacctcacaattttggatgggttgttttctagttttctaagctagtcaggaaagatgatattaataataatatttgttgagtatagcatactagacactttatatgcattatctttaatcctcacaacaattctgcatggtaggtgttagcctgtttttatagataaggaaacaaaattaagagaagagaaaacaaaacaaaagaaaaacttgccttaggccttatccagctagtaattggatgtgttggatcaaaactgaaatctaagtgctactaaaaagccttccattttgtcagggttaggccttagcgtgcttcgcttggccacgcagcagcagctggtaagctgtgagtttgcaggcctgctcctttgcatcatcgtctgcatgtccagcctactttcctgtcatcacttggcatccagtttcatttatcaggaagggatttcttgggaaaatcatctaagattggctgaccttatcaagtgagatctgtgcatgccaaagataagaggaacctgacttcccaaacagttctttttaaactgaggaatctggaatattttttttttcaaagcgttaaaaacgtttctttccaaaaatatcaaaattgtaggaacattttactatgattatgggtgattttttctttcttaaaaatttttttgagttttcttttttttttggaggcggagtctcactctgtcgcccatgctggagtgcagtggtgctttctcggctcactgcaagctccgcctcccaggttcacgccattctcctgcttcagcctcccgagtagctgggactacaggtgcccaccaccacgcccggctaatattttttttttgtatttttagtagagacagggtttcaccatgttagccaggatggtcttgatctcctgacctcgtgatctgcccgcctcggcctcccaaagtgtcgggattacaggcttgagccaccgcacccggccttgagttttctttttaagtgtactgtagtgaggttgtgttacttttttttttttttaacattaaacaatatatgttcatggttaaaaaaatatcagtagcacagaaggttttatgataaaagcttgttcccacccctagacctattcccaaaggcaactactttttgttttttgttcttctggtgggacctctttagccctcatagttgcttaaatctgtttctggattaactgattttaacatctctgtcttattgctctgtgtttgagatttcctgaactctttgggcctttctgttgaatgcattctttaattcagcaattttaatagcatcttgtttcatggatgaacatgttctgaaagttttctgcggatacctgttggaaatttatcagaattcttttgcatttcctgtctaggacctctttttttttatttttatttttttagcttgctctttcttgtcatgtgaaagaatattgtcaaatatctggtgattaattattgtccttttcatgtttaagaatgaagcataaaactgcctggagactttgctttagagtaagctgacaggaagcctactgttaaactgggggtctcccaaattcccatatacagagagctttgctgtagggtaccaacatccataccagctaccttagtaaatcccagaaattgtgttcggtttaactagagaagagtccttattccctccccaccttccttctaaccccctgacttagctattataaataccctgctctgtgtcattctgtgcatgggaatgagccttcctgggcctgtgacctgcattgcacagaagggccctgcacttggtttgtaccatcattatcttgaaattcttaatttttaaacacgaggcccagcactttgattttgtactgaacccagttttgggggtgagtgaatgggtttgtgtggatgatttaaggatatagacattccattaattttgtttttagccttacagatccctcctggtttccactcactcacattctcccaatccaggttgtgggtttcttccaggcaggttgacgtgcttctgcctcacttgccaccttccttgcctagcctaggttacagcttctatgggtctgcttcacgagtctgcacccttttagtccatcctagaaatttgttgacatctcatcgtgtctgccactcattttcctttttaacctctgttgtgcaagtgtgccatttaccttccttactttcatattttgtagcgtcttgggagaggagataaatacatgtgctcagttcatcatcttagaccagcaaattctgtcctacatctataataatactactgctaataaacaaaacacccaataaacattaattgaaaatataaaaaaatttgtcttcctaaaaaaattttagttgcagctaggaaaaaaatgtgatttgagaggatcgataattttatttagagaagtagaaagagaaggttttgatttaagcattcattagttatttgcatttcatgagcattccatgctttttaccccaaatgaaaacaaacttagcagttatcagttgtcattatttttacttatggttatatatttctgtctcctagatggtgctggatctttgccttggccagggggttccgcagcaaaacctggaaaacccaagggaaagaaaaagctttcttctgttcgtcagaaatttgatgtaggttgttctttaataggtcttgataatgactgattgaagtagtggcatgttgggactagctttagtttttaaatgaatattaaaatactggtagtagagttgaaaaaaaggagtatgatttgggaagaaaagcgtttcaaggattgtgagttctaggtgtctgaatttttatagttcttgtttgttactgcttaaatagtaatgttatcattagtacctaatgatttttcagttattcaaaacaatgcttttgtctctcctgttaagtatttttcttgaatgaataatgtttcttggatgaagacatctgtctcaagggctcaggcagcctggaggcctttaatggggtcctggtgatgtccagctgggccctgagccttttgaggactagtagagatgtcatgaaggcatttggctataaaatttgtaagcattttaaaacaaattgcttttttcagtgtatatttagggaaaaaaacttccccgaagtaacccttttataggtttatggggtattgatagctttattgattaacatcaataaacaattatttattttcaccttgactatatgctttatatcagtaagaatgtagaggccattgggatctctagagagacatgtctgatttaaaaagagatgttcaatataaagtagttttatacttggaaaatggaaaaataaccatgttgttttcataatatcaatttcaaacagggacaaaccatcttcactacaaaatcttttatattagccttaagcaaaaggtactggggcataactccaggtggtgatggagaacatgaatgggctatcagaatctccctgaggaaggctgagattttatgaatgaaaaagactgagaaaaatagtcatgactgtatcttaggttctgtgttgagaattctaagtagaaaataacagcaattaagtagttactctacatagcattatcttggaatatttgttactagatctgccatattggttagctaggctttttaagatttaattgaatcattcattatatgtttatacttttagaacctacttacggttagatttaaaatgctctgatttgtttgaatatagttcaatacttctccttctctttcagttatttttaacacagtgccatacattctgtgatcaccaaggtattaattgaatagaataaactactacgcaaactaccattattccccttaatccatgtcttcattattaccttgtattggatgtgaatctgtgattatttgtgcatgaattaactcttttttcccttaacccctgtggtatagttttggtggcattaatttggaggatctcaacttcagtacaggagtttactttgtgtcttgtttgctactgtaatgagtaattttaaaaagtttttcttactcatagcatagattccagcctcaaaatcctctctcaggagcccagcaatttgtggcaaaggatccccaagatgatgacgacttgaaactttgttcccacacaatgatgcttcccactcgaggccagcttgaagggagaatgatagtgactgcttatgagcatgggctggacaatgtcaccgaggaggctgtttcagctgttgtctatgctgtggaggttggtttgctgttggcagaaataatcttacaggttgaatgtgataggcttgtgtgttgtttaaagtcggtattgcaagaaaagaatccaaatgtcactctgatttcacagaattgtcattgttgaagttgttttctgttttttttgagacagcatcactttgtctcccaggctggagtgcagtggcacgatcatggctcactgcaacctggaaatcctgggctcaagcgatcctcctgcctcagcctctcaagagctgggagtatagacgtgcgccaccatactcagctaatttaaaaaaaaaaaattttttagggatgggggtctctctctcttgcctaactggtctcgaattcatgggctcaagtgatcttcccgccttggcctcccaaggtgctgggatttacatgtgtgagccatagcacctggctaaaagttgttttcttttaagaggagaaactcattataatccaaatagttgtcttcagttaatagactaagcttttcagaaaggttatttatggcataactcttctggttgatctgatgttttgtcaacaggggaatggtttttaaggaaagaaatgaaattgagaatcctatagattaaagtcacttgtttttgctgtgatacagcactgaagagtattagtcttggcatctgaacagcagaattcttgtctctgctcatgatttcatttgtccattcattttattcatttagttacttgacaaaactaatttgatggggtctataatgcacgagtatggtcaggtgacattggattttcaattctctgagccctattttcttcatctgtacttcaaaaataataacagttgtcccatgaagttataaacattaaatgaattctgcgtgcaaaccaatttaaatagtacaataatgtcttgatataagtggattttccttggtataattgaaacaccctgcctgatgctggctcccctattaataatggtagcctgggacgagttctgtcactctattttcacaggcttcctcaaccttttcttatatacttggctctcatgaaagtgaagagaaatcaagtacctaatttattttgtgcttatttcctatatatctgttgtttatgtggcttttgagagagccaaggttcttttcacgcaaggattttggttccaataatatcagatcttaaaactttttgtcctattttaaacaaagtttcagcatagtttgtctctttttaaaaagtcatttttgctcatgcctgtaatcccagcactttgggaggctgagatgggcgggtcacctgaggtcagaagttcgagaccagcctggccaacatggtgaaaccttgcctctactaaaaataaaaaattagccaggcttggtggtgggcacctgtaatcccaactacttgggaggctgaggcaggagaattgcttgaaccttggagacagaggttgcagtgagctgagatcgtgctattgcactccagcctgggcaatagagcaagaatccatctaaaaaaaaaagtcatttttgtgtacttcttttaaagccatctaaaactcatttttgagagagaggagccaatttagagatgtaaagacttttcaaatttcatgtatagcaagcccctcttaaagagaactattaatacatgaaaataagcatgtccccctctttcccataccctcctactcctttggtgtggctccgtggctcttcatgtgaacattcatttggttctagcatatactaacctattctgcatctccatctaaatgccaataaatgttttttggtcagtggaagttttatgatttgcttttaaagaggatatcatgctatttttctttttgtatgtttacagaatcaccttaaagatatactgacgtcagttgtgtcaagaaggaaagcttatcggttacgagatggtcattttaaatatgcctttggcagtaacgtgaccccgcagccatacctgaagaatagtgtagtagcttacaacaacttaatagaaaggtaaatgaagtttcttgtgattttctttccatcttttgctagttgtttatactcctcttatagaccattgttaaataattgattgtgttttcataggtttaagtacctttaataggagtacaattttattttttaaagtcctatacttgcctgagatctagtgaattattttggtactccttttatgagaagtgaagttgcagagtttggcttctgcatgcgggtttaatgtgcttgtccccccgccccgactttcttaggtgcagtggagtagtgcataggtggtgcatcctgagggctcccgaggggcatcacctgcccagtggggaagtgagcctgctttcagttagaggcagggcctgtgattgttgggtcacagctgggtgtcttggtggtgggaggaggaggaggagtggtagatgtttctccaggccctcatctggctcttgtaggcatagctcaagatagtggtctgtgcctggtgtcatcacttgcttttggcctcctgctgtgcagacatggtctctcagctcacctctgggattcctgtgtcgtcttcccattgagggcttcaggatgtctctatgtcctgagtcacccctttatgaaacaacctagattactttcatccctgtgttgtctttcttatccttccatctccttttgtcctccacttcccccaaagggaatttagtctgaattttaagcctttgggaaaggaaaaaaaaagtagtaatgtaattttctttatggttactgaagtgacttgaatttcttgtgatttgctggactttgcgtatctggttagtttgggagaagagaggtaaagagataactgggacttgcaagttcagagaaaaaagtatgtatgactgggaagggtggcagggtgattggtgaagtaacaggaagggaaggcaggaggtgtaggtgggaaagctaagagagttggatagagggagtgttgatagcacatgtgggagtttgtgccagtgcccatttcatgactctgaagacctttacaggggtcatgggcctattttaacccatcttaaattgggtttactgtttagattgccatatgtggtgatttattgtctgaatcccattcaggcgtatctgtttgggatcattcttctctagaaaaaaacaaatccccaaaagtggctccttgtagcgggtgatgttgggagcagcttctggccctggcgggactcccaagccctctctgccctgctggccagtctctgagggcttttgcctctctattggccacttgttactctaacagggctgcttttgtctgatgcttcagtcccacgctaacgttccactgtgctttcctctgagttactgctttactcttttgttttacctctagatacgtcctcagcattgtgtaggttatctcctactgggttatgaagtaaaaactatgtctgacttctcagtttgtatctagctctattttgggaaattggcaggttctggattaattttccccactctccatttttgcctgttgcttctgtgctatgtcttcttttcttctaatttattttagaaccagttgtttccagtaccattcacctccctctttatttgttttgaatgttatattcctgtagttaaggtctgttagttttttcaactggaagttcagtatcctgagctaggtaaatattttaacattgtggaagaaggagggtaaatatagttgtattatgttttatttccagcctttaaaaattaaaattacagattattcatgtctacaggagtagacattgaatggatttctaattcaattaaagattttttaaataagattctagcaggccactcctgtccttgttgctcagttgtctctgtgctgggactatttctgaaatttttattttcagccctccagcttttactgctccctgtgctggtcagaatccagcttctcacccaccccctgatgatgctgagcagcaggctgcactcctgctggcatgctccggagacactctacctgcatctttgcctccggtgaacatgtacgatctttttgaagctttgcaggtaagtcttggctccttaaagtttacctaggtttatggataggttaagagattctttaagtctacaaaggtattcactggttttttccacttcttggctttgtgtttttcagttttgtctgttataaaagccgttattaatactagcctcatttttcaaatcctgagcccatcttctatctccccaataaagaaagaaaagaaaaaaaatcccttgttctgctattcctgtttcagaagcttgttatttccttattattatccaattggtgattcattttagtgtatgactgaaagtttatagattgtgtgtatgttttgttgatataaacccttttatatgtcagaaaaataagtctactcaagtataattggacatgcgttaattttttaatcccaggtgcacagggaagtcatccctacacatactgtctatgctcttaacattgaaaggatcatcacgaaactctggcatccaaatcatgaagagctgcagcaagacaaagttcaccgccagcgcttggcagccaaggaggggcttttgctgtgctaaattaggatttgagggtgtgggaccctcaccgaattcattgattactgaaaattgaatgttttttgggtccacatttcaaggctgaagtgtatagtgtatatataacctttcctatggaaatgtgacattgagtacattttgtgttgctgttgtgaagccattaatataaatctttggtaatgacccatatctctatatgtatgtgttcccagttgtgggagcaggcactaatgaaatcctgtgcctggaatggagatatttaggtacctgaggcttagtgtcctgtggtctgcatgtaagatagatgacatcctagaacaaagaagctgttttaacttaatccccctgatcagcaggatatctgtgtgttcagtgacatcatacattctgtatctagaagtctaaaatttctgcctttctcctaaagaatgtgttcttgcattttggttgaaataacctacacagtgttaaaaatcagatacctcctttagtgaccagttcaaattttaatagcgataggtagcccctgagaaatttatcactataactccacaggaaatatgacttggaagtgctctgtgtactaaacaaaataaagcccctctttgcatttaaaaccaaagtcaaaacaaaactcttgtaatgcaattaattaactttatgtcttcccatgactcaagttttgttaaatatgcccaaaaactttgattggcagtttcttcggttaattattcctatagaatgtattttaagaaatctatacaaattggatatatgcttggtaattctccagtttctaggaggtacctatttctaccgtttcaagtgatgaagtgaaaataatttacattcgatagtgttactgataacaaacctacttaagagatatgttgctttttacttaagggatagtgttgatagataaattagaatgtatagataggtttgtgaaagtctaaataatggttgtatagatatgtatatatggttcacatatctggatctgtgtatttgattttgtactttaaatgtgacaaataaaccttttgggaga

SEQ ID NO: 664 - DNA, 32744 bp, Homo sapiens
  source 1..32744: mol_type = other DNA
ggcggccgcagcctcggctacagcttcggcggcgaaggtcagcgccgacggcagccggcacctgacggcgtgaccgacccgagccggtaaccgcgccttcccccggggccgcgagggcgggcggggggcgggcggcaggcggggggcgccgcgtccccacccccggccgcgactgcccttcctgcgccgagctccgacagagccgtgcgcctccgagaggctgtttttgtgtgcggggaccgccgccggagtgcgcggaaaacgggagttgcatcccggaggcgcagcgacgctggggagttggggcttgggggtggggagggcgggaagcgacggggagacgcggagtccccgggagagaaaggaggcgctccagcgccttgcgagagctcaggagacgagtcccggagcgcgaggcgggcggaggctgcagcccgcggcgcgggcgagaggtgagcgccgaggcgcggccgggggtgcgggcgcggcccccgccccgaggagcgagtgcccattgcccagcccggtgcggggtcggcggagaccgaggctctaacccctcgggggcagcgcggcagagccgagaaggtgaatcctgggaaggtgcattctttaatggaagcgcggagcggctgcagcggagagtgggagccgggcgaggggaggcaggactcgggaagtgctgggggtgtgtgaaggtgaagcggggtgtcggggcggccggcgagctgcagcgcggggcggggaaggggagccgcggcccggcgggtggcccgggcccgtgtcagccccgggggtggggggcgaggggcgccgagcaccgcgggcggacgggaaggagctgcggcgggcggggcgggcggcgcgctggggccgagcaggccgggccgtggtgggggcggggagccgggggccgggccccggcggcgccgagccgggctcgcccctgactgaactttctgggtgcgggcgtgtatgcaggaggcgcgctggggccggggccgggggcgggaggcggaccgggaggttccgggttggctcgccagcgcccccttttctcgcccccttctctccgcccctgaagggacaggccctcggggccccaggcgggaagcgggaggggccctgtggccgcctcgcgacggtcacgccccgggcacggggacccggccctctcgggcccctggggggtgctgggggagggggccggggtcgtcgctgccggctgcgctccccgcctcctcccctcgggggagtcccagaggcgcctcttccgagaccgggggtgggtcggtccctggttagatggcccctccctcttcccctccctctagtggtttccggggcctgcgggaccgaggggcgggaatcggggactggagcccccttccgctggcccggagctggactgggcctcccgcgttctgggtccgtcactggtaggggaaactttcccaaaccagagaccgagcctgaacaccttcctccgccacctcgtcctctaatcccactccctctccacctcctccgacgccttcccctcccaccgacccgaatctcggtgcgtctgactgatggggcagtgagccaatcgaaggcagggagctgacctgccgggtgtcggtgagccaatcgtgcggaccggaggaaggaagggggcggggtttctcctgaccagttagagcagagttgcatgcggggcgggggagtcatggagacgctgagagccagctactcttgtccatccccgagtcacccgctccttgatttctggggttgtgtcacttataggggctccgacccgcagaggctgccgaggcactcgaggtcctgtatgtctttcgtaccgaaatagacgttgtcttagacacgacgaagtctaaagccactttaggatgtggcagtaactcaccgaggccggtttctaaaatggcatatgctgtagtgatcatgtcctggacctcagcgtccggtttacatgctaagggtcacagaagacagaagttacccgtttacctcttatctcggtttcactcagctatgccagaatggggacaatgaaatttgaaagggaaccctgagaatgaaggcatgggagcagtatcacgtcaactgattattggtagtagaaagcatcattgttcataatggcttcactggtttcttgtttaattagagctccagttcccaaagtgtacttgaaacttcggcattggggatgtcattaaaaaaaaaagttgtggtttatggtatgcatttttttttctttttgcaaacaaaatgaagttgggaactaaagcatcactgattgaaacattaagtgtgggtatttaaggagcaaagctaatcaaagaatatttgtctacaggaaaaagtctgagtaaaatgtagtttgccagattactcccacacaaaagattcttaaaaataattttaattttcttaaacactgctgaattgtacagtgtgtgggtacttttctggtttatacaaggtttggagacatctttggttttaactgtttattgcgcgttcagtcaagtgactttctcaactcttgacttttaggaacagaggtctttgattctctgtaaagatcacaggttgctctgcaggaatagcagtcttttaaaaagaaagcagctgctacaaagcatgtgtgtgtgcgcgtgtgtgtgtgtgtatgtgtgtgtgtgttcctgttctttgttggtgaggttaggcacactgacagaagtaatgctccctttctcacctggaatttgtagaatctttgggagctcaaagaatgaaaagtgttagattaagaatgaattcattgatttttgtcataagtatcccatgaatttaattttgggagtgttttcttttaggtatcttatgtggaaaatgtgtatcttttctataagtcaagcttttattaatcttgggttgctaagaaagaatcgaaggggactgcagttctagggaacagtatttgccaaatcttacaaatgtgttctgttgtaatatagtgttttcaaatttaccatgagaattcccaattcaggatcattttgggtgcatgtagacaagaattaattgcattttgctgtggctcttgagatgttttttgtaataaaatagtaaaaacagagaaggtaaaccaaacacttagactgacagagaggtaaggagtattaaaaacaacattcaaaatttgacaacattcaaaaccccccaccatttgttaatttagttacttatgggcactctgacatatgcccttctctcttttgtatgctgaagagcaacacattattttacttaattctttgcaacaatccttgaaaatgtggtaagattcttggtggcagagagaaccaagtctcctaatggctggcttggggggaaaaaaacctctcaagcatatggagacatctagaaaaagatgtgcatcgtcagctgtgattccattgtgtgctctcagactggatctgagcttccttcctcctgggaatttcagtcttaaacagaggagttctttgacttttagatgtcagtatactgaagcaggagggtagaaaaggagctcaccaattacggatttattatgttttgagtagttaatatgttttggattttaacccttcattggttaaatataatttagatgagtggcttagtgttagaagagcattttattggaaatataaaatgtaaggcttggagggggatttgggctgtggataaaggggtaatgctccttagttgtctttatttatagttgtatcttattaaagctttccaagcttcagtaacatcaaggatctgtgagcagtccttccattatatgccctgtatttaaggattcagtaccgtagctgtttcaaattacataaggttgaaatgtgacccataagttgacagcttggatttcttaggaaaaattgtttgtgttgtattgagttgaaaagcaattctttaagcactctttaggatattggatagtaaaggaaaatacaaaaggggatggtctctttaaacaatttttctgaaatgcacagcatgtgccctcatttgatattttggccattattgtgtcatgatcgaagttatatttaaaagccaagttaatgcttatttattgttatgaaaaaactgctatttaagaaattactaactttagtattttgcgtatgtagttttgtttagtaatgtatgttattacatgctttattgattttagattaagagaataggagggagaaaataagtcactgctttaaggtattggtcttttattgcagcaaatcataaaatcagcaacaaatcaggatctttttccatagtataagaataagactatagttcataccaaaaatgaaagccatttaagggaaaatggaacaaaaccttcagtttttttgtaccctttcatatttaaggctaattttacctctctatgccttacttttctaaacaaacaaaaaaggttctaagtgtttgtgttctaggtgtttgtgtttttccttttttgtttttaaaggcttctagtagggctttatgaattgcaagctgtaaaaagaatatgtcatattactctctaaagtctattacaagtaatggctggaaaagctatgaaatacaattttaatgttgcagaccttcaattcagacatcataaagaaaacacatctttatggattctagatgctaatttctagatagaggtgatcacgaatgtgacttttgtgggtattttagaagctggtgtagttctcttagctgtggtaaaacattatgaaaaggagtggaaatcttaaggataaactatgaaggcaactgaaattaaaagactaggtggtctgtaggtagatcctaatactgttagcttttagggcaaagattttatgtgtttactctatgaaatgttgatcaatgaccacatttctgggtccccatggctgtgatgacataatgcaattgtggaaatgttgattccaggataattttcagttggttctctggttggaaatttctagagaagaattaaatgacaagggaacctatggtggtgttttacatagctgtttttgaggctttggacacagaatcatataggtagaagttactcgcaactggttaaatgttctaaaggaaaaagaaaacatctttactttgactaggcgtcagctgacagataacgtggagaattgaaattagcctgttaattctggcagaatttatgctttgtaggcagccagttccgaattgtttgagttcccctggccaacttaaatcttactttggtcttgctgttgttgttattattattattattttgagatatggtctcgctctgtcatccaggctggagtgcagtgacatgatcacagctcactgtatagccttgacctcctaggctcaagtgatcctcctgacccagcctcccaagtagttgggactacaggtgtgtgtctccacgcctagctaatttttgatattttttgtagagatgaggcttgcgatgttgccccaggctggacttaaactcctgggctcaggcgatcctctccccttggcttcccaaagtgctgggattaaaagcattagccaccgtacctggccatcattttgggctttttggaccttgtgtttgccttcttgtctgactttactattgcttcattcattttatcgtttagtcgtttgatgagtactgtgtcctggccttttcagtgtactttgatagtataaaccatccattacagagccagtaattaaagggggaacatagagtgggtgatcactttttttggttggggaggtgggaggggacatatatgccttaatttcaatttgctttagtactaaagatctgttctttttgtgtgtatgtaattttaattatataatgtcagcacattgtgctttgatttgggtttgggttgtcttttccctgaaaatggggttgaaatgtttataataaaaaatattgtaaaatgtccccttaactgattagcttacaaccgaatagatttcatgtaatgaaggtatgaatatttataattctttttgttttatttcctctggaatcatgttttgtgctctctgtccttgagtcctgtgtggtgtatggtaaggatggcactctttagttgggcgaaggtgataggcgttgcctgtgtattgttgctgctttaggactactcattttgggccttaactacctaggtttctaaaggatggaatgctcctgagtgcagccttgtgcaagtattctgctatggttgtcagtttttctagatgtagcttgttcttgctctttttttttttttttttcctttttttgagacagggtctcactctgttacccaggttggagtgcagtggtgtgatctcagctcactgcaacctctgcctcccgggttcaagcgattctctcacctaagcctcctgagtagttgggactgccgtcacatgtcaccactcccagataatttttgtattttttggtagagatgaggtttcaccatgttggccaggctggtcctgaactcctgacctcctgcctgcctcagcctcacagagtgctaagattacaggcatgagctattgcacctggcccattcttgctcttgactaaaaggtctgtattagaagagtaacaatgataacataaatgataatagcagctatcattgagtgccaggaacctgatacaggcttttttgatgtgtgcttcattctttaattcttgccacaaccctataaaatagaggttacctccattttccagaaggaggctgaagcttaaagtgagtttaagtcctgtgcctgtgagcaaaactttggcgaggaaaaattaactttgccactaagtgggggaaataaataataaacatcagagggaatggttgaatctgaaaaagtctttcttttaggaatctgataaagcaaatgtttgtgggacattataaggctcagtctacttgttaagtccgtaagaaggatgaatagatttgaatagttccagtcctgcaaattgtatcaggaggcatcttccagactgttgccttaaggagggcttatacctgcacagaggttatttattttaagacccatgaatagtctctagcttttttagtcatcagctcagtttttaactattcttgaaattatagattttttcttttaattttcaggaaataagaattatatgggtgaagtaaaatagttaacatttattgagtgcttactgaaaaccaagtgcagggcaaagatgaccgtacagtactcttgtatgtttcttactgtagcattgagaggtagaaccctgttcttgttagctctcttacccagtgctttattgaagtaacatagatcagtaattctctgctagtgaaaaggaaaagagtagggagtgtattttgcaagagcatattcaggttgcctgttgttctcacaataaaaagctcagaaaataaagctcaagaaaacttgattgtgggggataggtagaacatagattgacagagcactatagaggatataggcttagaaaggatagaatgctgatacaggtatttggcttcttatgcccttaaaacatttaattctagtattgtttaactgttgtgcgcagattgtgtgatgcatgttttgcagatgttttgtaatcatgtagcatggatgactaggtgttgaggtattgtagtcccaaaaagaaggctgataatatattcagtcatctgacttctgctctgctatttgtggaattcttctgtctgctcaattgtttgcacggagcgcggagagctttcagggaactctttcacctgcacatataggatcagcatgcattgcttacagtgttccagctgctgagactgaagacctgttgtcatcgacgagaatataatgcacggtattttctattattcatttagtgtgtccatatgaaatatgacccaaaacctttcaaggcttaacttggagagtgttagttctggtagttcctgttggtgctgactgatctctgcccattgaagtccccgtctaaatgaggattgtctttactagcagatcattcctgcttataaaatcagtacatgatttaaatatgaaacaatttcccttgtctttggtattgtagtagcatttgtcagaatatttaatattaacttatcttaaaatttctaattgtactgttaatatgcttaaaaaggaaaagctttcagttattgtcgaaatgtttttagattcctaaataaggaatacggaaattccgtagtagaattgaatgtcgggagtatatgaatttctacaaatttaacctaatattacagcatttctggaaattacagaagcaggttgtagttatggagacaggcattgggggcttgccggtgcttgaggcggttctgctgtcctgcatctgccatcttgtgccagcagcctgttctggatgtagcatagggtgtgcctggcattaagaccagactccagtagctgaccacttactacgcagtgctttgacatcagggtggaatgataaataatgattcaaacttctgaccacttcactttgggtatgaacctttgcacatctttctcctctacctccttttatctttcttcttccctgactttaattttttcttcaagttgaagattaaatataagtggtagtgaaaagaatacaatcaagattacgggggaagtctgttactatcattaaggatttcatgtatgtagatcatgtctgatcatgatctacagtttcccctttaccaaacagatttactctgccaaaaacacttagtgaagaagtcagctgtttgttaagaaagcagttatgttgtgcctgtgttaagatcgcttaacccaagagtggtgaggtattggctgatttgttgttggagttagttgctggacaacattgtggttcagaagactggggctgagcttctattgtagtaggatcgagtattacattccttagcttttatatctgtattttattttttccctgtttaaggatattgttataaaccctacagtgttagatgtcatgaaaatggtgattaaagccatcaaaatggtgttagctgaaaatattaagacaatttaagattggtgaaaactgtagtcaaattgctaaaacttgaagaatgcctgcctctttggagtttctcaatatattttcaacttccgtaattctattttgagacttattttgtgtggtgttcttgttactgttttaagtaatattaatgttttgattccttaaagctttttcatacaagtgtgatgtaaaaatatttatttcatttcaacatgttattttggccaggcgcggtgactcacgcgtgtaatcccagcactttgggaggccgaggtgggcggatcacctgaggtcaggagttggagaccagcctgaccaacatggagaaaccccatctcagttaaaaatacaaaattagccgggcatggtggcgggcacctgtaatcccagctgcttgggaggctgaggcaggagaattgcttgaacccaggaggcggaggttgtggtgagccaagattgcgccatcgcactccagcctgggcaacaagagtgaaactctgtctcagaaacaaaaacatgttattttattatatttgagcaccactgtactcttttctaaataggcagtacgtcatgaaacctagtgaaggaaatgggaaaccacatgactatcttttccttatactgtgctactttttattttaagcaaagggttgtacaatcaattaacgatcctaatagaatggaatattctaagctattacatgtaataccaaaaaatgacatattcgctgactgaacttactgacagtgaacaacaacaatagaagtcaacaaaatgcctggacgttgaagggcattggaaaacaaaactggagcattatttcctggttaaaggacactcatgcaatcaatagcagcattctcacgatcgtttattatctcatttctagtattaagtattttcactttaagaaaacacatttagcggagaagagaaccaggagacaaggggagcccagattttaggctccagggaagcaaaggcttgggcaggaaggaactgggcctgggcacacctggcctggccctacatgtgggtttcagggtgatctgagactcttgcaggcgtcatgaactgggagtcactaggagaggcctcagctgttccctgcctcctctcactgtgtgtatgggtgggggtggaggatgttgggggccagctgctgacctttggtggggagggaagaagagaggaaaagagggagcctttggtaggtagatagaggatgggacaagtctcagcaggtggaggccctagatgctcacttgcactacaattgtacaattcaggatatcccaccaggagctcatgtatagagagagccgtttaatccgaatccttaattgtggaacagaatggcaatgctgatggcctgtgcccttcaagcaccactaagccccaaagctcttctgccctcatcctctgtgttaccagactgagcatttgggggattgttttccccttcttaggacagaagtgatcttggatctgcacccaagatcagataaagagtaggtagtcctaaggcaagggaaggctttctggggcttgtggttttcagaggctgagttccctgtcttcactgggcttgtgtacctctagggcccttggaaggagtgaggggaggcaatgtcttcccaccgaggggtaaagagagttttccctttcccatctccttcctatttccttttgaggttcaggtatccctgggagcttaatcccacattttctgggactaccacaggttttcatagatgtttactcctttaaggcagtcctctaaccttcaaatcagaaacaataaagaattaaatttttggctttgtcacttcagtaaaattggacatttttcacacctggacttattaaattttcccctgcagaatattttgccactggagtgagaagagggattaatagtatcagtttttagtggatagaggaggaaaaggtaaagaaaaccttggggaaattcagtagttctgaaaaggtaataaaacaaaaccaaatacaaagaaagtataccagggttggcacttaactatttccattgaagaagtgataaaaaaagagaatgaaggcatcacttaagggctgatgtcttaatagataaataatgaaattctacaactatccaaggagcaaagaccttccagttcacacattaatatatacttgtggcaacacttgtaaaaatgttctcaacgttcttcccaaatttctccttttaataataatttcttattttgtgggatgtttttatttgcagaataagtcagaaggctatccatctgtctgtcatttattcattttctgccaccaaccaatgaacgttaaatcgtagaaacactgtgcgactcagatggaaaagtgggcggcgctttgtgcagtgtcctgttgccctcctagctcccctgatcctttaataatgtggtagaatgagaggctaaatactgttatttcagtgtgttcttgttttcagttcctgacaaaaaaacctgctagaaaagtattggggtttagggaggactaaggatttctttggtcccaactttctttatgaaaaatttcctacacacaggttgaaaaatagtacagtgaatccctgtataaattttgctataaatgtttttaatttctcctcctaccctctccacggtgtggttgtgagtatgtatattggataaaccatttcaaagtaaattacagatatgattcttcatccataaagtgcattgtcttaaaatcaaggcattatcttaggtaaccacacacacagtaccattattaaacctaagagaactaatatcatctaatatcagctctatttcagtttttcaagctgtccccaaaatggctgttacagctttgtttttcaaacgaggatctaatcaagtttactcattgcattttgttctctccctttcatctcttttaaggtggaccagttcccgtggtttgttttgtttgtttagactttttagagtctaagccagttgtcctgaagaggatgcaattgttctatcaattttggggtgtcagacttcagtttctccagaactgttaggaaattaagttgttaatgtgttactgagtttgatcagggctgaagaagcacagccaacctttgagagcttattgcttgaaatgatggcatccttggaccttttcatggcatgttccttctgaagtctctaggtctgggcctagacaaactttctactggcagatcataaggagatgcaaatgaagaggtagtatctgaccatgagacatttaccgtctaacaacttgagatattttttccctcctgggaagtagatttctgttttaggctcagattaaggagggggatagaaattgagacacttaattttacagcccccttggctaaatagaaagcttttattcaaacacttatttggagtaacattatggagacgaaaatttcctggagcttttcggagcaatagtaacttcagtttcttgaatacttgactacttcataactttgaatttggaagtttctgtttctctcttctgtttttctttgcaatgtcttcatctgttctccctgttgacttttcctgtcctataattatttccatcttctttactttatacctaaccttaccttttctctttcctactttaggatcttattagaagtgtggtagagccctctcttccctcttggatcacagtgtgcataggggttcattctcactttgagaaatagaccataaatgtaaaaatcattcataggtatgtagtagacaccagagagaggtacctggtcagtctcactcacctaatccagtggagaagtagtagtagtaatattcttcatatgtatgtgtgtgtgtatgtatgtatgtatgtatttatttattattgttgttttagagacagggtcttgctctgtagcccaggctggggtacagtggcacggatcatagctcactgcagcctcaaactcctgggctcaagtgatcctctcacctctgcctcctgagtagctgggaccacaggtgtgcgccactatgtccgactaattttttttttttttctctatagagatagggcttgctatgttgcccaggctggtcttggactgggctcaagtgatccttgtgccttggcctcccaaaatgctgggattataggtgtgaggcactgtgcctggcctcataattatattcttaattgtagatagaaaaaccttggtgtaagagtagtgggcaggaaagattttgtcacccaagaaaacaataagaattatcacaagcatttgaataactccagaaaaacacttggcttgaaacttttaagctttggaaaaagcaaaacacaatgaagttatctcctctgactcaaagtaagtcctcttagagtcattgttaggctaatggccttgaatcaggccctgcacttttctgaatgggacatagagacctagacaacatctcccaaccccaggatagaaaatgctgcttaaaaataatgcagatattattttgtggaattaatatttaaaactgggaagtcatatacttagaagatagaaaaaagaatggaaagaaaagtgacactggtcatagaccttttttgtttaacaaatctgggcaattttaaggtgactatgaacttgaaataatatgtgactcggatttttatttttattttttgtaaacattttcctgaaatggccggatatggtggctcatggctgtaatcccagcactttgggaggccgaggtgggcagatcacctgaggtcaggagttcgagaccagcccacccaacatggtgaaaccccatctctactgaaaatacaaaaatgagctgggtgcggtgggcacctgtaatcccagctactcgggaggctgaggcaggagaatcgcatgaacctgggaggcagaggttgcagtgagctgagattgcaccattgcactccagcctgggcaacaagagcaaaactccgccgtctaaaaaaaagttttcctgaaatgtcttacagacatacttgatgacattctccttgttcttgtcattctgtatgtattgtgctgcttttaaaaaaatgttggcgttggccaggcatggtggctcatgcctgtaatcccagcactttgggaggctggggcgggcagatcacctgaggtcgggagttcgagaccagcctgaccaacatggagaaccctcatctctactaaagattcaaaattagccaggtgtggtggcgcatgcctgtaatcccagctactccggaggctgaggcaggagaatcgcttgaaccccagaggcggaggttgcggtgagctgagatggtgccattgcactccagtctgggcaataagagcgaaactgcgtctcaaaaaaaaaaaaaatttggcctgttggagggagtttgccaaaatattggagttgcacactgagtggctctgctacaacccaaacagatgtgatagtagcttgggtcagttgggaggaaaatacttaaatagtctgaagtgtaacgaaaacagggacattaaaaacaagggggaacaacaaaaatagtataaagacagtgatattattgtaaaacagtaactatataaaacccccagaaaatgagatctcttgcttggttctgttttttattcctttaaaaggcacctccaattttaaaagtagtcacttaggagaaatacttataaaatgagtagtatttccctctttactaaacttacttgaaatgtgcaaaaattcactgagatctatgagatcttttaagatactgacctgtctctctccactaagtaattgtaaactgtagaccctacactaaagaattctaggcttttacttagtttcatctttgttccctgagacctctttctgtctgcgtgtgtgtgtgtgcgtgtgtgctttttaaaaagaacagttcatttcctcttttctaatattctgtgttttatctgctgtggatttggaaatcagataaccaggtttgtttgtttattcagcaaaaatttaatgagtgactcgtatattgcagacactagtatacaaagattaaaaaagaaatgttcctatcctcgaagaccttacgcttagggaaggcaaaagccatgtagacaaataattattgtataatatatacattagaataaaaaattgtattagagtggagggctatacagatatgttacgtgagcaaactgcattttgcaaggtgaaggaaggcctcagagctgctgtagtgtttgatttgagccttaaagaccggcctagatgagatttcatcagggaaaaggaatcctaaagaggcctatgcataggatgaagacagaaaatattatagtatgtttctatttttcctcattttacatatacctttaataagagctgcatgataatttgagagacttatcaataaagctagtgatctttagtgcacagaatgtggaatatttattttgaatatagggaaagcagccttaaattctttgcttccttttcagttttttccttgagttctgaatcagggagttctatttactattgctgcattatataccatcccaaacttggtggcgttatgctcacaaatgttgtggctcagaatcataaaaggtatgattgacacagcttatctgccccatgatgtctggcacctcagctaggaagacgcaaagccagggctgagtctatgactggggagctggaatcagctgaagccttgctcacctgcatgcctggcctttcctactggctgttggctgggatgtaggctaggttgcaggctagaatatctacaaattggactctccttgtacctgcttggacttcctcacagcatggcggcagaagttcagtggatgaaaattccaaggaagctgtgttccctttatgacttaacctcaaaagttacataggatcacatatgcccttagtcccaagctgcccccccgccctccccctctatcccccatccagattcatcagagaggaagccttgattccagctgtacttcagaggaattcagcagggaggaagcattgattccagctgtacttggaagacacattataagaggagcatgtgggataagagattgcagtcgtgttgggagccaccatctgtctgtcacaggctaatttgtagaaagttgaagcgttactgtcctttcctttaaaataagagaggaaagaggatttattatttctgagacgtatgaagtgattcaatatgagatataatgaccagatgttctttagtttacaaaagagagcattcttaaactatatctaaagggattttagacagacatttagaagaactttctgatattgccaacatggcagggtggtgcatacccaaagccccagctactcaggaggctgagtcaggaggactgcttgagcccaggagtttgaggctacagtgtgttatatgaatagccactgtactgcagcctgacaacatagcaagactctgtctacagtaggtaaataatttttcaaaaagtttataggcttttttcttgactagaggacatttgtatgatttaaaagaaagtttaccagaccgggcgttaaagcgagaccccatctctaccaaaaataaaagaaaaattaacccagctacttgggaggctgaggtgggagaattgcatgagtccaggagtttgagcttgcagtaagccatgatcatgccactgcactctagcctgggcgacagagtcagactcccatctcttaaaaaaaaactaaaaatattaaaaaaggaagtttaataatggttaagtatactgcctctggatggacctgttgcattggacaagtgctttatttctgagtcccaaatttcctttttgttggatggggataataacacttgagttgctgctgagcatcaaatagaagatttttgttattcatgaagccagaatgaattagatgattttaaagaagtcttctgggattggattctctggttatcactaaggaagattgaacggcattagttaattttttaaaaatttttctttacattctagaattatcttttttaataaagaaaaagtatggcccctctctattgtttcttctcatatacagtgtgtagaactcttgattaaatgacgatgacatgtattttttggactgtttattttaccacaagcgtttccagggagttagccctgaaagccacttataagtaataatgaacacagttctccctgaaagcactagaatgatgctgcttccccagatgatccattttgtagattaaggcagccttttgtaaaaagatgcagggctttttacatggtgagagcatggatgatagaacaagtctctcatccaagagtctatacatttattttagagtatataaattatctactttgcttatcaaagtggtagttccaagatctcattcactgagatttataaaagtatggatgcatctagaaatctgtttgtaattttaaagagagttttcaagtgacttttgatagatatagtggggaacagtacttgaagatccctttgtctggtcctaagcacagagggtcatggaatcctctttcccataaggaatcctggtaacctgagaagtgtggagattactggcaagactgtccatcagtctgcacgtactgtttgggctcactcttgcgtattaagaaatttctcaatagcagaaagagaagaaaaccgtgcactaaagtaactaatgtgtgttttgtgtaccacaagttacacacaaatgcctcagaaaaggcatttcaattctaaggataaaatgaaagtaaaatatttcaagatactatgattagttttttttttcctcatcactcttacaaggtgatgcctaaaaggcagaaaaattgtaaaatttgtggaacattctattggaatatgttaagtacctgcaaaatttggaggtcttggctgggtgcagtggctcatgcctgtaatcccagcattttggaaggccaaggtggaagggtcacatgaggccaggagttgaaaccagcctgcccaacatagtgagaccccatttctacaagaaattaacaaaattagctgggtgaggtggcgggcacctgtagttctagctactcaggaggctgaggtgggaagagtgcttgagccaggagttgtggctgcagtgagctatgatgacaccactgcactctaggctgggtgacagagggagactctgtttcaaaaaataaaataaaattggagtttcttgaatacaagagtatttgtttttcagttctgtgaaggcagtttggtgtagcactgtctggattgccatccaactccatcacttaaacaagtgtgaccttgcgccccaatttttgtaaatgttcgctgttgttattgtcactttgaatcacctgcagtgataggtatttgacatacagttggtgttcaataaatcttggttagttatttggtattataattcagagtagattattttaaattcaaatagaggatgtttagaagaactatgaaaaaagttagtcttgaagacaagacccacctgtgcattcaggattatttatggtcaggtttttatggtccttctttatcaattgaagggtgtaacagaaatgcaatgggtgatgcagcactctgtagtccataaggatacattatgaattattttctaattattcactgtttagagtaactgtgtttctactttgtttgtttacagaatgattattattacaatcccttaacattttagcacttggtaggtctgattcaatggttctcaatggatgggagtggggaaggacaaagatgatctgatgtatcatttggcttaccaacattcctgtccctgttacattcctgtggtttcatggtggttgaaggtgaacctgacagtgctgttttacagagaagattgaagggaaggtgttttaagtcaatagagttaaagctctttatgttttggaaaaaatttgggggttattttaaaaactactcagaggtgatagagtattgtaattatcatatggaaaataatccaagaaatatagtatataaaattcacatttcattaacctggaaaattgactgattgtttgatgtatctaagtgttggacttagaagtggacagtattatattctcgacaaagagattatatttagatttctcagagaagtgtgtaatgattaaactcaatgttggaaccatttggttaatttaattataatttaaaataaaaccccttttgagaaaattcctgcataagacttaagtgttatttttgactagttcagactgtggcttaatatacaataattttctcagaaaaatgaagctcttgcgaagaatggttgggcatatttcaccaaaatcaagtatttgtgtgtgtgttttttttttttggagtttgaatataatcctgtaagtagatgcttcaaaaccacttgaatcaccatggaaagcaaatctctttagttattctccatctaagcagcctttgccgtacagtttaattaaatctaatcatcagtaatagttctcttttccatagggataagttggttctttgggtttttcaagatttggcctgtttcaaagataaattcacattttacagaggtttgcccatggttatacacaaatggagtacactgatgttctcagaggtgatggaaaacttggtatagctaaattccctgatggaaaatttccagatccacagggaaaggtgagatatttagatacagttaccagagaagactatttataagctctgtttatgaagttcaaaggaataaactttttttttcttagaagtatgagtagagcattcaaatagcaataaagaaaatttctaggccaggcacggtggctcacgcctgtaatctcaacactttgggaggccgaggtgggcggatcacctgaggtcaggagtttgagaccagcttgaccaacatggagaaaccctgtctctactaaaaatacaaaattagccaggtgtggtggtgtatgcctgtaatcccagctactcgggaggctgaggcaggagaatcgcttgaacccaggaggcagaggttgcagtgagctgagatcatgccattgcactccagcctgggcagcaagagcgaaactctgtctcagaaaaacaaaaacaaaaacaaaaaaaactaggatgattttagtgtccctcttctgtaagaacataaccatttaaaatgttggatttcaagtattccaatttaaacatgatttataaatctcagtaacactgcataggttagaccaataacttctagtaaaacttctgacagtgtgtctgtcttaaatgagtaattataggtcaagggattaaacaaaaggaggtaattcctggtccagctcctccttggtgaggtgttttcctcttagatctggttgctgtacattcacacaggcgataacacagccccatccactatctagccctggccttcatatcccagcttcttggtgtcttgataggacttctctggaagcgcgtacctgtgtgcacgaacatctgaaggaaaggtgtgctctgggcgctctgtccagagttcaccctttcaggtagatgcctctgcagtgggtatgaaaattgactttctaccattttctgtaatttttcgtatttgtttttaatcttgaaataggaacatttattagtaagtcaaatgagctattcactcagagctgtggaaactgcagagtaccatctgtgtagtttgtgatgtgccatatcaactcatatttgagcttttagcaggaaaagtgacataaaattgcgaagtattattattaacacggctgatcctacagtgaatcagggtgaggaaagaatctctgtggtacagactgcttttccatatcggttgtattaacccttctggaacgcgtgcaagcatttggtaattttaccaattggtacccaccaattgatcatcttggttatgtcaagaaagaaatgcctccatgttctgacttggatcagattcatttttacaaattataattttcattcaaaatagatatctactagcttccctccctggttcttctggaattcctgaacaacaatgcctaatagctgctgtttgtatctagataaaactgttggtggacctggtgcaacagatattcaaactttcccaacatggaatattagtctttcctgactttatcacattggggccaagatttctttgttctctttcttccttgtggaaacgacattttaaatgtaagccttacactatgctaaacaaccctttattctagccagtttatttattattgccagtttctttattgggaaaagtgatcttcgaagtcaaaaagccgtctgcctgcttgtgtcaggtgggcctcctcctggcctcggggcactgacttttcttagaagaagccttttttagcagcttcggccctcagcactctcctctcctgatcctaactggtgcttatttcccagaccatatgttggctgttaaccttacgatagcttattttatattctggctttttctgtatgtatttaggttttatgctgctaacaaaatgataaactccttcagtggcagcagcagcctgggatagtggaaagtgaaaagaatttggatttagaggatgatttggtatcagtctcgctcctctatccctgagttggaagcacaggcaaattctaaaacatattctttaaaagtagtctcatgtaataatacctgactcacaggattttgtgcattttataatctatatagattaaatgctttttacctataaaatgccattacggatattatttattgtggttgtgagcacatgggtaagccacccagtacctggatcagattttacatgagagcttcagaggttcttgggaaatgtcaagtaaaatgtgttatattttcaaaacctattagctttgttccctctgctgcatacttcattatctcaggtttagtcttgtatttctgttatcatctctatataagcttgaataacaaaagaaatattattattttacatttggtaattatatggtgtcactacaacaatcccaattcacctgctaggctggaaaagaaacatacttttccatgattaatattagtgcttatgtagcattagtattataccttcgtagggttccctgtaataacttttatcacagagtcctaatacatttttcattgagagagattagcactactgccttcactttaacaaacgagccatttgaaacaatggaaacttgatatttataatcgagttaagattaggatttaggatcccattgtgtattaaatagaagttacattttaatattctgttgttattacgctgtttttctgtgcggcttcctgaaattcctaaaagttaaagtttttggtattggcaaaatatccctttacaaatggttacaaaaaattactatggaaaagtttaataataataatgtaatgaacgcccatgaaccggtcatctatacctttatctattactcccccatctgttttgaggcaagtcccagatacatcttttcatcctataggcatttttttttttttttgagacagtgtcttgctcagttgcccagggtggagtgcagttgtgccatctccactcactgcaactcaacctcctggactcaggtgatcctcctacctcatcccaagtagtcgggaccacaggcgggcaccaccacacctggttaattttttatattttttgtagaggtgggtttttgccatgttgcccaagctgatcttgaactcctgaactcaagtcatctgcctaacttggcctccgaaagtgctgggattacagacgggagccacggccacaggcctttttttttcttttttaaagaagaaaatttcgtgtggtatatatgaattaacaaatgctcactcgaacaaaattttgggctgtatagtccttgaaaatttttgttccgtggtagcgtaataatagtgcaattaggcttggagaatgagggctgtacagaatgaataccagtaacaggcatatagtctaggggagagaaacattaataaacacacacagttctaagctctgtgacagcagaaatcttttttgccttgcacagtgtctgaaacaacgtaaatgctaagcagtttgttgagtgaatgaaaaaaattagtagaaagtggaattcttgggaacatgagtcttgttatttgtgttcagtgtcatttgggatttaaagtatgtgtgtgtgtgagtgagtgagtgtggcactgtgcgagtgaggagtatgaattaagaatttgccttgacagagaatttaggtttgccctaaaactgagttctgaaacctagtaggatctcatcttacaaaagtattatgaagtgcataggtaaatggaaagtaattcatgcagctctactaaatgaaacagaatgaaatgtaattttagaacttgtacatataattaattattcattctttaggctgaagttgacttatggcattactgatatttattttctttctttccttttacattaagaacctgcttgacacttgtttcctgtcttatttatagaaggcttaagctgtatgttaattactcatgtttgcatattcagagcacttagaactaatccgactgccttttttttgagcctcattaagttatttataaagttcatactcattgacacctttatatccttcagtgggaaatttaatgtgagaaaacagcatttcagtttataatcagccatgcgtcatttttgtatgagttttagttgatgcaaactggtagttaaagcatgatacagaaacgatagaatcagaagtttagttgctctaaattttatgtataggataaggacaagactctgtttttgctactaatatatattttttaaatttttaaaaaaatctcaatcctgcttcttctatagctacttatcttaatatgtaatatattaaaattttgaatgggcaaaaagatgacttttttctcttcgggtgtgctttgtataagcagtaaatgcagttcatttttcccagatactgtctttgataaaataaaatggtggcagaaagagataaaatgtcagtgacaacatgaactgctgatatgtggaagacaggcagtccgatgcctccatcacacagcagtgcatttgtctggaccaattcgtggaaaaggcagaagtctgctagggaactgaaaagattgtatgaaaccacatgatattaaatctttattagggatcttgaaaggtttgattctccccgtcatgtgctatgtatgtttaacaaatatttctaaaacatagggtttgtcccgtccttatcaaaataaatgaattgaagtggaaggacaatagaagctttcctagattggagggtgggtataatgctttgagtttacccaaatcttttagaaaccagaaaatcattgtaagtatttttgataatttaggcttacatggtgttaaattttagctaaaataaggaaaaattaccatataatatttattttgtaaaatgctacttaaaacattaagagatttatcttgggatagacttcttcccacattttctacccttatcctttaactgcttgtcttcaggagaggaaggcatcaagcatagagattaagggtatggctgaggagccaggctgcctgggtttgaaacccagccatgccccttaggagctatgtggaaatcatcatcatggtgtctgcgatttggttctgttgctgtgaggattaaatgaggcactgacaacagtgcctggtacatagttaaagttgtatatgtgttcacaattactagtcagcatcatcaggctgcttttagcagagttgattgaataacatttcttcattttatgttttttttttttttttttttagcatagcctacaagtgcagggactttggaactcgaataacttgcattctcatttgctgttattttacaaattattggccttgggaaagcttttcaaatacattgagcttcagttttctcatttttgaattaatacaccataagattgtggtaagaaatcaatgaaactatatttggagttgctagacccgttcgaaaatctaccaaagctacaaaccatctcccttgaagaaatggaccccttccctgcattttgcatacttcagccatctgtgaagaaacatgtggggatctcctactttataatggcgttgggttaggtgttccttcccatttctacctatgactctacttccctcaatttagagccaagcatctgtcagattttcaacattcaaaaatattttttgtagtatataaaagatttaaaataatattttcttttttattttaaaattatttttatggcgatggggtctcactatgttgccaggctggtctcagactcctggcttcatgcagtcctcccacctggggcctcccaaagaattctaggtgtgagccactgctccaggtcagtttgtggctattttattcaaggtggtttatatgctgtgtaagcggtatctcttaagcctatgttactgaccttaatcttccaggaaataagtaactggagggaattggtccattttacttgcagtctcatggttccaacttgggtgaaattttctgcttccttctcaaacccaaactgattttggcactgataattaggccagtatcagtctatggaaatcagagtcagagttatcattgttaaagactggagtactgactatcagacttgtcatttccttgggaaacaaaaataattaaaatcctgtgcttttttgcccatttaatttagatttataagctccagtggtagcagctgtcttattttagattttgtgcaagaactgtcacatttttggtgctcaattaatgtgtttttactttttatctaaattaatgattctgcccatgaactaatttacatatttccattttcagtactatggaaatgggaaacattctttttaattcaatgcctggaattctagactaaaaattccagatcatcaggcagtagcataaaagacagtttgatttgaaaaatgtgatttcaaatcacagtttgatgtgataaaggattttttttaaagctgttcaacctattttgcttagaaagatggctcagaattgccaaactgattaaagatagaatgttaaatgatttaatcctttgtaacatactttggatactaaaaaatgtaatgtactaaatactaaatttttatttattaaatttataaggtactattccttttctaattattttgaggaaatataaatgtgttagaattgttaagagttttttttttcttgtcaagttgacacggagatttctaatggataggaaatataagtttttaaaaaaagtttccatgtaatcaggattttaggagtatatatgatccatgatataagaattagtagagatatttcattcatttttttcattttggtttttgactcattaagggagctttgattaataggtcctacaaataaatacataaagcacttttgttttcctgtgttgatcatagtcttagtgtatagaaaaaaaaaaacacaacgtataagcacatttactacagaaaaagccatcatcgtcatctgtggaaaatcaatatatatttttcaaaatttagattgatgatcatgtgttagcagtgttagctaaagcttgggggctgctccaggggtcaagtacaggccagcggagctctggcatcatcagtgactatgagattgactttctcaggcagcttacctagcgccggccctgagcgccctggctgaagatgaaagatacacctgagtaagattttgacaggaaatagtaataaataagtgttgtgttggtctgtatctataacactgctacctttggctaagcccagtagattttgcctgtctatgaaaattgaattttgttggtctatttttatggaaattttagaataaagtaaaccattcaaccatagatctttaaaataatgttgcatttgcacttatttatctaacagaattctaagatgttaaatctattcacaccctggtctcttgattctgtaatagaatttttcaaactgaaggtcacaatcaactagtgtgtcctgaatcactttagtggattataaccagcttaaaaacaaaacaaaactagagaatataatagaaaaatccagactgtattgcacagagtttaggcaagtatgaaggtaggtgcatacacacgtttgtgtgtgtgtgtgtgtgtgtgcgtgtgtgtgtactgggccactgtgtaaaatgtattttttactatggttgcactcaagaaagttagatatgataatatcagttactctccccgaaggagactgactaatgacctattcaaattttgaggacacttattcctaaaataggaagtgataatgtgccttctggtgagtattgtaaaattgccactgcattttgtatttggaaatacttatcctcctcctgccctgtttctacttttatgtatgtcttctttactactggtgtattacggaataacgactctcagacagtgttcctatggactgaggtattttactactaaagttgaatggaagagtatttttccaaatcttagaaaataataatgaataaaattatagttcttctctcataagttttccataagtcttcggtgactcttattgtcaggggataaaattaaagtgaaaagagcaaatgggtattagtaggaaaagtcatgcttaattcagcagtgctatctttttcataaacataaaaaattgtatgcttcatgtatataatatggtcttattttctgctattaaaaggtttcttgttcatagggtggaattagagatattgacatttcatgctgttcggtaaggtagtctgatatttgagcaagtctgaaaatgaccctggttgtggaactctaaccaggttcacctcgattttctgatcagcaattgaagttagaatcagtatcacaaatgtggactgagcaccagtagcaacattacagtgacctgagatgtgtatatttaacaattttattacaaatgtgttgaaatacagcctttttcttttaagtctcattatttttgccctcaattttaatttctatctatgtttaggggttactgaaatagcatattctgtttccttctgattcccaaggacacatgatgaatcctttttgagtttcctgaaacagccatctcacctgatgccactgcaaatttctagccaagcaaaggcttttcttcatcttagaattcaagtgacagacagttggcatttttggcatacggagttgggtagccttcctctgggatgatcttttcattattgcatcagtttaactaatagcacacaaacacgcatatgcacaagtactttatttttattgatgaatatttagcttttcttaaatacctgaaatacggtcattataataaaacaaccaaacattaatagatgtatataaaataaaaagtgagtcttcattcttcttggaataatcactctcccccgatgagagttaatagtttgcagtttattgatatctttttttttcatttaccaggatgatatgcgatgttaaaaatgcagacgtagggtgactgaactttttttctacttaagttattctgtagatttattatatataattgttttccttatgaaattgtttattaaggaaacattggaaaatatagataagtaaaaaggaaaacttaattttctgtaatctcatcttttagaaagacttttttttaacgtatcggcatatatgctttcacttttctttctttttttttttttttaaagagacagcatctttctctgtctagagtgcagtagcatgatcatagctcactgcagccttaacctcctgtgctcaagcgatcttcccacctcagcctcccgaatagctgggagtataggtgcacaccattgccccagctaatttttaaatttttcgtagagatggggtctggatttgtttcccaggctgctcttgaacttaagggctcaagtgatcctcctgccttggcctcccaagttgttgggataacaggtgtgagccacagcacctggcctcactttcttttatgtgtgtccatttcttttttctttttttttttttttgagacagagtctagctttgttgcccaggctggaatgctgtggcgtgatcttagctcattgtaacctctgccacctggcttcaagcaattctcctgtctcagcctccctagtagctgagattacaggcatgtgccaccatgcctggctaatttatgtatttttagtagagacaggatttcaccatgttggccaggctggtctcgaactcctgaactcaggtgatccgcccacctcagccttctaaagtggtgggattataggcgtgagccaccacacccgaccagtgcatgtccctttcaatataggcttgatttaatgaaaatgggattttatttatatatttttaaattcatgctattttgacaaggggattatattttcagtgttgttttccatactacttttttcccccattcagcagtgagtgaaaaattatagaaattgacaggctggaactaaaattcatatggaagtgcaaagacttaggatacccagaatttgttttgaaaatgaagaataaggttggaacttttacactctctaatttcaagatttattataaaatcttcaagaatgaaagtattgtggtcttaccataataataaacatatagatcaatggagcagaatatagccctcaaatagacccacgttatacggtcaattgttttttagtcaacaaatgatgttaaaacaactggatattggtatgggaaaaaatgaaccttgtctacttgacctttccctcataaaatacataaaaactaatttgaagtggctcataggcctaaatagaaaagctaaaactatgaaagttttaaaagtaaacttagcacaagataatatcaactttggttaggcaaggatttcttagaacacaaaaaagtactaagtgtaaaagaaaaaatgataaattagattttataaaaaataaagctgtctgctgttctaaagaagctgttaagaaaatgaaaaggtaagccacatattgggagaaaatatttgtaacacaaaagtcttttatctagaatatgtaaagaactcttataacttaaatcaacccgatttttaaaatgttcaaaagacttggacagatgcttcacaaaaaattgaaagtacaggaaaagatattcaacaccataaaccatcagggaaatgcaaattaaaaccacaataagatggagtagctaaactttaagaaaaatgtgagaataccaagtgcaggggagactatgaagcaaattagatctcattctttgctggttgaggtgttctttggaaaacaggttcgcagttttttagaaagtgtcttgtaaagtttaaagtatacataccatattcctaagcattaatcttataggaatgtaagcacatgtccacaaagactttttacatgaatgttcctagtagctttattgataatattctcaaactggataaaacctcaaatgtccatgggtagagtaaatggttgaatacagtgtattattcatacaatgggatactatttagcaataaaaaagaacaaactagtgataaactaacaccatatggatgagtctcaaaaatattatgctaaataaagaagccagacatatattgtatatttcctttcatatgaatcttaagaacagggacaaagtaagctgtagtggtagaaatcaggcaaatggttgcttgggatgtggtggggaattaactgtaaagggtgatgagggcactttttggaatggtagaaatgttcatcatattgtggtaatagtatgcatttgttacctgtgtgttaaaacataccagacttacacatttatacacatcagtatatttcatgaaaaataagttttggtatagctatgctttatttaaatgatggaagggtgcctttgagaagtgtatgaattctgctgttcccctacttcctagccacacaatatgacctaggctgaatcataaaataatttaaaatgagcatttgtggcaattctctgaaaagagtaggattttgggttggtggggttggtttgtacttgttaattgcttctttggaagctggctatgcgtgctcagtttgcataacccccaactaatctcagcacttctgaacatgttaaagcattaaattctaatttctgtactaagagttatattccttttccctcttctccagtaactaagagagctttagtagtgatttttgtatgagtggatgacctttgagcttttttagaattttagaacagaatctggtttccagaaataatgttttaaaacctgcttggaatttttggtttttgtctgtagggtttcaaaataaatgtattttatgtctgggctttttgtgttttattctgggtttctttcttcattaactcggtatccagctcactaacttttccacttttccttgcccaaatccatgtatggttaatatgatttttagcctaataacattttttccctaatactttagaggtaaaaaaattataaagatacacagtgtagatttgtgaatatttgttagtttttaaactaatgagttttacttattagacatcagatgaacgtactttgttatattatctaataatgcacttttaaaaacttacagtttttaaaatagctctcttaagagatccctgtgatgcaggctagaagtgataagaaattttcttagagttttgaggaaactgttgctgtaagtgtattttaaaagctgcagtagtgttcttatgtcctcttgggactgaactgtttgcccacgtgtagtacatttgtgtttatgtggttaaacaacaacaacaacaacagaactgtagattcatgttcataagatcaaagttttcattgctagccaatagtaaaatatcctgtatcagaatattaggaatatctataaatcacttaaaactttttagtatctttgtaagtgaaattgcttgtcctttttttccataaaatcaggctatatatatgttaaataagaaatcttaaaaatttgatgtctctgtgttaagtataagaattctagattattctgtgctattcttacctttattttattttattttgtatttttttattgtggtagaaaaagacatttcagaatttactatcttaaccattttcaggtgtacgtttacattgttgtggttacctttatttttatttatttatttatttatttgagactgagtctcactctgtcacccaggctggagtgcagtggtgcaatctcagctcactgcaagctccacctcctgggtttatgccattctcctgcctcagcctcccgagtagctgggactataggcgcctgccaccacgcccggctgatttttttgtatttttagtagagacgggggtttcactgtgttagccaggatggtcttgatctcctgacctcgtgatccgcccgactcggcctcccaaag

SEQ ID NO: 665 - DNA, 9851 bp, Homo sapiens
  source 1..9851: mol_type = other DNA
gttaaccggaagtagacgtacctcacggaagccggctttggccctgcggctgctaccgtcgccgcggagaaattgttggatctggcagtctaggaatggtgagacctcgcggttcgcctctgagggttctcagaggagttggggatgaaatggagttttgcagagtgccgccggggacgaccaccccccaagtttggggccccgccccagtggcgccccgaaaagctgcgcatgcgtgggccggaccgggttagaatctggctcgaagtgttacgcatgcgcaaaggcatggagaccgtggggtgagaatgggcttgcgagtttacccccacctccccagccaccagcctgtgggtctcaaaccaaggctacttggtgctctgctttgagttgcagaggtgacttcatcaatgctcctaccccgagttcttgagacagacctggaccgatcccctaccttgggtgtgcactcttgggagaacgaggggcggagggtccggtaaggaaggggcacagaccctacctcagtttgccggcaagctcgggccccttcgccctctcctcagatgtcaagattcttagtcgtagcctatggagcggagagcgacaggctcacctggggacagggctagaacactgagctaagagccaccctggttagaagtggggactcacgagaggagcgccccgagaaagtccagtacctgggttctctaggggttgttggggcacagcgtggttgataatcacgcagttcccaaacagtggtttttggtttccacgagatggtatctcatggaaataccacttactaaatcttcagtaaaaaccccaaatggaaaagaaaaacaaaaaaaaaacgagatggactggttggagttttgtctccctttcttttttcctgctttggcctgggaggggaaggctggtgctgctgagctgagtggacagctgaagtaaagaaaaatgtgggccaaagaatcccttgtctcttgctagtttatagtcaaggcgcttaacctaggagataccagtagaattaaagggtctatgaaccctctaaaatagtatgtgtttgcacccttttctgcagtccatagctgttatcatactctgaaaggtgccagtgaccttcacaagactgatgtctaaggctattattggcagagtggggccttatgcctctttcctgtccttatgtcttccctagcttatgggaccctgggggacctgagccagtataaggaagtgaggctggccagttggaaatctgagcctcagggagcctcatttctcctttgcagaatctcctctcagcctttaagctcacctggtcagaatccttggatgagcctgtgggaccgttcctcctagcccggtggtttggaaccagtggctttgggactgtaagaggatggacaaaggtagtatgaggccgggacagctccccaaatgctcgggcgccaagcatctgctgattccactctgtgcctggcacgtgtgtctttcggtcctggctaggccttgccacctccccctgggccagcaccacccatgtacctgtcggcagagccacagttgactgacttgctgttgagctgctgctctttagcacggctgcattttgatggcagagggagcagttatgcccagagcccagcgtgtcggcatcaccagtctgacctgagcaccatgtgctgcacgacatgacacgtggcaccgggggaactgcccagcgtggaaggtctgggccaggtctgagcccagatgggatctggatggccaaggaactctaccttaaaacctcaagtgtcaaggaggcaggggaggggccaagagggctggcaggggaagggggctggggaggggtcccatttgcagaggctctaggatcttaggaggcccgaatccaccatttctctcttgctagattctcaggggctgctagattcatccctgatggcatcaggcactgccagccgctcagaggatgaggagtcactggcagggcagaagcgagcctcctcccaggccttgggcaccatccctaaacggagaagctcctccaggtagtaagggttcggagggccaggaactgggaaagggtagaaggtctgtggcgttaagtgccacatgcctccccatctgttgggaatggctgcctgagcccctctggggccttagtattggcagagccttgtgcttttcctgtccctgctaaatccttccctgtgggactgagggcaggggagggagatcttaggtctctgacgtgaagtctttgtggtgtgataccctgtcatctcagagggctggagtgtagcagttccatggccacaaccaggctgtggcgtaaagtgaaagcaggctggagcagatagcaccctactgggcacctgctctcttttgggggctgggggtgtgtgaatgggtaccagggtggggtaaggagtgttcactgggcaggaccctttacaggttcatcaagaggaagaagttcgatgatgagctggtggagagcagcctggcaaaatcttctacccgggcaaagggggccagtggggtggaaccagggcgctgttcggggagtgaaccctcctccagtgagaagaagaaggtgaggaattgggagacttaggggatgggaggtagtgccagatttcatgtttccccagaacctttgccagctgccaagagccctgcagagcaggctggtgagaggaccaagctgccccagccctcatctcagatgcccccctcctgggaacacacctctccctactccccatttcttgctgcagcccccacccccaaccctgccattgcatcctgtatcacattccgtgtgggaggcatggagcatgcatctattctgggagcagacagcctgttcccagcattgcagagtgtaaaaataacccccaggtggcattgctgtggccctagacactgcaccagcaagagtgatttcccggtatcctccccacccaactttcactctggggtcggggatactgccagcaaagagaagaccccgtatggtcaaggactatatagaagtaacttggtgggatgggggtgggtattagaaagctgagctcctttcctgtgcttcctgttgtgggctggagttggtgctgaggctggggctggggctgccgctgccacagagtatgtgaaactctagtcatgaagcgccagctgactggatgctggctttgagcttggtttgttcctgtcctctgcccaggtatccaaagcccccagcactcctgtgccacccagcccagccccagcccctggactcaccaagcgtgtgaagaagagtaaacagccacttcaggtgaccaaggatctgggccgctggaagcctgcagatgacctcctgctcataaatgctgtgttgcaggtagtgcccccaccataggctcagtgtgcccctttcccccaacctccagttcgcaccccaaaattagcccaacagggccctgtgggtggcaaagaagggttgttcccagctccaaggctggagcaaatccttctggggccttgcagaccaacgacctgacctccgtccacctgggcgtgaaattcagctgccgcttcacccttcgggaggtccaggagcgttggtacgccctgctctacgatcctgtcatctccaagtgagtgggagctggttccagcagtggggaggtactgggacaccagaatttgggtcctggagcagagggaattgtaccagggccccaggaggggtctgggaggcaggactcctggaggctccttgggggtgatactgaggcctgagaggcttcaaagagaagtttcttcctgcctccaggcaagggagtctgcaggcagagggaatagcatgggagagaaaactaaaatgagtgcccggagtgcactgtgtgtgttgtggctttgggcggagaaaactaaaatgagtgcccggagtgcactgtgtgtgttgtggctttgggcgggtcacctccagcctttccacattgacctcctacagtttcatcctcctaacaagggggagtcgaatagaagaacaccaagcccccttctagctccagtagccacaggcttccaaataaactcatacacatgcaacacacagttcctcttcctctgtcacttaatgtcttcagagcttggttggatgcttaacacccatcctctccacagaccctggtaccacttaagttgtagctgcagttctgatataccaggaaatgggctgggctcagcttggaaaggggaggtggtaggcagtggctagggggtggcagctttggccaagtaaggaggaaggacttggagggagcagcagctggtccaaggctctgcctcaggaaggactgggtctgaaggggacataggggcctccgttttctgagttggctgttcattcacttgacaaacctgtggagccacagattatctgctaagccttaggcccttcctaatgagggcctggcctctaggttctggatctcaaaagcctgtaggtttgggggaaatagtaggaaccccagattgcttgacacctttccttcacccctcccctctgtctctttccgtgtccaggttggcctgtcaggccatgaggcagctgcacccagaggctattgcagccatccagagcaaggccctgtttagcaaggctgaggagcagctgctgagcaaagtgggatcggtaaggctgagggctgggaaggtggaggatcagggcacagcgagagctggaccacctagaaaaccactgatgtggagagctccccacccactgtctggatatgtgcacatgcacacgtgtgcacattggcaggggcgtttgtgacaggggcctcaggaagagccaagcctgacttcttgggtgactagcttgcttcttccagctcctgggggatgctgaggtgggaggtagagatggtaaggcagagaggcatgtgtgaaaaagcccagatgcctagagaatgtttcttgccctctagaccagccagcccaccttggagaccttccaggacctgctgcacagacaccctgatgccttctacctggcccgtaccgcgaaggccctgcaggcccactggcagctcatgaagcagtattacctgctggaggaccagacaggtaacgccccaggagctggcagaatgggggtgtgtgcacgtgcatgtgtgtgtgtgtctgaagtactcgacacagctgccttcaagtgccctgtaacagattcctcagtgatccccagtgtcttgttcacctcacattgcaaaaaaaactactttccagagagagaaagtggctggaatggtcttcagcatcatggtaagagtagccaacattgcctggaatctttggcaaaaggtccaaatagcggagttatctaccatttcttgtcttttgtttttttcatgacatattttattctcacataaataacacatgaattattatggataacattcaaacatgagcaaaataagaaagtccactttcctgcccacccttcagtttgttttccaccctagaggtaataaccactttttctgagcttttccgctctttgcctctctccgttcttccttctgtcttccttcttcctcttcttttcccactaggccgttagtgctgtcaagctgccctcaggccattcataaatccccactgggacttcacacccagtccatctgtctctccctttccccaagggcctcactgctccctacttcctcttgcctcaacagcacagcactcactctcccagtgatggggtaagaaaacagtgtgattaaactggaggaactccccagtgaggtctgtaattcgggttctgatttccatagtacaagcacgttctcactttctaaaagtactgcccattgccgtctacatagtttttcacacagttcaaacatgaagcttcattggtacccatcaccttactaccagggtcccgcagcttctgcttaggaaaaaggattcctgcaggagcattttaggaaatctcatcagaaggaggccccatcttccgttcctaaggacctctgattttagtggcccgggggcagccctctttattcctgcggcttccaaaattctgcctcttcctcagactcagatatcacagaattcccacagagagaacagatactgactggataacttttctttttactgctaaagctagttcctttgtcactattttaaaagttatgccaggcatggtggctcacgcctgtaatcccagcactttgggaggccgaggcacgaagtcaggagttcaagaccagcctgaccaacatggtataaccccgtctctactaaaaatacaaaaagtagccaggcctggtggcacacgcctgtaatcccagctactcaggaagctgaggcaggagaattgctgaacccgggaggcagaggttgcagtgagccaagatcgcgctactgcactccagctgggatgacagagcaagactccatctcaaaaaaagaaaaaagaaaagaaagttattttgtgtaaatttatttgttaactaaaagccttatcatgaaagttttatttattccttcaagagtttttgtatttcttcaaaagggatttgatttctcctttgccgttgagagctaggagaccctaggaataggcaggacacattgcttagctgtcaagtcagcggaagatgagattcgtggaacttcaggcagctctggtggggagggacttgatggagtgactgccctgcttccccccatatggtctcacctcagtgggaggaagaggagcatctatggcccctccacactccccctcacttcctcagttgacaattgcatggccactagctgctatagagcacaccctacagtcttgggaacggctggcctaaaagcagaggttttcagatttggggggcctttatccctttaaatttttgttaagagacagggtctttccctgttgcccagctgaacttgaattctcagctcaagagatcctcttgcctcaggctccgagtagctaggtctgtgggcacacaccactgttcccgacttcctttcacattgtggccagaaaaaaaaacagactttcatgaaactgtatttatcctgagcatatctgatgggctctgatgctcattttcctattccatttcattttttgaaaaaatgaaactgatttcatgacccattagcaggtcatgaccccagatcaagagacattggcttaaggtgggcggcgcccaccagcacgtactttctcagtggaacttggctggcaggtgcctcccagcccctcacagcgtggcaggaaatgctggagagcatatgatgtgatggaaggagaggttgagatttcgaatggagagagcaggatctaaatcctgcctccgtcccaaactagggtcacatagtttaacccctctcctgtgtctgtttcctcatctgtaaaatagagctaatggtagtgcctcccctgcttagttcaaggctgtgtaatcaaagccctttgcacaccaagaagcccatacaaaaggtcaattttaatttccttccctttctagaaccacctctaccctcaactaagcctaaagatgctttgtgccaaattagagcccagcctaatctggtatgggcacccttgctggtgctgggctctccacccagcgcagtctgcagctggtccacttggcttagtggtccgctcagcatcgggttcagcaagacccttggtgctcacgctttctctgtcctttgttcagtgcagccgctgcccaaaggggaccaagtgctgaacttctctgatgcagaggacctgattgatgacagtaagctcaagtgagtggctggagacacaggaaggggtggagagagccgagtcactcctgtcaggtagagcgccccaggctgcccagccccagcccttgggctcccgttggtgcttggccccccctggctgagccccctcccctcccactggggccttcttaggctccgctgctttacccttatccccagcccaaccccagagaaggaggctgggccaaggcctgatgtaccaccttccaggccacttggctaaaggggctcagggatgccctaatgagccaagtaacaggcaagctgaaggtggacctaaatcttccttctcttcttgcccctcagggacatgcgagatgaggtcctggaacatggtaagtatggcctcatggggtggtgaggggatggaagctcctgccagaatcaagaggaccagtacaaggtgctggtggcctcagagcatccctccttaccaccccacctcaccccagagctgatggtggctgaccggcgccagaagcgagagattcggcagctggaacaggaactgcataagtggcaggtgctagtggacagcatcacaggtgaggaggcctgggcaccagaaggctcactcttcagcatccttcgccccagcctgtgcccctgttgctgcctggctggggagaccctcgtttcccaggccccgacccccttcccttataaaccttgccctggttccctgccttgcattctggccctcaggggtaggctcttccaaactccctcttctcccaggcatgagctctccggacttcgacaaccagacactggcagtgctgcggggccgcatggtgcggtacctgatgcgctcgcgtgaggtgaggcaggcccatccccgcccttcttaggctgcttcctctgtcagtgcctttctctgcgtagtccttggtttcccatctttctctggcctgcatagacctactcccccaattcttcaggtcccagccctcacctgccccatttccccagatcaccctgggcagagcaaccaaggataaccagattgatgtggacctgtctctggagggtccggcctggaagatatcccggaaacaaggtatcccccaccccctgccccagcaggaagcagtgtgaggtcgtccctcccagcctctcgctgtcctttctagccctgggcttggtgtccatggggaccctcgtggaccacctgaggcagggattccttggtgtctgcaggaagcagagctggtccatggaagctcctggctctctctggcctttccccatcccatcaatccctccccatcccatcatcccttctttctttctgcttccacaggtgtcatcaagctgaagaacaacggtgatttcttcattgccaatgagggtcgacggcccatctacatcgatggacggccggtgctctgtggctccaaatggcgcctcagcaacaactctgtggtggaggtgagctggggaggaggcaggaaggccaggatgagacctaggcgtggtgagccagtacaccaacttggtcctggtgccacctctgtcttaagccacctttgtctcccacccagatcgccagcctgcgattcgtcttccttatcaaccaggacctcattgccctcatcagggctgaggctgccaagatcacaccacagtgaggagtggtggcaggactcgtgggccctctccggcctgtttcccctgccactccagcccccttgagctgggaactcaggctcctggaaaaacctgggcagtgggaggctcagctgcgggccattgatttgagcctttgagggaggatagggctggcctttgtgaagccagcagaggctgagaacctcaggcttccctagatccagagcccctccccatcttcctctctctaaaaacaaccctaccccccattgccaccttcactcctgtgtctccagctgattagcctcagactcttcttttattgtttttcttttgtaaataaaaagcaccaggttccaaagtagttt

SEQ ID NO: 666 - DNA, 16339 bp, Homo sapiens
  source 1..16339: mol_type = other DNA
gcagtaccccgtctcgctcggttccgcggcggccacgctccgggagacttccggcagggcgggcgcggggtcttggcgaacggtcttcggaagcggcggcggcgcgatgaccacgctacgggcctttacctgcgacgacctgttccgcttcaacaacatgtgagtgacacgcgcctagggccagccgctcttggccgggcctcgcttcccggccccgccagctccggccccagccgcgccttcccggccggaccccaagcccggacggggacccgcgagaaccaccccccgccggccaacgtgggcgcctccctggggccacagggtccagggagaggtgggcctggagtcgacgcacgccggccttggcgaccttggccgaggtgctcaaactttgtctctggaccctgcgagctggcaggttctggggcagcgctcgggcctccgctcgtggtcgctgtcaggaggcgctggggtgatggggcgagctggagacgcggcctggagcccacgacctgggcttctcgccctgccctactgcttgctggttcgtggccgggccgcgcctcttctgggcagagggcaccgccgacggccaggccgcagagggggcttgcgaggatcggaagctggtcagcagctgttgggatgtgtacatcgtgaagcccacctggtggccgtggttaaattgtatccaaatgaaatgacactgatcactgcgtcccctgcagcagatgctgtctcagtcatggttagtgtttgcaagtttagttactgtagctgcgcaccccggtgtacacacctttcctctgtgaggagtcacggcagatcttaggggaggctcgctgtgcccagagccctggatgcagtttctttggattcgagttaaggccagacctctgatttgcaggtaccaattttttttttttaagaaaacattttattatgaagattcccacacatttagaaaagttggaggaatttcaccatgtgcttttatagacacttttcctggattctgcagttaacattttgctacgctggtatctctccttccttcccatctatcagtcctggatccactttaaaaaaacaacagggcggtatgtgaaaactaaggacaaagtggttccgattcaagtgtcaggaagatggaaagaactatgggataagatggctgggaacatttcaaagagggggtgagccttgaagatggataacacattggtaagtgaggaagacggaagttccggagaaggagcggggcatgaaaatggggaaacttgaagtgcggtcagacaactgggatcagtgcgaatctagtggctggtttctgccactgagcagtcaggaagaaatgggtgaaacaggaggggtttagacttgatcctgtggaaagaattttctgttgggccagtctggtagctacggtgacttgtgttgaactcactgttccctgcattgttctgagtgcccacgtaataatccagttaatcctcacgattctttgaggtgctgtcacccccattttgtgtatgagtaaaccaaggcatggcaagcacaagtgaattggcccaggtgagaatgagtaaagcgaggaacttcatccaaggatattggctctggagcagtggttctgaaagacttggtgcctgtggtcaggggaccatgttagaaacgcacattccgtttgcgatccactgctctggagtgggtcttaacccacctggagcctctggagaggctcaccctctctttaaagtgttcccagccatctcatcccatagtcctttctatcctcctgacccttgaatcggaaccacttggtttttcgttttcacttactgccctgttgtttttaaaagtggatctaggattgataggtgggcagagagaaatgatgaagccagtgtagcaaagtgttcactgtagaatccaggtgatggattcaaattcttaaccactgagctctgtgggctgtcatgtgatgacagcaggtaaactgggcaggtaagccattcaggaggccttggcagtggcccagagacgatgacttgacagaggcttcagtttgggaggtgcagcatgggaggtgacagggtgccttgaagcttcaagaaaaggcagagcctcatggagaatcagttttaactgaagatctaggaaaggacaacagttttacatggaaatgaatagaaagaaaatacacaggaacacttgcaagaaaatattagatttcagagaatcatgtggcctcttcagaaggtgccagtaggggaactccacttattccccattttcttttattttttgagacagggtctcgctctgttgcccagacaggagtgcagtggcacaatcctaggtcgctttagtctcaagctcccaggcccaggcaatcctcctgcctcagcctcccgagtagttgggactacaggcacgtgctgccacaccccactaatttttaaatttttttgtggagacagggtcttgttttgttacccgggctggtctggaactcccaggctcaagtgattctcccacctaatccttccaaagtgctggaattacaagtgtgagccaccacacctggttcccatttttttgtatttacttgcctctttgattagggcattttggtagaaaactctgagaatgactcagattagatgatgcagttggaattgaaataatccatggatgtagaacactgcaattaatttaacacatattttattcttggaaaaatatttgagtgcctactgtgtgccagttctagagacacagcagtgaacaagacataaacaaaaaggtgtctttatagaatgtagattttcccctctaaacaccttaatgtatcataaagtagctgtgacttcatagaacacctgaaacaattttggggaccccctcaaatcctggcccacaccttgggaatcacagtgcggggagtcatgtggaacttagtgttcagttacaaaggaaaatagaagcagggaaggaaagctggaagtgagtggggattcagctttagtttgggggttcagggagactgcccttgaagaaagacctggggaagttaggaatgagttacatgaacactgggggccaggggagcttccagatagagggaacagtaagtgaagacacccctgtttcaaataggaggcaggccgcatggctggtacagagtgagcatgggagggtaaggggataacagcagagagttagaagggcagggcctggagaggccatcataagacctgaacttctctgccaagtgcaccaagaaacccaggtggaggggccaggaaggcatctgggcatgggcgtctcaagattaggtctgagctaaagatggaaatttgggggtcagcacaagtgtagaaaaaaaggctaagagtttgtaagatggcgccttagggcatcaagtgttcaagtaaaggagaccgtgtggctcagtgaggtgagaggagaaccccatggtctcagaagctgagtgaagacagcatttcaggctgtcccaggagtgggaagctgttcaagaggagctgatggctcagtgcacatcatatttgtacatttcttccaggaaagagaaattgaagatgcagatgcaggagggaaagagaattgcaggaggagggtcccgagtactgagggggtctctcgcccgcactccgtgcctattgacaggagagcaagtagcatatgggtgcagatgcctgtgtgcgtgggttcggtgggcggggggggggggggactttggcaaagacttcttcctgttttctcttcttagtgatgaaataggaagcccctgagatggcggggctggaggtgagggtgcgggtgggcagacaagaggagataaagcagttcagtcgtcgaaaggtgtggtggagtgactccctgcactgtattagagcagtgattctcaaggagtgggccagggtttggggtccccaagattgtttcaggtgttgtgtgaggttagagctatcttcatgatgtattaagaaggtttttcatcttttccactgtcattccctcacaagtagacagtggagcttcccaaggtgtgatctttcagcagcaagcataacaaatgcttgagaatcccgttgtcttttaagcaggacgttgcagaattgttaaaacaatgccattgttgtcactggattttgttttgttttgttttcggaagtatagtgatttttttggtaaaggtatttgtgttaacgtgtaattgatttattatttttgagtgaatatttaaaatttttaaatctcagtagatattacgcgtataaacaaaagttctttggagtcttcagtaactttttagcgtaaaggagttctgaaaccaaacagtttaagaactgctggactacagaaatatgatatgactagcattgttatgggtctcaaaggagaatttgactagaaatcagaagagaacagttgaaaagtagctggttttgaacctgacaaaatagtggctccattaattgactagggaagtgaggggatggagatgggttttcagaatgcagatttgggaatggtgtgctgggatgtgctggtgagctgcccacagcatcggagccaggttgggaggcatccactaagaacacgtgattgaacacataggaatggggatggtggggacagggaggtgggagtgtagaataggagtggggagcaaaaaccgagtggtgggagtgaccacatttagagggtggaataaaggagcaattgtcagggaagacccagacacaggcggggaggatccatggggttggatgctgcagcgggcgagtttgaccttctgtctctgcgagatacatccctagttggtctccagttccattagcaatttattgccacttagaaaacacaagatgtagatttattaacttgaattttaaagaagcaagtagcagttaagtgaaaaaatatgtaaacaccttaatagtggctgtgacagcttattatggctattaggtagattaaatcatctgcctcagccctaaagttggccttaaagttgttgatgaaacatgttttgttttccttgtggcatattactgttagctttagcaggcttatttcaactggttattgtaaacgctgcttactagagacatttctcttgtttctttcagtaacttggatccacttacagaaactgtatccttttttacaaaaaaaaaaaagttgaatgaagatttactgagaataaagaaaacagaaatgaaaggaaaacagaggagtactgaaaagtttaaaaacttgtaggtcaggaaacatcataagcaacactgaaagcaattttaaaaagtgaaactgagaacaagagttgtcttagatctgctgacaaactgttaatatcatgacttggtagaaatctgtaacatcatagctcccctgccaaccttgcccctcaggagtcagcatggctgtattcaccagaaagcacagtgacttcagcaaggtggctgcatagtctccagtgtgaacaaagtctggagataagcagtcccaggcaggtgatgcttccatgaagacaccaacagccaggctctttgcagtttaagcactctacccctcccagggtggccgtaaccttgttccagatgttgccacagcaaacagcatcacagccatgtttccggcagcagaaacagcagagggggaggtgagggtgttcttcccttttaagagtacctttgggcctgtactcccagcactttggggggccaaggcaggcagatcacgaggtcaggcgttcaagaccagcctggccaacatggtgaaaccccgtccgtctctagtaaaaatacaagaactagccagccgtggtggctcactccgtaatcccagctacttaggaggctgaggcaggagaatcgcttgaaccaggacccgggaggcagaggttgcagtgagccgaggttgcagtgagccgagatcgcgccactgcactccagcctgggctacatgtagagcgagactccgtctcaaaaaaaaaaaaaaaaggagagtacctttgggaaatgccacacaggcccgctctgtctcattgaccagcacctgtttcatgcttcacctgtctactgaatcctatctagagtccagaaatgtgccctgctttataaattgggacttgttactaaagtgaaggctttgaggtaacaatgaacagtgtctattattgtcctaatggaaaaatggggcaaagatgtgaagataggatactgtggttatgctgctgtaacagataaccccacatctctagtggcttacaacacaaagttcggattctgtgttatgctctgtatctactgtaggtgggtaggagggttctgctaaccggtaatttatcaaaagagggcatataggagcttaatgaacgtgttaagagttcagtctcatcagtcaaaagacatgtaaactaaaaccaaaatgagatgccatattttatgtatcagccaagattttaaaaaatgataaacctcagtgctgatgatggtgaggtgagaggaacattctcataaattgctagtgacaatataaattgctattatctttccagaaggcactttggaaatagtaattccatttcctgaaagctgaaaataagaagaaatagaggcagtttgtcagtggttgacaaaataaggcccataggccaaatctggcccactgcctgtttttgtaaataaaatgttattgggacaccacgctgattaatttatatttttttctgtggcttttgcagtttgagtagttcagcagggactgtatggcccacaaagcctaggatgttaactatttggccttttacagaaaaagtttgctaacccctgagttataccattacaaacattatttattgcaggagagttactaagcatttggaataagattcacacacaacaatcaggagatggttaagtaaattaagctgtactgaagaaggatttcaaacatttttttgagaaacaggaaatgacccaggtgtccattgtcaggatacaggctatttaaggtgtctcttcacataaagaaatactatacagcagtaaaaattaacttacaggtgcaggcagcaacaggactacatatcagaaacaaaactgaatgggaaaagcaaaaaatctctgcaggttcatctggattttttaaattacgactaatgatatcaccacttttaagatttttgaagaattttgaatgacaaaagtttcactatataggaaggaaggattttaggatgcaaatccgtttatatggtgtgcttccagtgacatttaaaatttgcagtgaaagtcccataatccaggtgagcctatatttgaaagtaacctgttaggtcctagaggtcgatgggagggaggggtgtctgggactcctctgttagccacagaagagatggttgtggtatatgtcagtggctggctggcaggaagactggctgtcctgccatgttaagggttgtatttgaggggtattcaaaataatgatggtccttcagaggagattttgaagaatttcgcacggaacaggttttccaggaacttaaaaaatatatttatgtgtgattgatggtgtcctctgataaattgcatcagaaagtttatactaacaagaaatatattttcatccattaaagtacagagtaaaaagaagaagagaaatgtaggaatgattacatgtcagtaaggatatcccaaggttgaagagtgaagtcatgagcaaattattcaggcatttactgttaacatagttgattccttaagtcagcttttatctgcattactagaaatgcaggatttgaatcagtggagaggaaaaactgggtaattaagttggctctggaaggacttaggttgtaaagttattttcacagtctcatagctgaagtcaaagtaggaactacccattaatttttcagtgcaattatgtaagcatcagtgtattaagcatctactgtgtaccaggcaccagggacagagggaacatgatattcatagactaagaggaggcagaccgcaaacaaacaatatcaggtgataaatggagagacttagatatggtatggtcagtagggaagtagactgtagaactttggggtcctgattctctgctttctattagacagtgctatcaccattccacacttgaggctatatgtccaggcaattttgttaaaaatcagtgataacctaaatatttcatgtaatggtatgtatgattataggactcatacagagctggggataaagtaacagtatactttttaaaggaaactttttttacaatatcccttaatgaagaactttttactgtccattacttttcacactccttaacaggactctagtatgggattcctttctacctacaatacctcgcccactggccagagtatttcattgttgcagaggcacctggtggagaattaatgggttatagtaagtataataccactagtattttgtggagtaggtaaagattttaatatagatttcaactgattgctttagactgcagaattggaatataatgatgcttgtaattttatttcctcttcaacaattcaagaacttactgatctctgttttgggcactgtgctaggcccaggcgataacggcagtgaaccagacagacatggtcttagtcttcttaaatctttcattctaaaaaaaaaaaaaatctttcattctaaggccaggtacagtggctcacgcctgtaatcccaacactttggaaggccaaggcaggcagatcctttgaggtcaggagttcaagatcggcctggccaaatggtgaaagcctgcctctactaaaaatacaaaaaattagctgggcgtggtatcgcgtgcctataatcccagctactcaggaagctgaggcgggagaatcacttgaaccccggaggcagaacttgcagtgggctgagatcatgccactgcactccagcctgggtgacacagtgagactctgtctcaaaaaaaaaaaaaaaatctttcattctatacttttgttaaatttctacatggtttatttagtacataatgcaggcatcatagcatcctcattgaattagcattactaacagaacctttagctctgaactatatgtgtacatccacatgtacccacatatacccacacccatatgaaatgcagatatttgaaaaaatacatactctggttttttttttttcaaaattagttgtgttttaagtatatcgttcttttttgttctaattctgattttagaactattctaaatgtaacagatagtgttacatttacaagtgaatttcaaataaaagcactaactgttagctggatgacctcaggtggtacttaaaaacttctttattagtttcctttgtaataaaaacatactgaacagtaattctatatttatgtgtaaatcaatgtctagttactgaatgtgatttttgttgttgttggcagttatgggtaaagcagaaggctcagtagctagggaagaatggcacgggcacgtcacagctctgtctgttgccccagaatttcgacgccttggtttggctgctaaacttatggagttactagaggagatttcagaaaggtgagattcagtttttcaaatacacttagtgatttgtggacccctaaccattttcttccccttcaggctgaataactgtcatgctttacagttcacaggaatttcatcttccatctccagtagtccttagaacaattctatcacatagtcaaagtgatattgtttctattttgccattgaggaaattaaggcaaagtgttgtagtgacccgctataggcctataagctgaggaattggtgcaattcagttccaaaggctagctctcgaggtttctcttagtgttcctgccacagtggcacacattcctaaaatctgttaccattgctttggcatctgaataaatttttagcagtgctcctcggccaaaagaaaatagttcagtcttaagcagttatattctaactgtttaataagtatttatagcctaacagctaatagccatttagaaaaaaaataaattgaaagaagaaatattttcatttcattcttaaataactgtggctagctaccaatgagaggtgtgcacctgttggacattaaatgacttggcagaaccacttgcattcctgtttcatattgattttcatctagtatttttttttaatcacagcaactgccagaaactcagcttcatagaaatattatgtcattaagaggaatgtagcatgatcttacgttgaatttgtgaactacttcaaactagtttgccaatatctgacatgtaaggttttgctgttttccctgaacattcgaaatatcctttggtggctgtatgagtttgggacaccttagggcacctgagtgcacagtttgcgaactgccagcatggcatttttttttttttttttaagggacgtgttgtatatatcaaacctcttcattactggagataaaagaaatacaataaatagaagagaaggcccctcctcgtatcttcattctagaagagagatgtttgtagtagcttcacctgttgtcaagctgccatttctttctccactgtaatttcctaaaagtgtggtaggaaagagaatagttgctgagaagggttcttgagcttaatttctacttaattattagatttaataaaggcaagttttaaagaagtatctgtggcctgacaaagacttcaagccaaattagaggcaaaggagctcaaactcattcagagaagaaattgtgttagctgaaaaagaagtcggtgctaatctttaagattttttaaagttctctctagaccaaacaaagaagggaagaaaattttagcatgattatagtttacacacatttattaatggcattatgttgaaaaaaagtatttggcattattgtatagtgaacagggagttagaaagtgggttgttcaatgagaacacatggacacagggaggggaacatcacacaccagggcctgtcgggggtgggggtctaagggagggatagaattaggataaatacctaatgtagatgacgagttgatgggtgcagcaaaccaccatggcacgcgtatacctatgtaacaaacctgcacgttctgcacatgtatcccagaacttaaagtataataataataaaaaaaagcaggtcgtaactagctatgaccttgcacatataatttagggtatttgtatgatagattctccctctgagtagaagaccactaagctctcttcccttccagtttctaagccttcattattttagactagttgctaagatttaagtaatcttcatttgtaggcatatatatacatatacacatacatgatacatatacatatgcttatatacactatatacatgtatacatagtgcatacaatgtatacattaaaaatagaaaccaaacaagtagaggagaagaaaaattgaatgatagaagtcaactccaaagaagagaaaaaggaaattaaaccagcaaaacaaaatgcatgaaataaaatggtagcccagaatccaaatattgtcagtaattacaacagtaaacgttaatggacttaggactttatttatttattattagttttggagatggggtcttgctctgttgctcaggctggagtgcagtggcgtgatctcagctcactgcaacgtctgcctcccaggctcaaatgattttcctctctcaccctctgagtagctgggattacaggcgcccaccaccatgcacggccagctatgatgactctatttaaaagacaaaggctgtctgtattgtttacaggaaatatgtgtaaaatatattaaaatatttttaatacagaaagattgaaagtaaatttttaaattaccttgcaaattctaaccaaaagaaagttagaatacttattaataatagttatagttgaataattattaccagcataaaaaagggtcactgcatattgataaaatatttaatcaaggaagtaacaagtctgggagtggtggctcatgactgtaatcccagcaccttgggaggccgagacaggtggatcacttgaggtcaggagttccagaccagtctggccaacatggtgaaatcccgtctcgactaaaaatacaaaaattagccgggtgtggtagcacgtgactgtaatcccagctactcgggaggctgaggcaggagaattgcttgaacctgggaggcgaagattacagtgagccaagatcacgccattgcactccagcctgtgcaacagagcgagactccatctcaaaaaaaaaaaaaaaaatagcgatttaaaatggtatataccaagtgacatcatttcaaagtaaaaatgcacaaattgacaaaactacaaggagaaatagacaaattattattataatgggagatttagacatgcttttttctaattgatagaacaatgagatagaaatttgtcaagcctatagaacaagaatcagcaattttcttctgggtcagatagtaaatattcaggcattacaggccacctaaagtcttggttacatagttttttgttttgttttgttttgttttgtttttaacaaccattgcaaaaaccattcttagcttgaaggcagtagcaaaataggttataagccaacccctgccctaaagaatttcaatcagtagcccaaaatcttttcacgaagaaagctgtggcttctctggccaattttactaaacatttaagaaataatgactgaaaggtcacttttacacaaactattttgcacaagccaaaaaagggaacattcctcaacttattttttaaggccaggataaccttgataacaatacttggcaaaatatgggaaaggaaaattcgaggaacatctcactcagatgcaaaatctcggaaaaataattagcaaagtggatttggcactacataaataggatgacacatcaggaacaaggtggtttcaactttacactaaaggagaacactggttattttagaaagtgcagcaaacttgataaaatccaatattccttcctgataaaaactgttagcaaactgggaaatagaaagggggaacttccttaacctgaaaaatatctacaagaaatttgtagtaaatatatttagtagtgatacactgaatgctttccttttgaaattagggacaagttagtcccgcttcagtaatttactagaaattatagcacaggaaagcaggaaaaaataaacgataggaggattgagaggaaacaaaacttattttgcacagatatgattatataaatataaaatccataagaatataaatatttagaattaataaaaggcaaagttgttggatataaagtcagtataaaaatcaattgtatttacatatgagaggaaacaaaacttacttattttgcacagatatgattatacaaatataaaatccacaagaatctagaaataaatgtttagaattaataaaaggtaggcaaggttgttggatagaaagtcagtataaaaatcaattgtatttatatatatataaacagtaaaatttagaaaaagatgccatagcatgaaaaaacattaagtacttaagaatctagcaagtgctatgcaagacctctctgacatttaaaaaacttttttgagagatattaaagtagccctgataagtggagcgataaactatcactggattagaggatacagtaaacaggtaatcgaccgcagttccaatgtaattgcagtcaaaatcccaagcattttttatagtacttgttaagctgactctgaaacatacagaggaacagaaagagcaaaaaagagacaagatattcttgaacaacaacaaaaatgggtgatgtgcccctccaggtatcagactgtaaagagtgagactatatcttagtgctgtagttatctagaccagtgttacagaatttgagaaacagacccaagaatatatggactttaacataccacagaagaggcattgcacatcaatagtatgaagatagacttttcagtaaaggtggttggacaattggatgtccctatgggaaaaaaaaatttcccagattaccattattccatacacaaatcaactccagatttattaaaaacctagatgtgaaaccaaaactaagaagtcttttgaatataatatggcagagtgtctctgtggcctcagtgtagaactttttaaaaaggccataaaaaggctaaggaaaggattcatatattcagcttcactgaagtgaagtaactttttatcaaaagataacataaggataatgacaagacaaaccacaaattggaaaaagatacttgcagacattacacagtattgaatattcacaatacatagagaactgtagcgggggaaaaattgtatgaaagatttaagtactatacagaaggagaaatctaaatggccaaccaacagaaatatattcagcattgttagtaattggaaatacaaattaaaatctgagatatagttacactgtaagattggcaaaaataaaaacatgtgatgcaccaagccttgttgctgtggaatggaggcttactcacttctgtgcaagagtaagttggtacaagccagttggaaaaacagtttggtattaactaatgaagatgtgccctgtgacacaacagtgagactcctagctatagaccttacgtgagacactcaacagaagtattcacaggagcatcgtttgtatagtaaaagccagaaacgtatcaacaggaccgtgaatgacttgtgcacaagcccagccactcttgaagctgactcttacaatgttagtcgactgagagaagcaaaagacaaaagaatatatgattccatgtatataaacttcataaacaggagaaactgtaataggtggtgaatttgtagaacaaatgccttgagtttatcttttaagaaaacgtgttgcttttgaaatactagcatgcaaacataaagtcatgttcttacactgcaaagtaattgtcataaatcctaagtaatacaaatttctattaccatgtaatcagctacaaggtcctattactaccattctgagtagtagtcaaagcaaggtaaaaacacgttttaaaaaaaatatgtatctattactttctagggtttctcacattctaacattttccttttttgtttttcttttaaagaaagggtggattttttgtggatctctttgtaagagtatctaaccaagttgcagttaacatgtacaagcagttgggctacagtgtatataggacggtcatagagtactattcggccagcaacggggagcctgatgaggacgcttatggtaagctcccttccatggcagtatccccaagaagtcgaaacagttacattctttctacagattgtagtatttgattattttaataaatgtagaatatttgactttaaaatttaaatttccctcaacctacctttatcaacctattagtagtagtaattaacttacctattaactaaccaatggttaatttctgtaccttactgtttcactctgttacatacatattattttgctaacaagaaaacgtgtattgtgagctgaatactgggtgaggtctggttagcatctggtacacttggcaattgggagacatttataaatacattttgcttagaatatggtgaagtgggggtagggataaaacctcttatgggaactttacctatacactttacatttgatataatacattttttgggtgtttatattaaactttgcttctttacagatatgaggaaagcactttccagggatactgagaagaaatccatcataccattacctcatcctgtgaggcctgaagacattgaataaccctgggcagtggttcttaggcagatactctagatgctttatggacaatattattttcattggatgattctggagctctattaggagaaaagtaatcattttaggtcttaaagacttcaagaaaatacaggttatcaatttattttaaatctcattgtttccagttagcaatatcatacctattaaagctgttcattgtaacaaaattcaatcaaaaaggcagctaggtcagaaggaaacataccactctcatggttcatagtattcactgtatgtatgctagggaaaagacttgctccagtctcctcctcagttctgtgcctgagaaccactgctgcatatatttgtttttaaattttgtattgaactgttaattgaagctttaaaagcatatatgaaatgtataaatctaagatgtataatacattattgactctatgaa

SEQ ID NO: 667 - DNA, 22195 bp, Homo sapiens
  source 1..22195: mol_type = other DNA
aactttacccggcctaacagctgaggcgctttacggcgacggcggctgagtgagaaccttggcggctgtggaggctgccgcggctgcgaaggaggcggcggcggtggcggaggaagaggagtggcggcagcggcggcggggacccgtgcggggtgagccgtgaggaggggccgcgagtgacagggctggcgggtgggcccgggcggacggggacggtggccggctgagcagctgggcggcgctgaagagcgggggggtggcggggaattggggggcagctccgtgagggacggtttctgcctttgttccccccacctcggccgccccccatccgtcgccccctgttctccgcgctcctcggccgggtttcatggcctcccctctcggtctgtgtcgcttctaggatggcggaggtaccgcctgggcctagcagcctcctcccaccaccagcacctccggccccggcggcggtcgagccccgctgtcccttcccggcgggggccgccctcgcctgctgcagcgaggacgaggaggacgacgaagagcacgaaggcggcggcagcaggagcccggcgggcggagagtcggcgacggtggcggccaaggggcatccgtgcctccgctgccctcagccgccgcaggagcagcagcagctcaacggattgattagccccgaactgcggcacctccgggcggccgcctccctcaagagcaaggtcctgagcgtagcagaggtggccgcgaccacagccacccctgacggaggccccagagcgactgcaacaaaaggagccggggtacactcgggcgagaggccccctcactccctctctagtaatgcaagaactgcggtccccagcccggtggaggcagcggcggcgagcgatcccgcggcggcccgcaatggactggccgagggcaccgagcaggaggaggaggaggaagacgagcaggtgcggctgctgtcttcgtccctgaccgccgactgcagcttaagaagcccttcgggcagggaggttgagcctggggaggatcggacgatacgatatgtccgatatgaatccgagctacaaatgcccgatatcatgagactgatcaccaaagatctgtccgaaccctactccatttatacctatagatattttatccacaactggccacagctgtgcttcttggtaagtggatagaataaaaagagggtgaacccagcagtgatcgagactgtgcggggcagggagtgagggcccagaatgtggcagtggatatctcctgctgcgtatcatagtacgttatatgatgtcaagtgctgtacacattcctagttatttaatgaaattgttttgaaggtaagacttcatgattcgggttaacgtgatactagtgtaactgcagcaagcctgtatggtggcgtgtttcactggggtgggggtcttgtgtcttgtttacattagattataatcgtgtttaaccgtctttaattacccgcccgcatcctcaaacactttacagtcatttaatttgaacatggttctgttcagatacaggccttattagtctctcgattacaaccataatcagggaagagtgtatgcataaacatgttgtggtgaacatggatgtcagcaaacttggtgtggtcatattggagaattaaatcttacaagcattttcggtaattatggagatgtttctctttacttcaactggacaattaacagttgtagccagcctgctttctggtactccattccagaaagcgctactaacacttctggtggctgaaagactcctgaaacttgaacaaaatacccttttgtggaatgtagaaaacttgtgtgaaattgttaccgatctgatttttttttttttaatttaagaaactggttgtagatgtggccaaacactagtaacactggcttgtgtagagtataattgacaataatattacacgtaagtgaaagacttttggacggtttttaaaaattaacatagtattggcagtaccagtaatttcttcacaataatattgacccatttcagtctgtatgaaccctttaacttaaacgttgactgcaggtgtatgctttgtatcatgtgctcacaagcatattgtttctgttgaattttactacagaaagatgacatccttttaaggaatattttttaatatgtgaagggaaaagccaccattacttaatgttttagcattggcttagtttcacttggtaattccctgcaagatattttgacaatacttatctttttgattctctagcttggtgataatttgaaaatgtaacctgggtattgtagataatggtagttctattttctgtcttaacttgcttaaacttcaattcagtacatttgttaaaactgtgggtactactttatattcttgaaaactgctctttcagtattctaagcattgtatcagaatagttctaagacatgtctgtgtcaatgaatatgagaaaatgatttatagcactattataaatgtcatatcaaatgccactgtaattgctaaaaattgtagatttagttgtaagttaacccacagaagtagatgattgagtcacatttcaagttgaaatagatgtttttctgtcaattccaggaaatagttgtgtatatgatatttagtcaactttgagtcctgatagttacctaagcctctctcaacttgtttgctattttagactctggtcaacaatattagtaaactttagatttgattttatgtagaaccctcccaattcaccagctaatgtgtatgttagcctttagtagctcaagtttgtttaatattctgagtatctagaattgcgatatgcacaagtggttgacctataagatttactggtgcaagtatgaatcaggaggtattaaacaataataaaacagtaaaaaaacaaccaggccatttaaaactgaagcctttatcttggcatacttttaaatttaagtttcccataggaactatttttttaaaaatacagatgcgtaaatgtctgtttattttaaatcatatccttttagaactgaaagccatcctagagataatctagcccaacttaggttttgttctgttttgttttttgattgaaaaaaagttaagaaccaaagtgacttaaaatgtttcaatctccagatatttactgacagaggggtaggttttgttttgttttttgattgaaaagaagttaagaaccaaagtgacttaaaatgtttcaatctccagatatttaccgtcggaagggtaaagctagaacccagttctcctggcctctcattatggtaacaaacaagaacctgaaaaatgacatacccttgatccattcagtgaagattattgtgtcaccaagttatcttcaccaagggacagttgcccttacatcaatctcaagagattaaaaacctccaaaatgttccgttttccgtggataacctgtaatgggtcaatggagtatatggggttgaaccttacaaaattgccaatacttgattaataaaaatgatagcttattatgattcttcctaattgtaaaagatgtaaaaaaaaaaaaaaaaaaggacaaatgtgagacactttcagttactctgtacttaaccattttatctttacctgttttcatagtaacattttcagttgttggtatctttttgaagttcttaaacttactctcagcaaatgtaacatagtacttccatttatttgttctaaatttaactttttggcttcctccagttttctatttgtagtgttctagaatttgggaatctctcactttatttttttcatagttttatagactgacaaccctttggccttgtagtgttaagtcttaatcttgccggggatttttcagttcccatccttgaaaaaatacatttaatagcgtgaattccaaatgtatatgcagagcttttatttggaaaaattgacaagcaatttagtgattcctgtaaatgtaccacatattcatgagtagtttatcaggaaaaaaaaatgcagcattggtcttcactactaatgtcatcgtaatggtgtatgatatattgggctttttagatgatgtatacagcttgatttttgctcctatagattctaaattaggaagaaatcaggtcttaagaatgaactaatttaatattttgtttgcttattccatgctcaaaggacaaagatttgtttgaaattcctgttcagattgaaagtactgtccagttgtattgtgtttaatggttttaatttttcctcatttttggatagttttatataaggtgtagctattctgaggtttgtatcatcaatctaatacaggttttcatttcacctgagcctggcttatgaggtcaggccaaaattttttctggcccttttaaatataccatttggtctgtgataattttatgtatgtgtatgtatttatacgtgtctgtatatacgcacatatatttgaagtgagtttcaaatcagaaaaagctttcagagttggtcgaggcgatttttgtgcatacttcaggtctttgtttaaaaaatttttttaaaagattgatgtattgtgagggaaaaaattagaaataacaatttcagaggtttattgacccaaaatagttttggaatgtgtgataaaccagaaatgaattagcgtgggttgttgaatttcatattccttcaaaaggatttttccgacctagtttaggtttgcatgaaatggattagaattatcttgctgaaaagatttctccacagttaaaaaaaggccttttaatcaatttacagaatgacagactaaaaaagtcacaaatttaaaatatgtattaattataaattggacattacttattagttttttgactcatttctgcttttgttgaaatagtttcttctggaaagttaatttatggaaaacagacttcttactgacacattatttaaacagttggagatactgccctatttatatttaccagaaatactgtgttactagaactttttatcagcattggaatttttgaaaaacattttcaatggtaacactagaaatcttaatgaaaatgggggatgattagaatttaacatgtagcttttaatactctggaaagctgtacgtttttattaaaatagaaatttctgtaaaattaaagcttttaacataaagctttgattttgaactataaatattctgagagctttatgacagttatccacactatcaggagtatcctaaaaatgagactatgctacacttacatatattaacaaaaacctcttgggtatggtctaagcaataccttataaactgtgctttttctgaaaatttttaatttttttttcctgatcgaaatctaccattcaggtgtaaatatgtattatatctggctttcactaaaactttattattaaatttattttcatttttttcttttattgagatggggtctcactctgtcacctaggctggagtgcagtggcacgatctcagctcactgtagcctctcccttcctggctcaagccattctcctatctcagctttccaagtagctggaactacaggtgcatgccaccacacctggctaatttaagtaattttggtggagacagggttttgccatgttgcccacgctgatctcaaacccctgagctcaagcaatctgcctgcgcctgcctcccaaagtgctgggtttacaggcatgagccacagcacctggccattattactaaatttaactgaatatatttaaatttacattctgctgatgggcaagttttacaatattttatgtcctaatgaatagactttttctttataatcattttttttttgcatatttccccttccagaaccttaggtctttgttgcaaataattgtgattttaagcacctcatatgtaatcttataaagtacttgaatgtttaccttgtggaatcttgtcttttttccctaggctttaatagtaagcataaaaaattcatgttctaaagaatattgagaaattttaacactggaacatttaaaggagttaggggatttagatttctgaaacttctgtgactgctgtcttgcaagagttcccattatcttcccccgtcgaaaatgcttaccaatggttggttgttgttttctctggataattgtgcagtacctgatggcaatgtattcttcataactgtttgtttatttttaaggccatggtaggggaggagtgtgtaggtgccatcgtttgcaagttggatatgcacaaaaagatgttccgcagaggttatatagccatgttagccgtggattccaaatacaggagaaatggcattggtaagaaaaatattattttatggaaagaatgcctaagctattttcatttttgttgtgttttgaaataaaagacttaaatgtaagtatgtagaaatgaaagaaactaagggaagaaaattaaggcgggttttaatttttaatttcaaaatggtatttttaaaaagttcttaaaatgaattttttctttattaatgttttgtttgacagtttttcgttttaacaagtagccgatcatcagctttcacctgcagatttttttaatcacattcaaaatgctttgcattatgctaagtaccacaagaaatactgcaatttataattacattatgatggtccttcatgccagccttcaagcacttgtctgtatttgggttaagtggacctcaatcaagccaaaattatggacaaattgttaccattacttggtgctagtcatcaactatatattgcaattcaggaaagatcaggagatgagaattgattgtttcttgtaattcccaaacttaattttttgttgggtctacttttcctgacatgtttagttaatcttaacactcatgatttataatgatcattagaatcatgtgggtggtttaaaaacatgtatttgggcccctcaccctgagactcttgtttgtcttgtcagaggtggggctgaagcttccctaggtgactgtgatgtaagcctgattaagaaccactcttctatggctgggttagataacttttgtcatttaaataacgccataaaactcaataggccaccaggtgccgggtgcggtggctcacgcctataatcccagcattttgggaggccaaggcaggtgagtcactaggtcaggagttcaagaccagcctgggcaagatggcgaaaccctgtctctactaaaaatacaaaaattagctgggagtggtggtgggcacctgtcatcccagctactcaggaggctgaggcaggagaattgattgaacctgggaggtggaggttgcagtgagcgtgccactgcactctagcctgggtgacagagcaagactccgtttcaaaaaaccactcttctattctctaggacctagtggctctttgttcacagtggagaattgggtagacaagcatttgtctaagcatgtcaaattttgtgatgtgctttagctgagtattcataaaaaaaagtttaatacctgtaccagtatttaatcattagttttttcactttcatgttttttaaaaactattaagtgttattgtccaacctaagactcacacacggtcctaggtatcatgagaagtaactataaataggtttacttaatatgttaggtttagccaactttattgcagtgttacagctttccactaagatttttaatgaattgggcttgttttatggactaagtttgagcctttgatgcattaaaaagcactgataaggactcatgataaattatagccaattgtttggctagtttggagggcagaaaccagtggcttttgggttgcatcctggccttcagacatactttgtttgggccataaaatgcgtgcatacttgtatgcatggcttgaaaattaagagtttttaatttaattttattattttttgagacagagcttcgctgtattgcccaggctggagtgcagtggtgtgatcccggctcactgcaacctctagcacctagattcaagcaattcttgtgcctcagcctcccaagcacctgggactacaggcacacaccaccacacccagctgatttattttttttattattatttttttttgagatagtctcactctgtcgcccaggttggagcgcagtggcatgatctcgactcactgcaacctccgcctcctgtgttcaagtgattttcctgcctccgcctcccaagtagctgggattacaggcaccctccacctgtaatgcctggctaattttttattttttagtagagatggggtttcgtcatgttggccaggctggtcttgaactcctgacctccggtgatccgcccaccttggcctcccaaagtgctgggattataggctgagccactgcacccagccagttttttgtatttttagtagagatggggttttgccatgacctcagcctccaaaatgctgggattacaggcgtgagccaccacgcctggccaattttttgtatttttaatagagacggggtttcaccatgttggccaggctggtcttgaactcttggcctcaagtgatccacctgccttggcttcccaaagtgctgggattacaggcgtgaaccactgcgcccagcctaagagtttttaaataaaatttgtctgtctgctcttaaaatcagatttggcaaattttttcccttttaatataccaattatatttgaccctaaactaggatacattttgctagacatgtacagacacaccactgacatcattgggagtgccagacttgccagacttcatcgtgctcactgtaaagtttataggaacctactgtgggtaacagcagttctgatgaggttgtcttgtcccttgtgtccaggggagtttgaaggatctttggtgagatcagcttgggttatgcagtaagttctggccaactcacggggagttcctgcgttgttctggccataccatatcttgtctttttctctttcgctttcctactgctttcaaacacaatagaacaaactcctgcttgtggcaaataattatgtctgagaaaaaggagtatattgggagataggtctttcaagaggaaacatactgttatgtataggttctgttggcttctcttagcttatagctaaaatttttcccatttaatttgaggtaatccgtgtatctggattcaagatagaaactagcatttgacatttctgtgcttacgaatattataatttaggttatctttaagaaatacatttttccttcattaatactcagatctatattctaggtactaacttggttaagaaagctatatatgccatggttgagggagactgtgatgaggtaagtctttaaaaatgtttaatattttttatctgggcattattctttctgggtatttttaataaatattttataatttattgcagatttcattgcagtgttactatacaaatgcagcttgtggggaaaattatattccatttaaaaacacatgaatttttgacctagaacaaattttaaaatggagctaaaatttcttcaaaatgtgtggggggaatcttagacattttcagtacacaattttggtattcagaggctttatcatcagttatttaaggtagctcttattacagactctgttataatttgcttacatattggccttagtttctgacaatgggaaactgtcagtctatatggaggacatttcacacttgaaaataatcttttcagaattaaataatgacaatgttggctagggggaagacaaccacttttaaagagtagagctatctgcgcattaacataagagcattttctctcttcagcttgtttgtaaggtctgatggcagatatttctttgtatcctactgcacggtgtttctacatatagtaggtgcatgataaatattggtgatgattgggaatgttaacatttactgttgcacagtgtggaagggaacaagtataaactagagaagtatagatgtctttaacatagcagtggtgactaaggaggagcaaagttgtactagtacttttatgagtaatagaagtagcaattgtctttattattagaggtcagatgtgccttagagaattctcaaaatatgtgaaattgggtaagtttttttaaaaggttgaccttaataaataatttgtttagtgacttaaaagaaatggagtgttttggtacaaaatttatacacagtcagcatatatgatatatgtatgcatgtgtttttgttaacaaagtcccttctaccattctcatgcttttcaactctttatccatctttccattgatagctactgttttttgttgttgtttgttgttgtggggtttttttttgttttttttttgtttttgtagagatgggagtcttgctatgttgtccagctggagaccactccagctcctggcctcaggtgatccttccacctcagcctctcaagtgttgtgattacaggcatgagccgttgctcctggcctgttgctactgttaactgtttgaaatgctttctctcattttttaaacacacctatgtgcaaatatatagtttttaaaaatacaaatgaagtaattcttattcaataattattagcaataataattgcttttttcttttaacaatatctcatgaatgcatttccgtgttagaatacagagatttactgctgagcattctcaggctccttgttcacattaggctctattctgacagatccattctaagtggtggttatatgagaaggcctacagacatagtgggtggcacagtgaagtcatcctgggatttaaaaatatctaattttactccaaagaaataattcacaggtgttgaaggatctcacattgttcacagcttttaatattataatgcaaaaggtgcagtcgccaaagctttacatgactggtaactgaaatttcgaggagagaattggatcagatatgttcatgagtataggtccatgtttggaccatagccacactgcttgtcagctcatcgagaaaagtcaggtttcacaaaagttgcttaacagcttggagaaatcttcgggataatagatcatgttttgatcttctgcagatccagtgaacaggggtgttaagagcagagagtattatgttccctatgattaaaccttttctgagttatcctacttgctatcctaagttactacttgtgaggcaggctatgtgcttttgtttaactgttcaaaggtttggatagtgttggcttttcatgtaaagatgtcaggaatgatatgaagatttttattgttttggtctcaaggttaaattctaaattaatgatatattttatggtagaaaaacttcatttccagcctaaaaagctaatgctgattcattcattttttcttttgaaacaatgaatgttacttaatctttaggctgacatcagggatagctttgtgaactttctccttttgtatgattatggttttgcagtttgtgaatacctctgtctctggattagataactttgtcttggtataaaaattttgcttatctgtgtccagtgttattcagatcgaataatttgccatacgaactcttgtttactctttagaagatatggtagctatttggttttcctttgcttgttaaaatactttagtctttaagacccaattcaaataccaacaactcctttaagtttttcttgatccttctggacagaatccatttcacttttctgttatttttgctactctttttgtaattattgcacttaatttcacttgttcagtgccttagcacaatgtaggacagagatgccttctcttgtttgttgctgtattcttagtgcttagtgtgacatttgtgatagagtacctgctttgtaaatattttttgaatgatcagttctgtgcttccagcatgatgtttgtaatccctctctctcttgtttaagtacttttaaattttgacttgtattgttattaacttgtctttctctctgaactttctgtgtgctttctaaaaacaccaattgtcttatttttgttcatagtaggattttttttaaaaaaaggcatctttagggttaaccaagttgttaaaatgcctttgaaatgataaatctccaaaaatacagcgattaatgaaaaggcaaataaacatgtgctttcactttcattaatttagaccaaccttcctttcttttaaagggtttagaaattttgacaaattatctgaaaatctgtgaaagacatttcagaagggttttaaattagattttctactacttaggttattctgctatttttaaaattcttacaaagagagagattttaaaatctgtgaaccttttaatagaggtacatttggccaggcactgtggctcacgcctgtaatcccagcactttgggagtccaaggctggcggatcacttgaggtcaggagttggagatcagcctggccgacatggtgaaaccccgtctctactaaaaatacgaaaattagctgggcgtggtgccacacgcctatagtcccagctactcgggaggctgaggcaggagaatcgcttgaacccgagaggtggaagttgcagtgagccaagattgcaccgctgctttccagcctgggagacagagtgagactctcataaagaaagagatacatttggaaatctccgtgaaaccttactgtgctccgtggccggaaaaaaaaaaaaaaaaagatacattggaaatctctgtgaaaccttactgtgcacatcaaacaatttttactttctattctgtatacagaatttgtgaccttgagtcatgtttatattgttctttgttgttactagtcattttaagctcagagtattcagccagttattagtaatcacagaattgaaaggtagatgtttttctccaaataatgctgcactgttcctagtctaattgatgttttcattttgtcttactgtaagtttcccaacttttcatatcagaattagacatatgttaaaacagtatagctaaaaaattttttcattttctatgtatttggagctgactaaaaaattatagtatcaaaacaagaaacaagtggatttgttacttgatgagtaagaaatatattaccagtatgctgatctggcttaaatttgtttacaccccctgcacgctctggctgccagatgtgtagtggctaggacaagtatctcaggttcatgtttcacaatagaagaaagaataagataaatacatatagaatgaatgagttttctatgatgtagattttaaaataggatctgtgtacctaaaatcaacctacttggtggccatttacatttatgtactttttttcctgaagtaaattagaatatgggcaggtgattgatcagtatcagtatgatgaatagtgcctcgatttttaagccattgatatccttaaaatcttaatctctgaaaacttcaaggttgtttttgttttgttttgttttgtttgtttgttttgtttttagagttttaggctgagcacggtgtctcacgcctgtaatcccagcactttgggaggccaaggtgggtggatcacgaggtcaggagttcgagaccagcctggccaatatggtgaaaccccgtctctactaaaaatatacaaaaattagccaggtgtggtggtgcgtgcctgtaatcccagctactggggaggctgaggcaggagaatcacttgaacccaggaggtggaggttgcagtgagccgagatcgcgccattgcactccagcctgggggccagagcaagactccatcacacacacacacacaaaaagagtttttaggtcgattactgtgaatatgaatagccagagataactgatcagaatacagtggaattaggatttcttaatggaatttatagtatcttaaaatatttttagttgaaaatcacgtcatctaatttttgcttatttatattaaagacattttttccattgaaaaaccgtaatgaacattacagaaaacttgggaaacagaagaagaaagttcactacctacctttctagcacgttgtattagtccgttttcacattgctgataaagacatacctgagactgggcagtttacaaaagaaagagtaccacgttggatttacagttccacatggctggggaagcctcaaaatcatggcagaaggcaaggaggagcaagtcgcatcttacgtggatggtggcaggcaaagagaagagagcttgtgcaggggaattcctctttttaaaaccatcggatctcgtgagacttaattcactcacgagaacagcacgggaacgacttgccccatgatttagagactcccaccaagtccctcccacagcacatggggattcaggatgagatttgggtggagacacagccaaacagtatcacacatccaatttggtgttttctttccattctttttttgttgcgtacatttatttttactagacagtttcttctgtaaatagtatgccatgtaacttgcggcagactgtttacaatctgctattcaaacccatgactttccctgcaacctgatttgcttgacctacttaatgctacttatttctagcaatataaaggtaatgcaaaagacattttggtaaattttagataatatagtagctgactctattttgtacaattaaaagaataaaatagatcacattagcactaatgagtaaattagattattaggagccaagaagatctaagttattttttgaaataacttatacttttctaaattagaaaagtccaacttagaaaaggtacagtcattctttttcccccattataaaaggttactttttatctttttaattagactatatttattgtgtttattatgtatttactaataatatatatgtgtatatatatatatataaaacatctttagtttcactggaaacattatgctatgtgatagagcctgcaaggtaaagaacagaatacagtggggttagttaagctgcaaggattttgggtgagtagtttggcctaataactgattatgagacacctggtttccatatttatcttctgtcacttggcagttgtgtgattgtaggcaggccatttaactttttctggtctctctctttgtctatgcaacatgatgttaattctgatcttaaagatacgttgtgaagagcagtactgtttgttgttcattcaggaaatagcagtggaagggcttctaggtgccagacagtgtggtagtgctaaagttctagcagtgaacaagcctgctctccaggagcttccagcctacagtattaaaaaatactatcttaagcagtaatgttttgtaatggtttggcttatcctgataatgatctgttactgttgctaagaggatcggtggaatttcactgtaatttttttttctgttaggtagaattcaactctgtcaagtttctttaggaccaaaataacttcattttatggtgaatttctaatataaattcagatattcttttaatatgtttataagaatttaagaattaaaaattagttactttatcctggcatttttctgttgtgtcaaataattttctaaagaaagaatctctttgtttagaaaatatgagtgtgccaggagaatctttacattttgactagattagacattggtgtaacttttttctatgtaattgagcttcatttcattaatatattaggatgcaaacaaacttgaactcagttcttaaccacactttaagtgtgtatttgtgtagtggtggtagcctcagatgtgtttggaatattttagattgctaaatattgatggtggacttaaaatccatttcatcttgtcttaagtaggttagatttcccagtcactgctttgctttactttgggaaatgagggggaggtacagtagagtagttactattaagctttagttcataattggactctgttctgtccttgctctgttggtggccttgagttttattcatctgtaaaatggataaccacatcaatttcatagggttattgtgaaaataaaactacataatacatatagaatgctttacattgcacatagtacagctccaataaatattagctgtcatattttaaaattgtcactttttatttacgtgaaatcaattccaagttttgagttgttgtgactttagtgtttctcatattaaattgctttgattcaacattttagctataattaggtgctggacctcataacaattgcaggaattacccaagagaattgttaaaaactaaaaacttgtattgaccagactgtggtgttacagactctagtatgacatacgttactagaaatttaattatgtctgtgtgtgtatgtgtgagtattttaatttgttttttgagacagagtctcgctctgtcacccaggctagagtgcagtggtgcactcacagctcactgcagcctcaaccccctcggctcaagtgatcctcccacctctgcccctccaagtagctgagactataggcacacaccaccacacctggctaatttttaaggttttttagacatgggctttcaccacgttgcctagcctggtcccaaactcctgggctcaagtgatctgccttgacctcccaaagtgctgggattatagacatgagccaccaaacctggccaaattgtgttttttttaagtgcagagagaaattgacgtttacttaaaccaatttgtttgctgtacaacttgtattttaggttttcttaggagcgtgttttcttgatcctgaactgttaattacttcattttagatcttttaaaggtttagatttagcattggtccctgctgttgttgggcttaccagctaggagagatgacataccactcatcaaatgttgaataagaatgtgtcataggaacggtgcagaatgttgctgggtgatataaaaggaaaggggcactgtacccaatccagaagtgacaaggtagggccaaaagagaggaggataggaagagcattcttctagacagaaaacagtttatttgaatgttctaaggtgggaaagatcatggtgggttccagaaactgaaaattcagtgttgagcatggaaagcaagaagagagagacctaaagcaaagctgaggccaatatattgatggactttttatgtctcttgatattatttttagattgtggactttctcttgaggacaagagggaatcagtaaacggttttaagtagagaattaacaagagcatcaccctaactctagagagaatgggagacctcttgagttaggaggctcttgtaattatagtgagagttgatggcagcttggactgtggtatatcgagcatagaaagaagaggaccacttagagatttaagagggagaattgacaataatcagtgcttggatgcatataggtggttggagaggaatgaggttcaaagatgactcctgggtttcaggtttgaggcattggtgtggtggggggtgatcctgtttactgagatatggaattgaggaggaagagcagattatgagttcaattttggatataagttgaggtactgtctttattatttgcatcagttgtttgcattcttgtcagactttttgatagcttgagaaagaacaggaagagacttatgcttcacttgggcctttgtttaattatactttgccatttcccccccacccactccaaacacttgagggttatgacacccaatagtaactgtggctcactgtgttgatagttctcaatgaaataagttgagaaacaattgaaaaggcaaatagagctacgtgtgtaaaagttgggaagatggggtagagggtgttagagggaggtaaaaataaaatcgcagttttcaaaaataccagttattcattgtcagggccactggctcagtaatatttcaaaagacttaaatgaaagttaatactatgtgttcctctgttaagctttgctatatagaccagtggttctcaaaatgtggtcccttgaccgcagcaacatcatcatctagcaatttaaaaatattaaaaatgcagattcttgtgtcctactgcaaacgtactcataaactctgagggtggggctcagcaatctattttaacagacccttcaggtgattatgatacactgtaacattttgaatacctcttgtctggattcagcaaactttcttggtaaaaggcccactagtaattattttaggctttgtggaccataggtctttgtggcaactgctcagctctgcccttgtattgagaaagccaccacagacatcatgtaaacaaataaacatggctgtttgactaaaactttatttacaaaacagcaggcacatttggcccaaagtctatagtttgcagactctggtcgagactccagacaaatatggtagttattgccagaataaatgacatattaatgaaaatacagaagttggaagtcaatctgaatagctgcttataataatatagcttattattttaaggaaataaaccagcacttttgattgttgattttattttcatctgtagtcattttacctttccccacagggaaataattaatctttgttttagtataaaacatactctcattgctaaacatttcaaactacacaaatcagtagaacagaagataaatctgcagtggtcctccaagcccttgacccaaatataatattacaatcttgatgactgtttttgagttctttctgtatattatttattgttttcactatcaatttttaaaataatgtatgattttttaaaaaattgtttagttggtaaattattttttaaattgtgtaattataacttagtttttttctcatttctttgaaggttgttttggaaaccgaaataacaaataagtccgctttgaaactttatgaaaatcttggttttgttcgagataagaggctgttcagatactatttaaatggagttgatgcactgcgacttaaactgtggctgcgttgagaaactgacatcaaggaacaactatcatccgcacagaatcgacctttgcatgcaatgcaatttgtacagaattgctttgcaggtggatttagtaatttccatgcagctcttacctgtcagtgtctcattgagtgtcgcacaatatttgttgcactttggcatggcacatttgttctgaattaaaagattgttttaaacttcaggagttcttttggtaccaacaagatgtgccagttgatagccaagatttatgtgttcatttgcaaagtctgctgacaatgttatttacacagtgatcattttatcacagaaccagtaagtggaacataatttttgttccttaaaaaagccaatgtggattgtaaaagtctttaagtatactaacatttcacacaaaacctgccctagttttctgaagtgggtgagggagacgcttcagttttaggttttattttttcaatattaaattttccattcttgaatattggtacctcagtgattagtgaatgaaaaaaatgtagggtgggtatgtcttacaatgagtaaaggtaacaattaaattttgtctgccagtgcctgtgtagataagtatatttgtcttcatctctagtttttgaatgcatgctatcttttccttttctttaaggcctttgcaagcaaacttttgtttttatttaaattctaaatttgataaattatttcagatttttataatttggatacttttttcaggtgaatgaaagaatggtttactttagaagtccctttttccttacagtaacaagttgaatctacttggaaaattgagaaatggctcaaaagagataagaaaagttgatggagccgggaattgctggggtttagatgcactttttcttttgagagtaagggaagttttggaaaagaatagaaaattagtgtaagttgatatgattttatttaatcaaaattactgctacgctgcgaagaacagcttttacaaagtagctgaatttgtttttcccacttgatttggattcacattgctttcatttcttaaaatgcttcacttcaggttcttggtcttggaaataaatttcaaggtgcattgtatccattttaagctgctttattttattttcacttgtatgagcaaattcttgggggagctttgcttttcttctgccagaaaaacaaaagggggaaatgaaaatcttttttggaatgagttctgtgggttttcttaacagccaccatgtttattagttacattgtgttttggccaatcagtgcaatgtaacaaattttacagttaattgctttcaattgagtcagtaaacctgtgatagataatttatttaactggaaaacctaggtacccataagaaaaaagattcattctctgtgaaaactgtaggaatctgttgttgttttcatttgaatatgctctacttctgctctagtatttggtttggaatatattttgtggctctaattactgtatttttaaaaaccctacctccattaacagttggtaaaggccccttttcaggaaagtttgttgctttttttttttttttaaaggaaagctgctctttgctcagtatagtgttttgaaagtgaacatagtaacaaatactttaaaaataaagatacacaatttatatttgaaaataaaaactttctgctggtgggattatttatagttctttatttttaaagaaaatgttttcctttttatattgctcttgaaagtttaatgagcagaatacaatactggttataataaaaatatggtaaccacacagtactcagcctttcaatatgtttttggtcaaacttcatttaggcactagcatttagaagaataccaatcacagtgatgcttttgttatttaatatgaaggaaatggaactaaaacatttatgtcatcaaattttatttcacttctttatatttgacttgctggttgatacataatggttgatgaacatatatttgcttaaatcactaatagggatggttgtaaagtagatagatcattggttcaaccattttagtgtttttgccagattgtcaatgaaaccatcatactgaccttttcctccaaaattgccaaattgactgaactggttgggtgtttgtaaagatgacgttaactgtgtgactaaaaagtcagatggttgccatattgtttggaatatgttgaatgtcagtgtatgccttatgtctttaattgggtatgcaaaaaaatttttacttaagtagattaaaattttaacctctagcatgaaaacccagcaccaacactgaaagactccattcaggttgaagtagcctcaaacagtaatttactttttgataataggctgttgtttttcttaaataagcttaaaacaattctatctgaaattggtagcatgggttcacttggctacaactgagcaaaatagatgcaactttcttttaatggggtgctgcctctttaggactgactgtactatccactgacactggtttggcagttggtactgctgaacatttttatacatgctaccatgaagctatatatgttagtattgaagaagctaacgggtatactatcatttttgatgtgtgggctgattataatttcctgtatttcctgtacattgggatgaaactactttagcaaagtccacagatcagaaaccagacggtagtttttgaagttgaaaccagcaaaataagaaaaaataaaaaatcgattttaatattttctgcctctttcccaaattacccttcccacttgctcgacaaatctatgtaaagcagtttgttttttcatgttttaactttaccttgccctgtgttatggtactggctgacatgtctaagactggatgtgtatatttattatggtgtctaaaaatcatgaagttcatcacttttcaggagtatagataaaatcaaattggtagtacatcagagttacttttcagtgcaccatgacatcactaaaatgagtgctgtaatgttacagggctttcaggtttgtaaaaacataaccataaattatattgacgtcagatatgagttgagtatctataaaatatcacgtgtatctcaaaatattggactgctgtttgactggatattgctgcataattttcttctattgtcccatatccttttggagagagatttaatgggatttgaaatgtgcaagctgtctaaataagatgcagtcaaataaagtatggttaagttgtg

SEQ ID NO: 668 - DNA, 32744 bp, Homo sapiens
  source 1..32744: mol_type = other DNA
cttttcccatcgtgtagtcaagagtctgtgccagacttgaaggctttactttgttagccatgtgtttatgaacccccagcgctttccctagatcttttggctgataatctcaaacatggaggatgcttctgaatcttcacgaggggttgctccattaattaataatgtagttctcccaggctctccgctgtctcttcctgtatcagtgacaggctgtaaaagtcatcgagtagccaataaaaaggtagaagcgaggagtgaaaagctcctcccaacagctcttcctccttcagagccgaaagtagatcagaaacttcccaggagctccgagaggcggggaagtggcggtgggacgcaattccccgcgcggagtcgggcagtggcagcgggagaagcggcagccaggggcgcggcggggccggagagaggcggtcccctgggaggacggggtctcccctcgttgcctttgtagtggagaaggtggacaagtggcagtcggcgtgatcgcaggtgagggtcgctcgggagccggccggcgccggcggggaagtggaggcgagccgggaacaaagcggagcagctccggggtccgcccgcggcgagcgctctggcggcgttgggctggccggccggccagctgcgcgccgagcacgttgtgagcctggcggcggcggcgggcgaggagccggcgctgggggagggggccgccgccgctcccgcactgccccccgcggcggggcgtcctgccccattgtgaggcggcggcaggacgagaggaggtagggcgcgctcggggggcaggggcggcggcggctccgctcgctcgacacccgggcagcggcaggaacgaactcggctccggtagcggccgcggcgcgtcagtcacacaaaaggcagccgagcttctcccagcgcgcggaccggcccacgctgccgccgagggctccccaccttaccggctttcctttccctccaattttgatagggaagcggggccggcgcgggcggccgagggtccaggcgagcccgcgggcggacgggagatgccgctgctacaccgaaagccgtttgtgagacagaagccgcccgcggacctgcggcccgacgaggaagttttctactgtaaagtcaccaacgagatcttccgccactacgagtaagagccgggccgtgtgcggggccgcggggggtgtggggactccccccgcagcgctcttttgtctctctccttttcctcgccctgggcttctggcggggcgacttgaaagtgacgggtggcccccgggcccgcggttctctgcctcctggcctccacctggagaacgcgcggggccaactggcggcggcgcgcgtggggaacgcgggttggtagtggcggaggaggctgggtccctggccggcctcggggaccgctcctagccgctgctgtcgccctcccgccctcttggccgcggggcggcggaaactccccgcctcgcccctccccgccgcggccacacgcgcactccggggccagttccgggatcccctcccggcggccgaggggatccccgctagggtcagcgacgtggggccgcagtccctgggccggggaagggaattcctgccccggtgggcaggaaacgactgggctgggcttcgttttctcagtcgggagtggggtctgacgttggagctgcctggggtaggggagagaggagcggagttgagactcgctctagaagggaaggagggggcgtccctacgggccaggggtggagggcgcgggacgcgagagcctccgtccgcggcctcccgtccggcgctgctaggcctcggagtgcgacgcgagccgcgctctctgtcaccgcctcttcttggtgactaactcgtctccggggaactcagcgtctccgcccccgggagatcagtgaggaagaagtcgcggctgggcaaggggaagaggaagggggaagaagcagggccttgggcgcccctcgttttcactttcgcatagccgggaagcgcggtggaggttgttgggggagggggttaagacaagttcaactccagactcagccaggcgccgctttatccccctgcgcatgtgggctgcctgacatgtgccactcgctattgttttgataagaacgcggagctgctggtgtagttacagctcctacattttcagcccgtcgcttaatttatcccaagagatctagtcctgtgacacggagcaagggggtgtgttttagcgtcttgtgtttaaacaggatctctaagtgagaacctgacttgatcaatcactcgaagagggtgatcctctctttttcttatgctttatcctctgcactcaaaaggagtccctttgtggcttgcaaaccaagtgtaatagcaaccaagtaacgtcgcgtgtaaggaggcaccttttctgagtgggggcttgatcaagggagggttttgggcaaactgtacctgtctaagaaatgaatagtgaggttagaaaagttcctttgagcatttattttaagtaaacctttttcttcagctccacagaaagggttacacgttaaacatgttatatccagagaagtagagtacttttcgtcagacagtacttttaagtaggagtgcacatctcgctctgctcctgtagagacttgttttgttactcaaatagagttctcgtaactagttaagtgaacttggattaggtaattggacaagttttttttttttttttttttttttttttaggattttaaagctacaggccttgctaacaattacgataaaaaaaaaactaagagtatcaacaaaatagtaaataggcttaaatttcaaactgctttctccttccacgtaagcagtcttttaaagaggcttttctcacttttagagggtaggatgaatatgactgttatcctttgtgaattaaacactcttaaggcactttggttcttgagctgaattattctaaccatggagaaatctgaattgctgaaatacagatttttcgcattccagaactatctgtcttccattatttttatttatttacttattttgagacaggttctcgctctgtcgcccaggctggagtgcagtggcacaatcttggctcactgcagcctccacctcgtgggctcaaacaatccccccccaccttaccaccttagcctcctgagtgtgggattgcaggtgcatgccaccactctggctaatttttgtattttcatagacggggtttcgtcgtgttgcccaggctggtcttgaactcctgagttcaagtgatctgcctgccttggtctcccaaagtgctagaattataggcgtgaaccaccaagcctagtcttatcttccattaatattaaggaattgtatcctttgtagtcttagggcatttaaacattttaaataactaggtttttattttcaatttttgttttttcccttatgctgaagtgtttgggcttttggaaattacaagcagtcccagagagattactggtttgggagcaaaggtatttgaccatttaccctgaattaaggagtattgctgatgttcttaggtttctatgactgaacggaaataattttgacaaaattggaagaagactgccatttaatcatgttacattttgaattactttctgtttctcgcaaatgattacaaagagatctttccaaaaatgcatttgtggtacgtggatatggtggtctgtagtatggtaacctgacctttggaacaactctggaaaaactatgacggaaacctctgcaggctgctctttttttgagacggagtctcaccctgtcgcccaggctggagtgcagtggtgccatctcggctcactgcaacctctgcctcccgggttcaagcattctctgcctcagcctcccgagtagctggaattacaggagcctgccaccacgcccagctaatttttgtatttttagtagagacggggtttcatcatgttggccagaatggtctggatctcctgacctcaggtgatccacctgcctcggcctcccgaagtgttgggattacaggcgtgagccaccgcacttggcctgtgcctcacattttgtcttctccaagaacctgaactctttgagacagtgactggccaggatgcatcctcagtgattatgtagcagaagctccttactacattctccttaactaattgctaactcttgattgacctgctttttcataggtaaagaagactcaatagcacatcaactatagacaaatgcgtaagctaaggtgcataatgtagtctcttaaatacgatttattctggctgcatgcggtggctcatgcctataatccaaacattttgggaggttgaggtgggaggatcacttgaggccaagagtttgagatcagccaggtcaaaatagtaagaccttgtttctacaaaaataaaaatattctttaattttggctagccgacaacaattttgtttatttttgctgtggattgttaaaaaatggaacaggtctgaatacagaatttcttgacttgtgggataggaaaatgatttgttgtattacctagtgacttaatctcataaataaaataactttttttttagccatgtagacacttggaatatatttcccatctttgagtgagttcagccttcaatataaaatgtataactctcttccacaacatcactaacaggtggtccaaattatgtttcacactggcttttcattggaagaggtttaactagcttacaaggcatcctgttttcattgttcatctgctctcccttgttaataagtcagtcctttcaacagcctccttttacaggtgaggaaacaagttggggtggggagtaaatccaagattacggtgtccaaaattatttttctagtaactgataatgctagactctaacatcaattattctagcatttatgctctttttactgtttatcacatagtgcttattatggaaaattcttcctgatatctgttgaagtatgcattaagaaaataggggcattgcctggaatttaaactggctgcctagatctttgtgtagataccactctgtactgtctgcttagacatttggctttttactataccccaagtgattaagctctaggtattcaatggacatatcagaacatcatcaatttatagtagggaagaatgtctttcatactgaccaattcctatactaatggtcagttatgtgtgaaatctagttataatcaaaggctatttggtgagcatggggttttcaaaggaagttggataattttcttagctagtgtctttaaatgagatgtttagctcctttttaaggaataagcctgccgtattgtcctgatacttggatccatgagtccttttttcctggatggtatagcagagattcctaaatgctttactttttgaattttatcttttgtctacttagcagacacgtacttagtttcagatgttttaaatacattttttcttcagacaatacattgatcagttactgcaatattgtaggttgtagtaacaacctaccccaaaacttggtggctcaaaataacaacccattttatttgctcactattctgtggattgccaatttgttttctgctggtttcctctgggctcactcacttagctgcagtcagctggaggctaggctgaggcaggttggagtaagagcctcagtcacaggtctgggaactcagctgggatggttttagttaccgtgtggtctttcaacctcagaaagaggctgtttcacatggtggtcttagagtttcaagagggtgagaatggaagtcactcaatatcatttctttattattttggtcaaaacagattacaaggtcagcccagattcaagaggtcatgaaatagactccagctcttggtgagaagagcatgaatgtcatatttcaaaggagcctgcacacctttagacctctttgcaaacagtctaccacaagcagttgctacaattttatagttgggtcatcctgattggattttgtgtgttcactgatagtctaatatatgttatccatcaaaacacaatgaaaaccatcctaagaacttgtggacctgccttgttgtttgccccatactacctataacaatgattcaaaaactctttcttcctagaatttctgttgtttcctacacttgccctcaggagctgacaagaagaaatatcttcagatgtttgagatagttctgtctctttctgctccccttccaaatgtctaactttctctcttgaaaacatgagtttttctgacattgtttctctaccatactggttattcttctaggatctctctgcacatgtggtacctgaacaataagaattgataatatttattgagtgcacttacattttaggggcatttgctaagaattatctgattttatgttatgttatgttatttatttatttatttattttgagacggagtctggccctaccacccaggctagagtgcagtcatgagatctcggctcactgcaaactccgcctcccgggttcatgccattctcctgcctcagcctcccgagcagctgggactacaggcatatgccaccaagcctggctaatttttttgtatttttagtagagacgaggtttcaccgtgttagccaggatggtctcgatctcccgagatcgagtatatatatacatatataatatatacgtatatattatgtatatatatacatgtattatacacacacacacacacacacacacacacatacatacttacatacatagagagaatgagtgtgttttggcccctaagtagagtacactttgtttttatctgaattgtactttgtttctgtttttttttgagacggagtctcactgtgtcgcccaggctggagtgcagtggctccatctcggctcactgcaacctctgccaccctggttcaagcgattctcccacctcagcgtcccgagtagctaggattacaggctcctgacaccgtgcccagctaatttttgaatttttactagagacggagtttcaccatcttggctatgctggtcttgacctcctgacttgtgatccacccgcctcggcctcccaaagtgctgggattacaggcgtgagtcacggcacccggcctagtttctgatttttatgtcacaatttaatcttcccctactaggtttttagttttttagttttcccaatacccaacaaattaatagtatgttgcactttgttcctcagtttgttcgccagagtgttggttgacttcatattacaggtgcgttcttaagaaagtcccttgtaactcagcaacttttccttatgaaataatggtaaagaggaggggtcatcaaattttttccgcaaagggccagataatcagtatttcaggctttgcttggccatagggtctcttgtacctatccaactgtgcaaatgtagtgagaaagcagttattgacaacacctaaaaatacaggtatagttgtgttccccaaaaaatctacaaaaacaggtggagggcagggtttggtctctgtgccagtaggatgcccacctttagtgaagaggatgattgaaagagcgcagtcataaatctgacattaataacctgtattagcctaaatttacattcatataaaaatactttgtatgttatcatttttgcttatagtagtaaaatgtatttcttgtaagtttcgttagttacattcttaataatgtagaaattgaagaggcattgtaaccaaccccctagaattcagtattaacaaattctgcacatttaaatgtgtatgataaatgggtaaagtgtgagcagaattacagaagtgggagaaagtgaaggtgtgtaatgttagagatggtgctgtgctgttagggggttatgagtaggggagagatgacccttggacttttctcccttaaattggccactgtggtagcatgtcctgcctccttagggtaagtctttgtgaacagtgaagctataatgtaacaataactttgtagagtaaatagacacaaaggaaacaaatggcacaaacattttgtaggagatagtagaaaccttgggatataaaagggcagctatacatcactggttgtggcatttgtgccattgctgttcttggtatttttaggcagtgttaagtctaaatcgtgtttgttgcacttcactgcgtttagctgtccccctgccatggcatgaaatatcccatgcgtgacctactcaatacctcaggcacttagctgctgtggctagagctgtgctgtccagaacaggagccattacttggccagatgggttattaagtacttgaaatgtgattagtccgaattaagatagacataaatgtaaaatatacattggattttttttttcttttttttgtttgagacagagtctcgctctgttgccctggctggagtgcagtggcacaatctcagctcactgcaacctccaccttccgggttcaggtgattttcctgcctcagcctccccaatagctgggactacaggcgcgtgccaccacgcctggctaattatttgtatttttagtagagatggggtttcactgtgttagccagcatgtgctcgatctcctgacctcgcgatctgcctgcctcggcctcccaaagtgctgggattataggcgtgagccaccatgcccggcggattttttttttttttaaagaagaatgtaagtaaagtatcttaatttttaaaatgtttattacgtattgaaatgaaattattttgtgatatattgggttatttttattttaaaatttttaaatgtgaccactagaaaatttaaaattatacatgtgactaaccattctatttctactagcactggcttacagactaaagtataagatgtttagatttgaagtataattttctcaagcaatactaagtattgtttaagttattagaagtatacttcatgtgatggatatcccagttaccccgatttgatcattacacattgtatacaggtattaatatgtataactgttatatatcaattttaaaaaagaggaaaaaagtataccaatgtacactatgtgctaactatgtactggtttgagaagctaaatattatagatatgtttgtttctataggaaaaagttagaacttttttctttttttttttttttgagatattgttttactctgtcacccaggctagagtgcaatggtgcgatcttggctcactgcaacctcggcctcacgggctgaagtgctcctcctgcctcagcctcctgagtagctaggactacaggcatgtgccaccacgtggacctggctaatttttccgtttttagtagagactgggttttgccgtgtcacccaggctggtcttgagctcttgggcttaagcatttctcctgcctcaatcttccaaagtggtgggattatagatgtgagccaccgtgcctgaactagaacttttttaagaaacagggttgtgctctgtcactcaggctggagtgcagtggtgtaattatagctcactgcagccttgaactcctgggttcaggtgctcttcccacctcagcctcctgagtagcaaggactatagatgtgcgccccctggctaatttttttcttcaatttttggtggagacagggtctcgctttgttgcgcagtctggtctcgaactcctggcttcaagtgatcctcctgcctcagcctgccgaagtgctgggattacaggcatgagccatcgtgtctggctaagacctacctgttaacattacttccccccaaaaaagttctaatagtatttttaaaaatctttttttaccttctgaattcttcccttccctttctctgaattcttaggatatctgccttctagcttataaggataactgctttttactttgtatttttgatgatatacaccgattatttcctgaactaaactttagttcaaaaggatcttctttgtactgaattaagagccatataacttggcatatgcatgctatttctgtagatctcatttaagttaaggtatgattagtttctcttgctttatttccgtagatacctttttaaaaagttgttctatagagatgtacaaaggaaacaatctaaatggaattgcccccaatttttggagatcaaactaatagagataacctacacagatagatgtgctaaccaggaaatagacatataacagtttaagtacttttagaatgacgggagaagtaaagatttcaggaaggagaaaaaattgaagaataatgaattatatggttacatatagaaaagtagaacaaagtgtaaagcaggaaaaaattttacctgtatcttaccacttagaggcagccattgttaacccttttgcatatgtataaccatatgcatatatataaaaaaattttttttcagacagtctcactcttacacaggctggagtgcagtggcatgattgtggctcaccgtagccttgaactcctggactgaagcgattctcctgcctcggcctccggagtagctcgaattacaggctcatgctaccacagtgggctttttacacttaaaaaaaattatattggctgggcgtggtggctcacgcctgtaattttagcactttgggaggctgaggtgggcagatcaccaggtcaggagatcaagaccatcctggctaacatggtgaaaccccatctctactgaaaatgcaaaaaattagccaggcatggtggcatgtgcctttagtcccagctacttgggagactgaggcaggtgaatcccttgaacctgggaggcggaggttgcagtgagccaagatcatgccactacactccagcctgggtgacagagcgagaactctgtctttaaaaaaaaaaaaaaaatttattgcgctgtgtgcggtggctcacgcctataatcccagcactttgggaggctgaggtgggtggatcacgaggtcaggagttcgagaccaacatggtgaaaccccgtctctactaaaaatacaaaaattagctgggtgtggtggcgcgcgtctgtaatcccagctactcaggaggctgaggcaggagaatcacttgaacctgggaggcggaggttgcagtgagctgagatcgcaccactgcactccagtctgggtgacagagtgggactccatttaaaaaaaattattgcaaaatgatatatgagtaatgctcattaaaaaaatttaaacaggactgaatgcggtggctcatgcctctaatcccagcactatgggaggctgaggtggtgaattgtttgaggccaggagttcaagaccagcttggccaacatgatgaaactccatctctactaaaaatacaaaaattagccaggtatagtggtatgtacctgtagtcccagctgcttgggaggctgaggcacaagaattgctggaaccagggaggcagaatttgcagtgagctaagatcgtaccactgcactccagcctgggcaacagcatgagattctgtctctggaaagtaaatacataaaaaaaaataaaaattcaaacaggctgggtctggtggctcattcctataatcttaacactttgggaggctgaagtgggaagatagcttgagcccaggaagttgagaccatcctgggcaacatagtgagaccccatctctacactctcaaaaaaattaggtgagtgtcctggtgtgcacctgtagtcccaaatactcaggaggctgaggcaagacagaatgcttgatcctaggtgattgtaccactgcccttcagtctggacaacagagtgagactctcttaaaaaagaaaaaaaattcaaacaatatagaattatttagaatcacaaaaaaagttttccttttccttccttcccagtctcccctcctttctccatagggaatatctttacagtatatatataagtacatacatttttgtgattattataattaatgtacatgggattgtgtattcattgattcatgtttttcctacccattatgtcttagaaatctttctgtgatatagatctcttgcattttaaaggagagtggatagggctgggaatggtggctcacgcctgtaatcccagcactttgggaggccgaggcaggtggatcacaaggtcaagagttcgagaccagcctggccaacatgaggaaaccccatctctattaagaatataaaaattagatgagcatggccgggcgcggtggctcacacctgtaatcccagcactttgggaggttgaggcaggcagatcgcctgaggtcaggagtttgagaccagactgaccaacatggagaaaccccgtctctactaaaaatacaaaattagccgggcgtggtggcacatgcctgtaatcccagctactaaggaggctgaggcaggagaatccttgaacctgggaggcagaggttgtggtgagccgagatcgcgccattgcactccagtctgggcgacaagagtgaaactccatctcaaaaaaaaaaaaaaaaaaaaaaaaaaaaagccgagcgtggtggcgggcacctgtaatcccagctgctcgggaagctgaggcaggagaatcgcttaaacctgggaggtggaggttgcagtgagccgagatccggccactgtattccagcctgggtgacagagtgagactccgtctcaaaaaaaaaaaaaaaaaagagagagtggatagagtttttgaaaataggtaaatgcgcgtattaaggaattccagcagaatagaagagcactgaatagaatggttccccagtcttatcactactgcctgttacctcgagttttgtatgacattccagaaacctatgcttctataggtaccttttattttctttcctttttctcttttcctcttttttttttttataacacaaatgagatcatcatatagtttcaagaaaatacaggagagatcaaactgaaaataggtatttttctattaacattaatggaaatgttaattaagaactttatactttttaatgactgatttttcattatataaagtactactttatttagcttttttcttgttagctgcttaaagttttcagtttttcactgaaaagcagatggaactcaaagtctggttttgactgatgtacctttaaattgcaaaatataaatatttagtttaaatatactttttcttatgtttgtattaatgttataagttgaccagttaccaaacccttgagttctgtgagtctacataaaattttgcattaaaggcacaaaaataacctgataatgctatcagtttttaatgtaaaatttgtgaaatgataggtaatgggcttttgtttttgtttttgttttttaatcagtgacttttttgaacgaaccattctgtgcaacagccttgtgtggagttgtgctgtgacgggtagacctggactgacgtatcaggaagcacttgagtcagaaaaaaaagcaagacagaatcttcagagttttccagaaccactaattattccagttttatacttgaccagccttacccatcgttcgcgcttacatgaaatttgtgatgatatctttgcatatgtcaaggatcgatattttgtcgaagaaactgtggaagtcattaggaacaatggtgcaaggtaaagtacttttaatttttcctcttggtaagtttatattcacattgctcaaaatccaaaacacacaaagtggtgacctaaggaaatcttcccttttactatgctctagctattctgttaacccacagatagccccggtgttagctgtttcttgtatatctttccaaagctaatttatatatatgccaccaaaaacatatacgtgcatgcgtctgtatgtgtatatataacatgtgtcttatgtaacaaacgtgcacaaattccttccctttttaatgcaaaagaacatacatactctagatcccttttcacttaaaagatcttgaaggttagtcctttgttacataagccaccttccttctctttaatttactgtataataaagttctattatatggaagttccatctttaggagtagaaatctttagctaatggtatctactgtgtcctcattatgtcacctaatagtttaaatatgccagtatttatttattggttttagtgttttatttaacaaaaccaggattgagttttatatactccactaagttctccttctttcatactttctcacattgctttattgagctgtaactcacatacaatacacttctcctttctgtagtatacaaatgcagggttagtgctcttccctttcaccgagctcttcagaaataaagtggatttttatatgaacattgaaaatgacacaatctatggcaataaatgaaaaattatcaatgttttcctcaagtctgaagctttgtgattggctagtcactgacatttataataataaactttatatgcattaaaacctcttgtagcctcttgactttaggtattaactgttttttggatgccctgcccccattattgacctgaatacaaattttttttttctcgattttaaactttagaagccaaaagttatttatgttgttactattatcttatttgaagaatcattataagtttgtatgtaatgttagaattaatgtcttaacaaattaatataatccattttaattgttaggtgctactctacttgaatcttaaaaagccaagcaaccaaatgtgtttatattaagatataatttatttgggtttgatttttggcaagtaattaagttcttttttttttgagacggagttccgctcttgttgcccaggctggagtgcaatggcaagatctcggttcactgtaacctccacctcccaggttcaagtgattcttatgcctcagcctcctgagtagctgggattacaggcacccaccaccacacccagctaatttttgtatttttagtagagacgggacttcatcaggctggtcttgaactcctgtcctcaggtgatccacccaccttggcctctcaaagtgctgggattacaggtgtaagccactgcgcttggcctaaggcttaatttcttaatacattggctattctttttattgtgtgagacaaagtctggctctgggtttgtttttgttttttttttttgctttttttttttttttttaacttttggtatagatgaggtctggctctgttgcccaggctagagtgcagtggctccatctcagctcactacaacctctacctcccaggcttaagccatcctcccacctcagcctcctgagtagctgggactacaggtgcattccaccatgtccaactcatttttgtattttttgtagagacggggtttcaccatgttgccccagcagctctcaaactcatgaactcaagtaatccacctgccttggcctcccaaagtgctgggattacaggctgagctaccaagcccagcctatattggccattcataattggtgattgtgcctgaagttttcctcccttaagtacaacattctgaatgtactctgttaaaaaaacaaaacaaaacaaaaaaactatggaactcttgtcctaatgcatttaaataattaagcatagaattgggttaatctgaaatgtgcttgtaagaacaagagaacagtactttattagttatttttatctaaaaactaagaatggttacagttattagatccactccttaggtcctttgttcccatgatcacttagattataagtaccatagggttggggcgtttggggagggtggaggttgtggaacttgagactagagactccccaactcctcaactcctccaaagactggagacagcacgaattagaattcatatgtatattttactaatatatccttaaggttggcatcttttacaaagctattttgtttgtcttctctgtaacttgctgtgagcaccattgacaagggagtagtaagtaaggtaagaatagtaaaaacaaaatactaagaggtggcatatgaaaaagattaattggggatgatgaattataggaaaatcatgatttaaaggaggctcagttaagagttaagtagaaaaggggtctcaagatgccagtggataatctagtaagtttttaagctaagtaattaaattttttcaaccaatagcagaaaatcatcaggaaaagtatttagaaataactgaaaacctctttcccttttaaaattaagttacgctgttgtttttctgtggatttttttttttttttttgacagggtctggccctgttgcccagactgtgcagtggtacaatcagaactcactgcagcctcaatctctcagcctcaagcagtcatcccgcctcagcctcctgagtagctgggactataggcatgtgccaccacacctggctgatttatttatttttttaacttttagtatagatgaggtctggctatgttgctcctgagctcaaacaataatcccacctcggcttcccaaagtgctagggttatagatgtgagccactgcacctggccttttctgtggatcttataaatcaaccacactgtcctatgaagtgtgaaataacaacataatttaccttttaaagggatgtacctgtaccagtcttgctgctatacagtagtcatatatttgagttccttttttataccagacactgatttaggtgttatggattaatggctccccgactcacaaagccagacatacttgctgcttctcaaatatgccaggcatgatccctgcctcagggcctttgcattactcttctctttgtctggaatttatttccccagatatcaacgtggtgagttcttttacttcttcatgtcttcctccatatcactttcattgaagccttctgtcctatctgaaatttagcattttcttgccccaacttttaattattttattattttaaaatttatttattttttgcctccccaccctcgccccaacttttaattattttattttattttaaaatttatttattttttgcctccccaccctcgccccaacttttaaaacattcttgataaaaattttttaaattgtgggccaggtgtggtggctcaagcctgtaatctcagcactttgggaggctaaggcaggtggatcacctgaggtcaggagttcgagaccagcctggtcaacatggcaaaaccccatctctacaaaaaatacaaaaattagctggatgttttttcttctctgtaacttgctgtgagcactattgacaagggagtagtcaatagtcaattacaggcatgtgcctataattccagttactcaggaggctgaggcagaattgcttgaacccaggaggtggaagttgcagtgaaccgagatcacgccactgcactccagtctgggcaacaaagcacgagtctgtctcaaaaaaaaatttttttttaattgtggaaaaatacacaacataaaattagtcatcttaaccattttcgaggatacagttcagtcatcgcctcaacattttatatttctcttccatgctttgttttttgttcaccttggcactattaacatattttctttatttattttgttgttggtggtttcctccaccagaatgtaagctccatgagctcaggaatttttgttcgctgtattgctagcacttaaaatggcacatagtatgtgagcagagcaggtatttgttgaagtataaataatgcaaaacaaatttcaaatagaagtgctttgaaggcagtggtatggtagagagtgaggggaggaagtggttggcacttgagctagggtggtcagagaatgttgctgtggaggaagtgacattaactctgagaacagaatgaaggagaaggaaccaaacatgtcaagaactctctagacagagggagaggcctgaagtggaaataatttaaaatattgctctggctgctgtttggtgaaatgattgaaacgaggtcaagcatggaaatcctggaaccagtttggaggctactacaacaggctttctagtgcagataagaactttgaatcagatggcagcagtacaaatggagagaattggatggattcaggatattttgggtggagaactaacacgatttattcatggattggatggatgctggtttgggcaggggaatgtgtgggaaaggagaaatcatggatgatgaaatcatggatgatctcaattttttgcctttagtagatggtaagatggagaagcttagctcatgtctattgtcccttagctcatgcctatacttgggcaggaggatcagttgagcccaggaatgcaagtgagccgactacatgatcatgccaactacactccagctagggtgacacagcaagaccctacctctaaaatgaagaagagactgggtgcgttgtggctcaagcctgtaatcccagcactttgggaggccaaggcgggcagatcatgaggtcaggagatcgagaccatcctggctaacacggtgaaaccccatctctactaaaaatacaaaaagttagccaggcgtagtggcgggcacctgtagtcccagctactcaggaggctgaggcaggagaatgatgtgaacctgggaggcggagcttgcagtgagccgagattgcgccactgcactccagcctgggtgacacagcgagactctgtctcaaaaaaaaaaaaaagaaaaaagatgcagaagcctcaggaagtaatgtatcagtttagccatctttgcactcaaatcaggccttgttattttctgattgctctgattttgtgtttcatggacatctttgtgttactcataagtgacttttttttttttttttttttgagaccgagtttcgttctcactgccccaggctagagtgcagtgacgcaatcttggctcacagcaacctctgcctcccgagttcaggcgattctcctgcctcaccctcccgagtagctgggattacaggcgcccgccaccacacccagctaatttttgcatttttagtagagatggggtttcactatgttgaccaggctggtcttgaactcctgacctcaggtgatccacccatctcagcctttcaaagtgctgcgactaaaggtatgagccaccgcacccggcctcataattgcttcttacaggctagatactgggctgggtatattggggttttggaaagaattaagatgctctaagcagcctaggcaacacggtgagaccctgtctctacaaaaattaaaaaatgaaaaagccaggcatgatggcatgtgcctgtagtcctagctactcaggaggctgaaacaggaggatcacgagcccaggaattctaggctgcagtgagctatattgcgccactgtgctgcagcctaggtgacagtaagatctggtctcaaaaaaaaaaaaaaaaagatgctcttgagttcagttaagagagagacaaacatgcagacttgctaaatattaaagttgtgaataaggtaactcaagagcatccaagttcagtgtggcattgaggctaggcctaggttccccacacttaactaacactgaataagtcttttaacctttgccagattggatgatatctcagtgtttagcttgcttgttccaatcctttgcttatttttcttttggcttgttattagtatgtttgtgggagatttatattaaatactaggcatattaagctctttgttatactgctacaagtatgtttctgttccattttttgttctttttcttaagtgtgcaataagggtaaaaagccctttacttacttatttatttattttttgagatagtttctcactcttgtcactaaggctggagtgcagtggcgtgatcacggctcactgcagccttgacctcctgggcttgggtgatcctcccaccttagcctcctcctgagtagctgggaccacagatgtgtgccaccacacccagctaccttttaatttttctgtattttgtagagacagggtttcgccatgttgcccaggctggtcttgaactcctgggctcaagcagtctgctagccttggttttccaaaatgttgagattaagatgtgagccaccatgcctggcccaagacattttaaatatatgtaacaaataattaagaaataaagaataaaaatacaataaacatccctgcattctccacttgtgttaaaaacttaagacaaattaaatttaacagagcttaactgacgaaagaacaattagcaaatcaggcagccccctgaaccagaaataggttcagagtgactctggtgctgctgtatggttgaagaggatttatgaacagaaaaagaaaagagacatacagaaaatggaagtgaggtacagaaatagccagattggttgcagcttgtcgtttgccttatttgaacacggtttgaacagtttgctgcctgtgagtggttgaagtatggctgctgtgattggctgagacttagctacttgttacaagagtaggttatagtctgtgtatacacccagttagattatagttaaccatgtacagagaaacctttaggctgaacttaaaatatataaggaagcagcattaggctaaacttaacacttggtattattatattattattattattatttgagacgtagttacactctgtcgcccaggctggagtgcagtggcgcgatctcagctcactgcaacctccgcctactgggttcgagcgatacttgtgccccagcctcctgagtagctgagattacaggcccgcaccaccaagcccagctaattttgtatcattagtagagatggggttttgccatcttggcagggctagtctcgaactcctgacctcaggtgatccgccaacctcagcctcccaaagtgctgggattacaggcatgagccactgtgccgagccaacacttggttttaataggatacctttatctctgctttttgtttatagtttgagaaaagttttatgggagggaggtagtgatagcgaagggcaggatttggagttagactttgttggacaaatgacatccttttgggttattgcgagattaaaatgaaaatgtatatgtatgtatgtgtgtattgtatacattttgaattgctatagaatatggtagcattttactgggggagtaatactgccgttgacttgaggcttatgtggtagttaatttttttttctattgactttaattttctattgaaagttaaattttatgttatgattaaacttcaaagatgacttgtaattttaacattttattttattttatttcgagatggagtctcactctgtcgcccaggctggagtgcagtagcgtgacctcggctcactgcagattctgtgtcccgggttcaagcgaatttcatgccttagcctcctgagtagctgggattacaggcatccaccaccatgaccggctaatttttgtatttttagacagggagttgccatgttggccaggctggtctcgaactcctgacctcaagtgatccacccgtcttggcctcccaaaatgctggaattacagatgtgagccaccgcacacagcccacaattttaactttagatcctgagttccgcatcatatatccttctctctctatccctttcacttaaatttcagttaaaataactttaagatataaacttgcctaaattgactagatttcctttggtttgaattgtgccttcagcacatacttactacctgtataactttttggcaagttatttaacatcacttatctcctagatttccagtaaagggactgcagaattacagagaaatcagatagagaccattcttgtgttgaattagttggtataggtactcagatctgctcgcttcaatattcttttcttattgtctcatttacttttaactatctccccttgtcttttatctttgagatggggtcttgctctgtcgccctggctggagtgcagtggcaccatctcagctaactgcaacctgtgtctcctgggttcaagcaattctcctgccatagcctcccgagtagctgagattacaggcgtgtgccaccacgcctggctaatttttttgtatttttagtaaagacagagtttcaccacattggccaggttggtctcaaactcctgaccttaaataattcacccgcctcggcctcccaaagtgctgggattacaggcgtgaatcactgcgcctgaccttcccttgtcttttttgcatctttacaagtatagcttaggtgcttcctcctctccaccaagactttatgctttcaaagaagcaatcaggtaacagattattttaaaagatcctttgttattgttgtgacagagtagtaaagagaatagctgactacttggcaaagataggggaaagaaagcatgatttagttattatttagttgttcaactctcctccacaccctgattaccacctagcttgcctgccaaatgcactgacatttgttctctgctacttccttagagcctacaggagaagtcttgtgacaggaacactaaattggaagttgagtctgttcttaaatacttaccagatgttttgtgtctatattatatcagtagatgggaggcaagaacttaatatttccatttacagatgaggaaacagatcaaaagaagtgatttttttttttgtaattgttcaacatgtatttattgatcatctgtacgcttgcactgttctagatgctggaaatagagcagtgaacaaaaaaccaagtcatggagctttccttccagtcttaacacaggtagtagacaggatttagattcaaggaggactgatttacaaaatcatttctttcactgtgctcttggttttgggttctgccatttatgattagctgtatggctttgaacaagtagtttaaactctgtgagctttagtcttttttcacgtattaaatgaaccccccgccttatagggttgcttctcaggatgaaatgatgtaataaatctgatttttttaaaaagctatattatagaatgttgccattcatgtagatgtcttattaatatttcagtgtcttcattggggaacatgcactttattttattttttttgagacagagtctcagtctgtcacccaggctggagtgcagtggtgcaatcttggctccctgcgacttccgactcccaggctcaagccattctcatgccccagcctcccaagtagctgggaatacgggcgtgcgtgccaccatgcccagctaatttttgtattttcagtagagacagtttcattatgttgcccaggctggtcttgaactcctggccccatgtgatctgtccgccttagccttccaaagtgctgggattacaggcatgagccattgtgccccgctgattttatttcactttttgagacatgccagtggtgatgtaagggctgcaatagctatctttgccattacaacttggaatcaaattcccctattgtaactggaaggaaactccaaaagttaacaatttctatatagtggacagacatagttttttgtttgttttttaagatgatcatcccacatttttatgtggtctttttttttttctttgagacggagtctagctctgtcgcccaggctggagtgcagtggcacgatctcagctcactgcaagctccatctcccgggttcacaccattctcctgccccagcctcccgagtaactgggactacaggcacccgccaccacgcccggctaattttttgtatttttagtagagacagggtttcaccatgttagccaggatgatctcgatctcctgacctcgtgatccgcccgcctcagcctcccaaagtgctgggattacaggcatgagccaccacgcccggcctatgtggtcttctaagaacgccatgcaaacagattttaaggcatctaagtattatttccttttttttttacttcactatgttgcccagatggcctcttgggctcaagggatcctccctcccaccttagcctcctgagtagcttggactacaggcatgggccactgtgccttgttctcattgtcttttttttttgagcaaacacaatcattgtttaacgaaacgctggaagaatggtgaactggaactcaaatacttggatgattcacccatcttctgtcccctcccctggaactggagaattaaatcaggaaaaaagatgtggaaatcatacaacaaaggaacattttggactcattgtgtagtcatcattcagtccaaagatagaattagagtttgagagaatctgaaaaattgagtcaaactataatcataaatttggtaatttttaaaattaaagtgggctttgggcaacccattttcagacttttttttttttttttttttttttttttgagctagggtcccactctgttgcccagggtagagtgcagtggtgtaatcacagctcaccacaacctccatatcctgggtttaagcgattattgtgcctcagcctcctaagtagctgggactacaggcgcctgcaaccatgcctggctaatttttatgtttttagcagagatgggatttcgctacgttggccaagatggtcttgaactcctggcctcaagtgatctaccagcatcggtctctcagggtgctgggatttacaggcatgagccactgtacctagccattttcggacctttttacaagcatctctttttaaataagaattggcatgttgatgtagtctttgaagtagatatcaaaatggttaatttgtggataggtagctgtttttctgcataatttccacctttaacctcttctacttcaccagttctacctatcgttctttgggtctggaaggaatctatgtatctgtcaaaacgtagatatcttccgggtctgtgaaagtctacattttgcaaccacagtaatggctatggaatacatactaattccgtctgggagaaagttgagtgtgtgcaagagaaaagatacttgctacagagaagtggcagagattctaaaattttgactacttggagagtcagcactacccttaaggaacctctgtaatattgtagtacataatcttctatttagctagcgtacagactacttaatagttcaaattctttggaatacaactttagacataaaagtaagctgaaaatctaaaactggataggaaagtaactgccacagtgttcatccatgtgctttacctctgactagactataaaaactattcaagagcctattgacctaagtcctatattaaaattaaaacattagtgttaaactgtcccaagttgttttgggatcctctttgaactttttgtttgttcatttgtttttgagacagggtcttgccctgttgcccaggctggagtgcagtggtgggatctcaggtcgctgcaatttccatttcccgggctcaggcaattctcccacctcagcctccgaagtagctgggactacaggcccattccaccacacctggataatttttgtatcttttgtggagatggggtatcgccatgtcgcccaggctggtctcaaactcctgggctcaagcagtgccagcctcggcctcccaaagtgctgggattacaggcgtgagccactatgcccggcctgaccttttttttttggtcacagggatagcttatgtctatttgtgcgtacagatatttgagtgactgtcatagtagggctctgatgggggatacaaaaatgaatacaagtatttttctgtgtagacactcaaagtttgaaggagctaataaaggtttatgaataactgaaagagaataagttgctataaaagaggcacagttaagatgttctgggagctgaaagagtttgtggcagatttgaagcaatatgtggtagaaggtacttctaaaggtgggtatactgacagcagcaaaagtgggacctaatagcaaaggagaagctggaataagcagcagttaaaaaactctactggcgggttggtataaaacttggttgcattagaacacattgcagaactggaagtacactaacatttattgagcttttcctgtatgctaggcagtgggctagatgctttcatttcagtcctcataatcataatgagtgacccagaactttcaaatgtgatttgctccactcatcagaagtaaagtttataaattttttaaaatctgtttttttttctattaaagtaaaagattcatgtatcagagaaaaatgcaaaagatgaaagcctggagttcattttccaaatattccattgagagataaccactatcagaaatttagtgcatatttctcaaccgttttttctatactatactaacataaaaaattagcaagcagctttttcacttagtaatggtttggatgtcttctcgtatcagaacacacagatgtgtgcctttttgtcttctttttcccctcttttgagagacagtctcactctgtcacctagtctggaatgcagcgatcatagctcactgcagctttgaacttctaggctcaagcaatccttctgcttcagcctcccgagtagctgggactataggcatgtgccaccacacctggctaattttaaaaattgtttatagatagtctccctatgtttctcaggctagtcttcaaccggccttgtgcgatctgcctcagcctcctgaaagtgctgggattataagtgtgagccaccacacctagccacgtgtgctgtttctgatcggttttacatgaactggttaaactgttcctaaaaagcttacttgtaatattgcctttttctgaggacggataaagcttcttttgctagcctggtgtgagttctctctttgaagataataagctgccttttctttcagctttgactaacagaccttttccctaatataggttaaatcagtaaaatggccgaattggatttgcatcagtttcatttatagctaggtttccccaaatattatccccatagtatttggatttaaaatgtataaaatgttatcaagtcaagaaacataacagattattgttcaatatatgtgctgccaaagtgagcatgagactatggttcagtattgtttttagaactgccttgtaaaatgaaaattatataattattattttttgagacagagtcccgctctgtcgcccaggctggagtggcgcgattttggctcactgcaactccgcctcctgggttcaagtgattctcctgcctcagcctcctgagtagctgggattacaggtgcctgccaccatgcccggctaatttttgtattagtagagacgaggtttcaccatgttggtcaggctggtctcgaactcctgacctcaggtggtcctcctgccttggcctctcaaagttctgggattacaggcacgagccaccacacctggccttagttatttttaatcttataagctgatatcaatttaggcatcaagtggtaataaaccaattagggctcttaactattcagccattaaagtatattcctgtggacttcctatgttgcattggtagaatgctttaagcaatttagatgaagtaaaagaaaattagctgggtgcaatgactcatgcctgtaatcctagcactttgggaggccaaggtgggtggatgtcttgggctcaggagttcaagaccagcctgagcaacatgacaaaaccccgcctctataaaaacaatacaaaaattagctgggcttggtagtgcgtgcctgtagtgccaggtacttgggagactgaggtgggaagattgctagagcccaggaagcagaggttgcagtgagccaagattgtgccactgcactgcagcctgggtgacagagcgagacactatctcaaaaaagagagagaaaatttgcacacaaacctatgatacagagtgttaagtactcagggtatattagaattaaaaatgagaaaattgattttttatctttgggtacttttatattgctagcctaaattaagtgctgttaatgaatcataaaatgcattaatgttcaggacaaaagagagctgctaaatatattgatgcggtaagatgaacataaaagattcaagcgagaaacaaatacagttattttgatttaaatatgcatgcttggatgccagtgattgggtacatgtgggattaatcaagtagaagtttttgagaaagggttgagtagaaatatgaagaaaaaaatatagattagcagaaaggattacaggagggggacttcttatttcggctcaaagatagtatagatttttagcaacacattaaatttattgtagttctttttcagaaagaaagctttcatttggtcagcttacactaccttttttttttctcaatcctgctccttctgtatatactactgaattcgtaagataaaaattgctagttccaggacaaaaaagtcttaagcaacatctcagcattgttttcagtaaaccctgatgaccctaatatgttgatactttttttttttttttaagactagtctcgctctgtcacccagtctggatatcggctcactgcaaacctctacctcctgggttcaagccattctcgtgcctcagcctcccaaatagctgggattacaggcatgcgccaccgtgtccagccaattttcgtatttttagtagagatggggtttcaccatgttggccaggctggtcttgaactcctgacctcaggtgatacacccacttcagcctcccaaagtgctgggattacaggtgtgagccaccatgcccggctgatgatacaatttttaatttcttaaaattgttatttgggataactgttcttttttaaaaattatttttaatttttttttaagttctgaggtacgtgtgcaggatgtgcaggtttgttacacaggtagggataactgttctttctctggaatctaagttagagtagaactatcttttttaggtacatatcgttaggtttgctgtatgtaccagagaccatccaacctaattggctcctggattgtcattgcaagttgaacagttaacatttagaacccttatgcataatagtataaattgggaagtcatttctgggaaaccctttttttatacgctaaaaattcatacatagtcacaaaaacaaatgaaaatggaaaatgactctgtttctaaacatttaattcaaatagcatataaagctatgttgtaaatgtttctgcatggactcaactgctttatgcttcacaaaatagttcaatgaagtttagacttaccatacaaatttcttcagtgttctaagggcttccaaattgtagtggctatcaggagcatctgtctaatgcctcataagaaagtccttggtaaatgctgggggtgagagtggttagtttttatggcattttctttattctttacactgatgccatatgcagtcagctgagtctccaccaggacttacggtcattactgtggagatcttatttaagaaagatgattaaaatggggagtggcaagtaaactgagattcacctcctttctaatgtgaaaggatattcagcgttggctttattttgtgtctttcagaattgattagcagcagggtggtgaagtagaatagtaatggttctgaagttcttagttatcagtggcaggcaaatattataataggctcatcacatgaaagaggtgagactgtatagctacttctgaccttaaatccccattggggatttcatatctacatggttactacagtttcagatctgaggaattagaggctcttctggataaaataatctctcctacatctttttctgcctccatcatgatccattcctattgggccatataagatcaaagttttcttttcttttttttttttttttttttgagacagagtcttgctctgtcgccaggctgtagtgcagtggcacgatctcggctcactgcaacccccgtctcctgggttcaagtgattctcctgcctcagcctcccaagtagctgggactacaggcacacgccaccacgccctgctaatttttgtatttttagtagagacggtgtttttcaccatgttagccaggatggtctcgatctcttgacctcgtgatccgcccacctcggcctcccaaagtgttgggattacaggcgtgagccactgcgcccagccaagatcccagtttttaataaaaaacttttctcatagataaacttgaaataattttgaggacaaggtaaaactgtcatttgttttccatgctgcctaggaggcttgtagtatttattgaatacaagtggaattcatttgacgtatgcatcagaattagtttaaaaattgggattgtctttcttagacaaattcagaggtcatccaaagataaaggagagaagcgttacagctcttttagaattgtctagcaggctttccagtttttgctggaaagcccctcttcccctccaaaaaaaaaaaaaaagaaaaagttgaagaattaagagaaataacacgtgtaaaataattttaaataaaatgaaaagagtagtaaaagtatgaaaaaatacaaaactactcatcattaaaggctgagcaaaatcttttaaaattaaaaacatattctctaaataattccgagcaggagttggcacattttaaaaacacaaaggttcaaatagtaaatatcataggctttgtggtccatatggtctttgtcacaactatccaactctgctattataatgcaaaagtagtcatatataatagataaatgaatgaatatggctgtattccaaaaatattaaggaacactaaaatttgttgcatattattttacatatcacaaaatagtcttctgatttttattttgaaccatttaaaatgttttaaccatatgaattttaggattatttttctatttttatgaaaaataatgttggattttgtgtgtgtgtgtgtgtgtgtgtgtgtgtgtgtgtgcgcgtgtgtgtgtgtgtgtttagacagggtcacactctgttgcccaggctagaatgtagtagctctctgtaacctcgaacttctgggctcaggttatcctccccagtggctgggactttaggcttatgccaccacacctggctaatttttaattttttttttttgtagaaacagggtctccctgcgttgcccaggctggtctcaaactcctgggctcacgtgatcctcctgtctcagcctcccaaagtgctgggattacaggcttgagccactacgtccagccaattttggaattttgatagggattgcattgagtctgtaagttgttttgggtaggatggacattttaacaatattaactcttcgaattcatgaacacagaatatgtttccatttgtgtcttcaatttctttcatcagtgttttagtagttttcagtgtacaagtctttcacctctttggttaaatttattcctaagtattttatatttttatagctactgttctcttggtttgtttttcaggtaataagtgtttaaaccattctttttttttttttttttttttttttttgagacggagtctcgctctgtcgcccaggctggagtgcagtggcgcgatctctgctcactgcaagctccgcctcccggattcacgccattctcctgcctcagcctcccgagtagctgggactacaggcgcccgctaccacgcccggctaattttttgtattttttagtagagacggggtttcaccgtgttagccaggatggtctcgatctcctgacctcgtgatccgcccgcctcggcctcccaaagtgctgggattacaggcgtgagccaccgcgcccggccgtgtttaaaccattcttagcttgcaaaggtgatgagctggatttggccatggaccatagtatactgtctcctggtacaaaggaaagggttaaataagggttgtaggataaaaccaccagagcctaaaacctcagagaatggcatgcaaagatggcttgatatagtagaaagagtctttggggccaaactgacttgctagttttgggaatcttctttcctaatctgtaaaactggaaaaaaatagctatatttatatggtggttgtagtagttacctttgctgtataacaaaccacccctaaaagttagtggcctaaatcagtaaacattactcttacaattctgtggttggctgcaatgttcttagagtctgggctgacctggctaggactagattgtctaggtcctagaatctaggatagccttacatgtctggggcctcagactgaggtagctaaagtccacttccatgtgacctattattctacaggcgactagccctaacttgttcacaagatggtagaaagatcccagcagcgagagagagcaagccccaaagtgcaagaaagtacaagcctcagcgtgctgtatgtttgttagtgttacactggccaaaggaagtcacatgagtaaatccagagttaatgtgggaagggatcagaaaggtgtgattcagttcagtaactgcagcagtctgccacagtgcctagcacctaaggaactcagtaaattttagatcctccttatatttgtcagacaagtgaagaatctgccagctgtgatgactcatcttttttttttttttagccagtccctagttttcttacattatagtcactgttcttgaaacttgctgtatgtcattttagggagatgaatacaagactactaaacttttgagagctgaccatgtgcaggaactattctaggtttttgacatatacccttttttttttcccgtaaattcaatgagtgggcacccctcaaatgtgaatgagccctagggctttgggagagcata

SEQ ID NO: 669 - DNA, 8899 bp, Homo sapiens
  source 1..8899: mol_type = other DNA
gccatccgccctccacacgattcagcccggtggtgttagccccctggactcgattcctgaggcaaacagtgccccttaaggtcggcgacagcctcttctgggttcactgcagtccaaccggttccctaccctctgccattatgaacatccgcaacgctcagccagacgacctgatgaatatgcaacactgcaacctcctttgccttcctgagaactaccagatgaaatactatttatatcatggcctttcctggccccagctttcttacatcgctgaggatgaggacgggaagattgtgggctatgttctggccaaaatggaggaggaaccagatgatgtcccgcatggccatatcacctcactggccgtgaagcgttcacaccggcgcctcggcctggcccagaagctgatggaccaggcctccagggccatgatagagaactttaacgccaaatacgtgtctctgcacgtcaggaagagtaaccggccagccttgcacctttattctaacaccctcaactttcagattagtgaggtggaacctaaatactatgcagatggggaagatgcttatgctatgaagcgggatctctcgcagatggcagatgagctgagacgacaaatggacctgaagaagggcgggtatgtggtcctgggctccagggagaaccaggagacccagggcagcacactttctgattctgaagaggcctgtcagcaaaagaacccggctaccgaagaaagtggcagtgacagcaaagaacctaaggagtctgtggagagcaccaacgtccaggacagctcagaaagctcggattccacctcctagagcatgcttaaggtattctgtcttccctgacccagtacccccttctcctaaatccctgcatcctgccttggcctgcccaattccatcctgtcttaccccattctggccctgcgagattttacggtaaaaaccacctggtgaccttagggagaagttagagtgagttgagggagactcattacacgctattggaagttaaataggataccagctcatgctgaaagtagattaatttcaatgaagaaacaagcatttatcctgctttttgggcatgagttgtatttcagggtaaccacgtagttgatgaaaggcatttttttctttatggaattccagttagtaataatgatagaaatataaaatcatcattttccaactcttgatgaaataatggacccagccaagagtcatcaatggctaatagcattaggtaaaagttggagcactttgtaatgatggatcagactgacaacacttgaagtcagtgtagtcagtcttcactaaacgtggagacaaatatgtgtctccttatgcaacaggaagtgcacagtactacctatgaaatattctttccaaaagaaaattatgagatctgactaccattttacagaaaatagagggacttgttaaactataccatgatgcaaacagccaaatccagaatgagaggtttttacaaaacaaatgacctggtttcttcaacaaataaatggcacacacacaaaaaaagatgaagcattttctgttaaactttacagatacattaaactcaactgctatggacattgtttggatactgattcaaacaaaccatgtataagacatttttgagataatcaggcaaaatttgaacggggactatattaaggaattactaataattttattagaggagctaaatggtattgtattatgtttagaaagtccttatctgttaaagatacatacagaaataattatagctgaaataataggatgcctaggatttcctttaaaataatccagcaaaaaaagaagaaaaagattgaaagagggaaaatgaaataagaatggcaatgataattgttgggttgggaaatgggtacttagggggttccttatgccatttactctttcgaatgtgtgaaaattagcatgaaaagttaaagagccaaaacaattactgtactttttttttttttttttgagacagagtctcgttctgtcgcccaggctggagtgcagtggcgcgatctcggctcactgcaacctccacgtcctgggttcaagctattctcctgcctcagcctcccaagtaactgggactacaggcgcccgccacctcgcctggctaatttttgtatttttgtatctttttttctttttttgagatggagtctagctctgtcgccgaggctggagtgccgtggcactgtcttggctcactgcaagctccgcctcccgggttcacgccattccgctgcctcagcctcccgagtagctgggactacaggcgcctgccaccacgcctggctaatttttttgtatttttagtagagacggggtttcactgtgttagccaggatggtcttgatctcctgacctcgtgatgcgtccgcctcggcctcccaaagtgctggggttacaggcatgagccaccgtgcccggcctaatttttgtatttttagtagagacagagtttcagcatattggccaggctggtctcgaactcctgaccttgtgatctgcctgcctcagccccccaaagtgctgcgattacaggcgtgagccaccgcgcccagctcttgtacttcttaatacacacttatgctaatactaagaaaccactgaaactaagttttaaaggattggtatgttagaaacaacttaattgtaataatataccacagtatttcttccatcaaaggactttgtatcgccttaggaatttcaagggtcggtgagctactggcagtttacaggctttaacatcttaatctagtcaccttacccttacatgtatgaaaggcagcaacttctcatggcaaagtctagtcataaatagtgtattctgtatataatttcagtaagtgctatttgattagtctactcattcataaaaatatttgtcaggcattaggcttggagctgagtatacagcagtgatcaagacagactgatgtttatattatatagcatttaagaataaatggactttttttttgcattttaatgccaaaaccgaagctataacacactaatcccattttattttcattcagttacagttcagtatgttataaaaatttagatacagtaagtctttggtggttagaaagaatctgtcctcagaggagattttgcatctgacttttaataacctgaaagtttcacagtgactgattcattttttctaaaaaataaagccggcagaacagtctaaaagcaaagatgaaattaaaacttgatgccttgagaaagcgttgtcaaatttacacctgtcttgaaaaccctggagggctctctcaagactctttgaatgcacaaaccttttaaaaaaaatttcaactttcaaattccttcgtagaaggacttacacagtattgatctcatctttgtagttatttgcttctcttcattgttaaactctagctgagaacagagctaatcagaggttgttttaaaaccatatatatatatatacacacacacacacacacacctataaaactgatgaattcaaaagcacttaatatctgctatgagaaacaaaataactgccactgtagtaaaagaagagagaaataataaataagaaaattcattgttgtgtcacagttataaatttcagcatacaaattcaagaataattgaactgtttctttatgataccgtaattgaactttatttctaagttgaaggaaatgtttcctagactgagcttcaccgtctttctgagttgttatctgctgagacatattcaatggccccatccaatctttgatcctcaggattcacttctgggtcttttccaaccggaggtctcttaccattttggtagcaagggtatatgagtattagtctgcacaggctaactgctctaaaaattaacttccaaatctcagtaacttaacccaataaaatcttatttctcacatcatagtacaatgtgggtcatcagtgtggtggtgatgtggagtagaggggaaaagatggaccctactccatggtatcattcagggatcatttagacagggattcttaattttctgtagctccctttggcaatctggtgaagcagaaaaatttttaaaagatgtaaaaattataccagattacaaaggaaaacaatttcattgatatagttatcaaactattttaaaaatacttttgttgtaatatatgtgctttgtgttagcatattgaatagcctaataattactattatttcaaagtaaattttagtataaatgatatttaagataccttaagtatctataatgtgatatgaaaatacctatgagttttattggtgacaaagtctcaagtattgctaatactactgtgcattgattcctatgttcataatttaaagaattgccagatttcagttagaggttgatgaaaatacagaattgtttttgttccaaatccaaggtcatggttctcctacatcttattaaatagatcccaggttaagaactcctaattcaatgactcttgtcattttctaggatcataagaccttcaactggttcatatacattcaactagcagatgagagaaaagaatgtatatagtggttaataaaggttttaaaagtcaagtcttacccaactaactgcaggggaggctatgatatttagtttagctttgtgctcaggaaagaaaggaaggagttcagcaacaacacagcatagtttctgccacaataggaaacatcctagtggtgctctggactttgagaagttttgcttccatgcccagttagaagcaatgggatcatacagctgctctcactccatggcatggcccagggaactctgttaggctgtctgaggttgtctacataaacacctgacatatatttattctgctgcttcacaaacttgggcgtggaaaactatgggattctgttatcttgctgccattatgccactaattaaacctgggacaaatgacccctctcctctgaagtccccaaaactgtctaaatcttcacttgcatcccatttaatagggattcaccagcacataggtctagctccctgaatggagaaaggctacagtgaagaaagaaagaacaggaaaaacatttaaaaggctcatactgcaaaagtactatccttctacaattgtggtgctccctcctgtggagctggagttcaaatacctatagaaaaaatgtcctaaaaaaaatatttttcattttccctatctgtacttttggatttgggaacagagacagagttagaagtgatgctgagcaggacagttggtgaagaactggttgatttcatctaaaaaatggtaataaaaattgctcttcacactatgaaaacgcactgttttgcaggtattaattctaagcactgttaatgatgtgtttcatttattcctcataataagcctgtgaggtaggtactattactccattttgtggttgaggaaatcatgtcacagggagggctgcatgttatacagatagtggaaaacaaggatgcaaactcaggtggtcagactccatgattgagaagattaaatgagtcaatctatgtaaattgctaagcacaactcctcacacacagtaaaataatcaataaattttagctcttaatataatcgatagtaagagtaacttttcaggttctcttcttctccacggtaatcaaatgatagaatgttgtgtatgagcagcaacagtttgcaatcttggatgggaaatgcatcttaatgattaaaatagctttcactgacaagctaaatgtcaaagcattcagctgaatcaacgcttgtcaacggcagagtttcttgggagccatagcaatgaagacaggtcagttcaaaacatgctggttgaggcaggaatgtcatcaaactgctgcttatctcttgacaagaaatatgtgcttgattattaataacaaaaatgaaaaaaatgcaaaatcttagtgttttcaattgagctggcaacattgagttaagtaaggttacttcagtgactctccctttctggtttattctttgtgtcgctaaactgtcattctaacaaaaagttgttaaatgttcacatgagcagtcactgaaatagactgttcttaattttaccagacaactaattataactggaatgatataatgaaatatggaagaaacctacagactgacaggtctggtaaattcgtagtataaccttaccccagatatgccagaaaccatagatttcaaatgcaactgcactctatgaagataaagagggggttgggaagagataaaatattgttttgaaatactaatcagatagatgccatttgttgaattatttataatctctaacaatgtcacctttcaatcagtgtatgatgtacatgtaggatgactgaaataccaactttgtcagaagtaactgataaaagcagaggtttttcctaaattttgtactctatgctctagtatatgaaatccaatgggctttatggtacaggaggttagatagaatatttaaaattctttgaatgggcaatgattcaaagagccaccataaaagcctttctgaaaatattctacaatgccatttctatagataaatatctttggaaaattataggatttttttttaaagtaaagccatagtattctgtttcatgtttataacaccatatcgacaaatagcatgtatttgtcaggcttccatagcccacctttaagaaaacctgataatgtaaaactttgaacttaataagcaagacattaagggcttggggtgggcacagcggctcatgcctgtaatcccagcactttaggaggccaaggcgggagctttgcatgaggccaggagttcaagaccagccttgaaaacatagcaagacctagtctctacaaaaactaaaaaacattagccagcgtggtggtgtatactggtgcgtgcttgtagtcctagctactcaggaggctgaggctggaggatcacttgtgcccaggagtttgaggctcttgtgagccatgattgtaccactgtgctccagtctgggtgacagagcaagaccctgtctcaaaaaaaggactataatactaacattttaaagggaatctttatgaaaaatacctatactcttaaacaacaaactatcctatagcctttattacagtgttatttgactttttcagtttaatttcttaaaattttcaagcagtatttactgagataactaaaacagctatataacttcttttgcatgcctgttcatgcaaaaatgaaaaaggcaatgatgatagtctttctgacctgttcctccatatcttgtgtctcttttgttatagcaaatatactttaaaaaataagattttacatagtattacctcttacaactggcttcacttgttattctggcaacagaattttctataacaatgattttgtacaaaaatgctttttaactgctctgtgcataatagtcagcctcaatcttatttacttctgtgtgcatatgatagatgaaaaggtactgagtaaatatttattgaatgaatgaatgaatggacctctcaaattacccatataataaatttttttaaaggagagaaaaataatgtatgtatgattcctcttacctgatataattacctacttcctcttacctgatgtaattagggcactttaatttgtgaataaagaaacattatggttattttggtttcctgtccaggcctcagaaagaaaatatgacttatagagttggacacattgcatctaacttatcaagagctaaaaaggcctttcatttctttagaattggaataaattttcttttgagtggagtaggatgagatagaatttaaagatgacaagcaaaatgatctcagtttctttagttttaaaataggttctttgggggtaaatcccagttttttggtgttcttcctgtccctttctcctggcagaaatgtcctttagatgtcaggaaaggttcatgtgttcttatggcagggaggggagagagccccagatctgtgtgtggtctttgtgcagtcatctgaattctcactgactgccatggagatatatctagtccaaactagttactgggtttctttatctgctgttccagtctatcattaactaaaccagtattctttcagagctgtcagagcttatagctctccctttctcatttgttttcttctcatttttcaacagcatttcaggtcctcatgtctcaaccacatctactctgtgaaccctggcttagtctgtctgctctgcagcatctgctgtggggatcatctcacagtgaccagaatggcttctcactcttaactctataaacaaccacctttcacatatcctgctgggatcatgaaggaatacctggacacaagagccactgcacaacagccaaggaactttgagacctgccattacagaacctttcttggcctactcacactacgctgccattttattctgtttgtagtagtcctctgttgggtgtggttatcctgcaagtttttctccttttagaatgatgaacaggaagcagggcaaactcttgaagatttccagctttcagtttttgtttttgttttttaaccattatttacctgagttttcatccttgaggaggtgaagtagtcaggaccatgaagtcagacctcatgccctcttcctcctctttcctggaagaagtattcagtttccttttcctttctctggtaactcctcctttatactattcccccctcccttttttttgaggaggagggcatcaccttcccagtgggaaaaggtgttaagttaggagcttctactgtacaatcagaacttggagattttaagaaaaggacaaacggtaattaaattggaatctcta

SEQ ID NO: 670 - DNA, 32744 bp, Homo sapiens
  source 1..32744: mol_type = other DNA
atgcgcccgcactgccagtgcggggggcgtccgtatcgcttactcctcagtctccgcaacccccgccccaccgagagtcgggctcacgccatcttgtaccccccccatcgccccgtcacacagccgagtcaccttttccctttctacactccacactctcagtcccccaccccgcccctttccaagcgtgtcccgggccgcagcagcagaaaccgcaccatctccacccccacattctcctcgcgggaagcgcagcagtgcctccaagggttcttaaagcagaggttgtagggcttgcggggggcggtgcggggattcgggcgggggagacgtcagagagccgggagggacgcagagcggagatcccagcgtcgctgggcccccgcgccggccacgccctggccccggctcgagggcggctgcctgggtcttcgtggtctacgccggagtgttgaagggagggcggctgtgggaggcgctggccgggcgcagcgccctggttccgctgccgagcgtggagttgcctctcgactcctcccttttggcgggtgggcgtggggtgaggggggctgggctgtgctgagaagcggggtgcgcgggtcgtctaggtagtgtgggggctgccggaggaatcattaaagagggaaattgttgctttatggcacggcgagagaagagttaggtagttagtgggagtgtagcatccagaaagaggaaaagatccgctgtgttctctgtggggtgagctcacgtctgtgacccctggggaaattatttagcttgtctttgccttgttttggtctgtaaaatggcgatcttatagcctatttcagaattgtgaggattatatgagaaaatacacgttaaacgcttagaacagcgccaggtgctgctcagtacatattagctctgcttttgctctccacgttttaggagttcagaatgactgtgaccttattttctcagagaatcaggacacttggtctcacacgtgagagtgaagttatgaagacagtgatatgtaatatttgacactcagacgatcctggacgtagtattactgtacacgtggataaattagcatttctccaagaggctaatagaaatgttaagttatttcggtagaaagaaatgtgtgtgtatatatatgtatatacatatgtgtgtatataagtatatgtatgtgtatatatgtatgtatgtatttggaaggagaggacctggggtcttagtatatgtgaagggcagactctggaagaggaattaaattcgccctgcaaagatttacttgaaggacaaaacttggggaatttctggtgaatgtttcaaagaggctgaatttgcctatgagaaacagttcgtgagagtactttgcaagaatggaatgctcttcattgtgctatggaaagtttcttatctcaggatattcgggacgttggagcgaagtatgcctaagtctagggctgcacttttcactagcagtttctgccttgatggagatgttccataatctgtgcctttaggcactagtggtagcctaggcacagtggctcttcagcacttgaaatgtgataagtgtcactgaggaacttaatttttaattttattcataaattaataaattgatttacgtttaaatacccacatgtggctagtggtagctactgcattggacagcacagggctacaatttagattttgagagtccttccgagtcttgatatggttgagttttaaatcagataagccagctctttggaacatttattgccatagggaattgtaattatattcaaataatgcctttcattcaaatactgcagttcagaccatgggtctgttagtacttatttacatcttgacaaattaaagcaaaacgttgtctcctaggttgtacagctaatgccagattcagagagctatgacagtattaactggagttttctttaaacattattgtactattttgtgattgtcggtttctgctatcttttaccactttggttggtttttcagtgagaagtttccagctcttattcaagtttttttcttttttaaccttttgtgtaataaagcgatttgaaaaattgtaactcttgagcattaggacattttagaactagttttatggttatccaaatcttttggagagataagtgaaattaggtaatagatgtttcacaaaattactttacttgaaatatgtgcatctgttttttttttttaaagcaagtgtatataaagtcaaatttgaaaataaaactaaaagaacaaataaaaaacctttataggtagcggtagcacccttaaccttggcctgatgtctgtaaaatggtgcccttgggccaggcacgttggctcatgcttgtaatcccagcactttgggaggctgaggccagaggatctcttgaacctaggagttcaaggctgcagtgaatcatggtcaggccaggcttccagcctgggctgcagagggagaccttgtctctttaaaaaaaaaaatgatgctcttggtcttaaggctgaagataattgttagatctggagcaataacttaaagctcacgagttaaatcagatggagagaatagctcataatatacaaatcagaatggggtgcttttatgggtgactatagtatcttaatttttctgagacagtcgtagtataaagcctgattgttccagcacaattattttatttaatagaacccctttcactatcaaaatgttcgaattgggaccacatcataatgtcaccctactgttagccttgttgggacttgtaatatatagttttaggatgattaaccacattgcaatatcagaaatactttattatttttgagatggagtttcactcttgttgcccagattggagtacaatggtgcgatctcagctcactgcaacctccccctcctgggttcaagcgattctcctgcctcagcctcccgagtagctgggattacaggcacatgccagcatgcctggctaatttttgtattttttgtagagacagagtttcactatgttggccaggctggttttgaactcttgatctcaagtgctccacccgcctcagcctcccaaagttctgggattacaggtgtgagccaccgtgcccggccagaaatatactttaaaacagtgacaaaattactgtttttgtgtctaaataataaataagatacctggaataaggccagcaagtgactttcccatttaagccactgataattttaaaattttgctttgaatataaacctttagcagcttgagttttggttccctctggaagaaaatcatcttttggtgggggtgactgcatggtagtctatgtcagtcaaatcaggtgattgagtatttgtgttgaaataacactgattttattttatggtgaggttgaatagtgaaatccgtcagaaatctgattatgtattagaatgttaaagaagggttttgcttacagtttacttaatgaaaaataattcagccatatgcattattatattaagtttatactgaagtgggtaaaatattttattgaggctctaacacttgatttgagttctcgctctgctgcttcctaaccatgtgatttgggacaaattatttaatcttcctaagaatactgggttcctcatttataaaatgaagatggtaatggcatctgcttctaggttcataagaggttaatttaaataactcatgtgatgggttgtgtgcagttcagtaactgttagctgctgtagccttaagtttattggataatctagaagtgataataatgttctgagatgttatgtgggttggtgaacagagcactaagacccaattctgtaaacctagcttttgcccttttctggcacattcttttgtcatttcagttaaggtatttaacttattaatatcagagcctcaatttccttatcagtaaaatggaattagtacccatcctcatcccgctttctcataggactgttggtggcatcaaatgagaattacatttaaaaattatcgtcttactttacaaacatttttatattgaattggttttgtctcatcttgtctaccttcagcctccactaaagagtgacctgcaaaaattgttgtgtaaattttgtgtaacagcatggatagtgtataataggcactattactgaagacagttctcttttacaaataatattgtaagtcacaggctgggtgtggtggctcacacctgtaatcccagcactttgggaggctgagatgggtggatcacttgatgtcaggagttggagaccagactggccaacatggcgaaaccccgtctctactaaaattacaaaaaaattagccgggcatggtggtgcatgcctgtagtcccaggtactcaggaggctgaggcaggagaatcgcttgaacccgggaggcggaggttgcagtgagccgagatcgtgcactgcactccagcctgggcgacagagcaatactctgtctcaaaaaccacacacacacacacacaaataatattttaagtcacagtaatggtgcttttttgatctggtcacaatatattttctacggaaaacaaccccatactactgctaagggagaaccaacattttcttgggcacttgatgtgttccttccgttgtatctcatttatccaaacatattcccacctaataggttatactaatgaggctcttactttctagaattggtctgtgaggcttttttgtactgtagttctccctctgaaaatacctggcccatagttaatgggtagtgaaggttaaataagataatgaacatgaaaatcgtggccggctctgtgacttcatgcctgtaataccagcactttgggaggccaagacaggcccgggttgcttgagcctaagagtgatgggcaatatagtgagacctggtctctagaaaaaatttaaaacaaaaattagctgggccgggtgcggtgactcacaactgtaatcccagcactttgggaggccgaggcaggtggatcgcctgaggtcaggagtttgagaccagcctggccaacatggtgaaactctgtctactaaaaatacaaaaattagccgcgtgtcttggcgtgcacctgctacttgggaggctgagacatcagaatcgcttgaaccctggaggcggaggttgcagtgagccaagattgtgccattacactacagcctgggtgacagagcaaaactccatctcaaaaaaaaatgtagctgagcttggtggtttgtgcctgtagtaccaactgcttgggaggctgaggtgggaggattgcttgagcccaggaggtggagattgcactgagctgagattgtgccactgtactccatcctgagcaacagagagagaccctgtctcaaaaagaaaatagtactctgtttggtgtatggtatgtaggagttactgaaaagatgctgttgaattcacaggacagtaaattgaaacaatttatgtgaatatactttataaactaaaataacatacaaatataaatcattaaaaaatcttgaaatgtacttttgctgatttaaatgctatagtggttttatgactgaattctgtatatttcactttattcatattagtctttaaaggtctactcttagtcataacattctttgagaatatacatgtttaacagtaatcttttgtgatatattttcaagaagctatgcttttgcatgagttaatcatcatcatcagcatgaactaaatgccttatatgtacaaggcggtttactaagggctttacgtatgttattttatgtaacctataagagaagtaattttaatctccattttagagatgagggaactgaggcagtgaggtggcataacttgcccaaggtcatgtgtaagtgttagagcctataatttaactccagagcctagctctttactgcttccattgtggtttggcatagtcagatattaatatttcacaacacagttcactgtgacatacacattgtggaggccttttgggttagttatgataaacttttatttgtatattctttgatgtatagtagaaagaactctggaccaggtgtcgggggacctcagttttagtcccagcttgtatcactaaatagtagtgtgtccttgggcagttcaagaaacccctctggacttcagttcctcacctgaaaaatgagggatttggaggaaattagtgattttcaaactgtagttctgaagtctgctcagatgtctttggttccctcccaccaatttgcatatatgtttgtctgttatagttgcttatccatctacctaagattttcttttaaacaaagaatttcttaactgagtgtttaaagtcatcagtctccaagataacttaatgaccatgtaagtcccctgactgctatgtttacaacttttcagttaatttcacaatattttagtgttttaggagatagagatcttttactaatgaaaaaactaaagcactaaaatgagaggattgttattaaaacatagtatatctaaatggcctgaatatttcaggttatctgctatctgggatcaaagcctgttgtttattggatttgtgaccttcagccagtcttagtttcctcattggtagagggagaatacttgtcttgtagggtaattgtgaaaaaaaaaaaaaaaagtgagctaatactggtgaagtaccctttataaactccaaattcctctattttttacatgcctacagtaaatcccccagtcctttttctttttggtcacataaactgtttttaaacacatcagatattttgtaaattgtttatgtttaatgcagaattctcataagctttaatatttctgaaatgtgactctagactggaagagagttttgatttttaagggagctgcttatttttttgacatgtttgtcaaatacacttacctcttactgttaggagtataattgctgccaaaatcttccacatatctcaaaagttaaccattaagtaactctttaattaagtttgtgtaagaacaacagtgttttaatgttggaaaagtaagtgtgctatgtgccatttgtcagggcttaaggataatctgataggcacatttgcagtgcaccttagggactgtttttgcaaagaaattttttttttaaactcaatttttctgtgagagtactggatatgaaagcatatggaatagaaacttaatgtgagactaaagaaggaggatatgctagaaactcctgtgtctcggagcagtctatcactgggctcctatgtctgttcaaaaagatgctcaggtaggatatgtaatgctgcacagttttagctgtttatcatccagagagaaaggatgggggtagttttcatgtttacagggtgttttgatattttcaattcagattttttttagtgcccattatatggattcctgtgagataaattattcctgacagagaaactgaacttatgagattagttgatccttatatccttatacaaagttctattatattgattaattatccttaacaaaaatcttgtgaccatggcttttatttcagttttctgctttacaacatctctcacaaagcttctgcagctttttaaaatctccacttgaatgtctaatagttgtctcaaacttaacataggcccaactgaactgttttttttttccttcccagtcttctggatctcagtaaatggcaccaccattcaaccagtttctaaggctccagaattcggtcatccttgactgcgcttctctcacaccccacgtgtaatccatcagcaaatcagttctgctttcaaaatgtattccagaaatctgaccacttctcatcatctccgcttgttaaactaattcaacccactgtcatctcttgtctgcacaacctcaataacttcctaactggtcttcttgattgcactcttgcttccatatagtatattctcccagctgctggagttatctttttaaacctaaaacatttcaagtaacttcccttttcaaaattctctaatagcttcacattacactcaagtgaaatgtaaactcctgtggcctaaaggctttataagatctgccctcttgctacccctgtgttcatatctttctagccacactggccacaggattttggtactttgctgttctttctgttgggaagttctccagagctccctcccagatcttatattaaatgccacctcccagttgaaatcaacttgtttttttgatttcatagtatttgttatttcctcaaattatatttgtttatgtgcttgtctcttgcattataatgtatttctttttgtctgacttagtcactactatatccctacctcttagaacggtgtttggcctgtagtaggtgccccgtaaatacttagatatgaagaatccaaagcactggtggtgttggctttaaataagagtgtgtctttattataagaggagggaattaagggaggatacgatacactgtctttggtggaggagagtggagggaatgactaaatgatagctttttatttctctggaagtagaagatgatgtcaactgtccatagctaggggagggattcactgtgggacagaggctcattcaacaaaaataattagtatgcactaaagtaatttaatattaaactaatataaactaaaataattagatgtcagagaaagaatttcttttgtttacatatctgggaaggtttcttggagatgggcttaggtcagtagagtttgggtaggttgagagatactgtattgtttcaaaaggtattgcaagtagagagaactgtaggggtaaaggttcaaaagaacatggaatggttctggagatagtgaaagtttgatttgactgtggtagaaaaggaggctggggaggtcaggtgtgactgatttgagataagtttataaaccaggctttttaataccttccaaagtccacttaaaatggggcatatattaatatattgagattacctttgtgttattctaaacactaggtctagaagtttttatagatattttatgtatttaatttttaatttttttcattctcagtgattgaccatttggtattatttttcacatcagaagaaatttagatcatgatgtaacctgattatttttttaaacaacaaaacgaaaactcagtgcataatagtgttggcttaaccataattgtttcctgcctttggaattttatgaaaataaaaatgttctaattataaaagttttctattaatttatattatgtgagatgttcaggttatcattagaattgagactctgtagatgctcaaaatcagtacataggtctgctgaaatagttttcttcagcaatatagaagaaaagattaaaacttctctcttttagtggattgactgatagttttcacagtccagattttgatgatgtttggagggtgcagaaactagtaataaggttctcaacaatttgaggtcttttaagcttaaagatgtttcatggtatttcttctgtggtcatttagtcccccaaaatatgagatctaactagaaacccagtagcatgttcagtgcattttgtttaactcactttttgtgattaacttcactacaattaaaactttttttttgatagcaatattttctgaggaaaggcgtgcatccttaaattccttcattttaaattgaaaggtaaatgccaatttttcttctctggaacacagttttacaggtgtgttataatattagctattagcttaatgatcaggtttaaatactattaatcagatatgaacttattccttgggttcacatttaaactctggcatgttgaaataatctaggtcccaatctgcacatctgaattcattttgtaaaatatggcaaacagatgcattttcaattgaaagctgaaacaactgcaggacattaacccattgaaaagattacagtaggttttcagttccacagtaactgtatttattagtgaaaattgacttgagtgcttctgcttttaacagacttttcttttttaatgtctagaagaaaggaaatagagcattggaatgataggactttgatgtgtaaagaagttaatgtcaaaagaagttaattatctaaatcaaacaatgtgggtatgggaaataattattttaaagagtctaatgacctatcagctcatcatgtcaagaaaaatgttattcacctgtttgatataaaaattgacttgactgtgaaaggatgatcatggttataataaactaggtttggtgactggatttgaaaatgaaaaaggagcagattgctccagcagtgtctcaggacatttgaccataggataatcccatggaatggcatgtctgtcaaatcagacaagtcaactcaaatcataactttctggaggctggggttactacttactctttgagtttaacatgttctcgaagatagctctgtcagccttctattgagacaagggaacatttcctgaggtctttgagaaatccaggctcctttttttcgcattttgtcccaattctgcaggactatttagggaagtcctttgtttcctgttttcccccagtcttggacttgtgatttttttttttaatccgagtctcaaatggttatgtttcttttcctgtgttatttgtagagaaaagtacttattccaaaagtctttttaaacaatggcacaaatttaggcttaaaaaaagcgatggtctttcttagcattatgttcttcatatgttttagaattttggttttcgggctcagtttaagtggaacgtttttgttttccttcgctttttgtgctcttgccttcttggtatagtggttttggcctggctgttagggccctcagactagaccagagggatattgggatattccaaacctagtcacctagctagtgtgctgcttgccttagatctgtgtcctgtcgccttctcaaaagcttcaaataaagcctatctccatcagtgatttgtagtagctttttttccccaaccttctttcgtggggcccagcccttccatctcagcccttggtaagtgaccctggtttagattccctttatgaattttatcattacccacaggagtggttagattagaaagatatattaagaagataaatttggcagcagtatggagaatgaactgagatggagatagaagatgtagctaagagtttttagaaggccatagccgtaggacaagaggggaagggtctgagaacatacagaaagtagaatttacttgacttcttacaaattgtagggtgcaggagaaggagtcaaaggtagtgactgagactttgagcccaagtgactagtagttgtagtgatgtcatcagtgaaaactcaacttataaagaagctacttagtatttgtttagttgcatagaggtcttttagtaaaaatgtttaagttttaaaaacttgcctgattgtgaaaaaaagggtaatacatctaaatttatataaaagtttttagcagataaaggaggggaattcttttttcttctttaactttcccctttaacggaagagggagttcttaaggtctgcttattacaatagctaacatttattgtgtatccactgtgtgctatcagtactgctctaaatttttgtatgtattcatttaattctcacaacagccctaagaaggtgagattatcgttgccatttacagatgaggaaactgaagcacagagaagttaggtaacttgcccaaagtcttagcaaaggagcggagctgggattcaaatctaggcagtctgaccccagaacctgccctcttagtttactgaaagtcctctgcactgctttactttatcatatgttctaaatatcttacattcttctttagaaactgcaaaaaatattttgaggaaaattacagctttgcaaagtttatgcaagcatatgaaataataactaatgtttattgagcacttccagtataatagtgtaatagatgagggtttacctactttcatgacattattttaatgttactttgactaaatcttgccaatttttttaatgcattaaataaaatgtcatacattaggattggcacccactttatcattatgcatcaccttaattttattgggaaaaatgtcacatttaaaattgagtaagttatttacccataggattataaaatataatgcttttgatctaccgattgacattattatttgtattttaggcttttgttcaaataggatttagattatgctgtagttttctaattttgtatctttcagctgtggaattgtttctttaaatgagatcttacttggaaccttcatatatcaactagaaaaatcagggttgttccgtggcctgaatgaaactgggagtgtgttgtgcttggggtccatctagaatgccctgaagcattgctgatgaaccgtagggctccctgaagcacattttgaaaaccaatgagctctagtaaaatatgttaataaatactgtttttacattacctattgtaaaataggtgctaaagtatttatcactgaagtgagtaattggctgacatcttacttgactagtttttttccaccttgctatttcattttaataaagaacattaagtataagtgaatcagttttgtgcaaaacaaatcagaaatttaaattttctctactttttgaagtaatttatatttgctttcttttttttttgcatttacttatagctaggtacattttgtaagctttatttctcctttttatttagatgaataatacggcagctagtccaatgtctactgcaacttcaagtagtggaaggagtacagggaagtctataagctttgcaacagaattacagagtatgatgtaagtatgtccctgcatgctattgctattactattttaaatttattcatgttgaaagacaatagacataacaacatttataaaacttaacttggaaataatttgttattaatcaagtaaaaatgaaatactgtggtaacattttaaattgccatatgtagaggcaaaattggttaaaaatgctacagtggtactgtatttgaaaaatgagtattagttcatctttataaatgatagaatgaataatcaggtggacacaattgctctaattatttgcctgagtctgtgttatgtattgtttatttctattctagtttatagatttaggaaattttgagactgattatattcttggacagttgaaatgttttcacatggaagttcttagtttttctcaactcttgtaataattcagtaagcctaatttaaattagtttttagttctgataatatttgaaatcactgtgtttcagagcattggggaaaaacttagagcatttgaaaaacatgtattcaatctttgggaaattgcagagtcattaagatttcttaaggctctgttcatcttgatttctggtttcttgcattaagtgaaactatatctcttgatttgataagaggtagcatatttattagaaatgtctgttgacacatagtagtttttcattatattggttcaggagacaattttgtctgtataaggtggggggcaagatattatagtgctcttcttttcctgtggatacattattcatgacttaacaggtagttgaaaagaatatatctgttgaaggtttaagtgtcttcctcttgtggctaaattgatagccttcatagttgaattaacgtcactatgtgatgattactgttaaaaggtaaaatgagtttgagcagatgtcttataattgcatgatcaacttactttatacaatattgaaaacacttagttcaggagctctcaaactttttggccttaggatccttttatacttttaatcattgaagatcctgaagaatatttgtttatgagggttatatctattaatatttattagttagaatttattattaaatttttttttttttgagacagagtctcactctgttgcccaggctgtagtgcagtggcacaatcttggctcactgcaaccttcacttcctaggttgaagcgattttcctgcctcagcctcccaagtagctgagattacagaggtatgccaccacacccggctaatttttgtatttttagtagagacagggtttcgccatgttggccagaattacttagaatttaaaaagaaagaaatttatgcattaacttgaaaagtagtaaacctgttatatgttaatataaataatatatttcttataaaaatattctaaagccaaaaattgattacacctttcagatgagatgccaataaatttgacatatttagcaactgcgtgaagtgagcctatattttaaattatggaaaattataagtgtttatgcttatatacatttttgtggattagtttaatttttttcattatagtttagtggctttatattaagaatattttatgttgtgttatgttaattatgtttaaaaatactaagcatgttttaaaaggtttagaataaggtgaaaaaattcattttctgtagagctggttcattgatttactttgtatttttaaaacttttaatttgggaattttcaaacttacagtgtaatgaaacctatatatccataatctggctttaacaataattgtgtttttccagtcttatttaacctttctccctactctccctttttaaaaaaatatgaagtattttaaagcaaatcccagacatcttatttcaaaatttatagtatttattaaaacaatatacttgttagtaaagttaaaaacagatgtcctatagcagaagtcaacaaattatggccatggacttgctgcctgtttttgtaaataattttttactgtaccatacccaggcttattcatctatctgttgtctattgaagccttcatgctctgtgccagagttgagtatttgcgacagagactatatggcctgtaaagctgataatatttactatatggtcttttacagaaaaagtttgataatctctgatctgtaaaagacagttgcctttaagaagaagactacaaaaattaaaaataaaaataaaaaacctatgtacctaccaaaattaaaaataaaatattaaaaaaaccaaactgttcccacaaaaattaaaaattaaattaaaagctgtagagtattatattcttttgttatttatacttaggagagcttctatttagtgcatttgatggaccttgggccattttaaaaaaactgagaaaaaataaaggctaaattcagcactttcttattaaatacttttgcaaacatcttcccaaccaatgtacctaagctgaattcggaatgcaaaagttattgttggctacagctctggaagaaatgtacattttccttctatttcagacctcatagagaggccactcctaatagttacattcatcatttatagtctgaagttattttttttgcccttaggaatttctttatagaacagggaaatagggccaaaattgggagaatccttttaaatttactggtatttctattgttatgagatttttaggcttttgattgtataaaattagactcaatatacatttaattcttgcttatgtatatttcaaatgagaaagtgtggacttattctgctatgtttattttgtgttacagtaatttcattctgtgactccctactgctgctgttcatagttctaagcctgtttatattgctgcttttcagtcctctgctgctgtcttccccaatccattcactattaatgagttgttgttcttttggctccctggtgtctaaataagtaacaatattgtagtgtcatttctggggaatggtttcactgaaagttgtctagttgtcaagcacaaatgaaatagtcatgatctgctattaaatctagaactggcaaccaatctgtcctagtattagagccttgaagaacttaccatattttgaatttgggtggtgaatatcaccagtgaggcattcttaacagaagttgtgttgttgttgttgttgttgttgtttttgagaggaatctagctttgttgcccaggcgctggagtgcagttgcctgatctctgctcactgtaaactctgcctcccggcctcaagtgattttcctgcttcagcctcccaagtagctgggaatacaggcatgcgctaccacgccaggctgatttttgtatttttagtagagatggggtttcaccatgttggccaggctggtctcaaactcctgacctcaagtgatccacctgctttggcctcccaaagtgcctgggattacaggcttgacccaccgtgcctggccccttcttacagatttgaaaggaaaggattagtagtctaacaagtgttagtgggttgggatgatagcagttgtgccttacctagtgcatataactgagcacatttgctatatgctctttatcacagctcctttgaataacctgtactggaatggtccagaggtttttcatttttaggttattgaactcaagcagcctgtaaatttgaaagtgaaatcttttcagttgacattacaggtattttaacaaacttcttaagaattttaattaatttaaatgcactttgagagtcttcactgagttctctgagttcttccttactttacccatttatatatttcttgccttgtcatgtactttttcagagttacaggcctgatgataatgatgccagatttcacagctcagtagtgcttagtaattataatgtcaccacgtttttaaaaattgggagttttggggataaatagcaataacattgaaaaaatcttgtttacatgttacttttatattgtaagaattcttccaaatgaaaatttcatccttatctaacatccacaaattaaaaaaattttaatcagaattttcttatatataataaaatacattttaaaaattgtacagttctgcaatttttgcattttaaaaaattacctttgtatttttgagatggggtctctatgttgccaggctggtttcaaactcttaggcacaagtgaccctcctgcccccatctcctgagtagcttggactacaggcatgtgccactgtgcccagctaaaaatcattcactgagtccttattatatggcaggaactgaatgccttcaagaggcatatagtctagcagtagagaaggagacaaatatttgtaatgcaataggatgcgaaaaattccatggtagtacaaaggagggaatgaggaactcttctgaggataagctacctacgtttaggtctgtagttctgcccgcttcctggaatgtctgttaagtgttctgcgagcacctcaaatttagaatgtccaaaactgaactaacaattttctcagtaagatttgcttcttctcctgagagtgtttgggataaatagcaatgaccatttattcattgctgcagtgtactagagctttgttttatatgtgaaatggtatcatttgactattttttaagtattatgaagatatgagctgtgaaagaatgtgtgcccccttcatctgactttagagagccctgatatgtatagtctctgaatttttagtagatgggtttttaagctaacacaggcttccttcaaatattgttcccctggttcatttaagtttttcaggaaactgggagaaagaaaaaccctgaaggtaaaaagtacgaacatactgtaattccaagggtgctttaataatatcagtgataataatgaatgcttgtatagaacatgctgtgtaccaggcactctcttgagtacttccatatgccatttcatttcatcctcacacaactctgtgagggtagatgctattattccccttttatagacgaaagaatagagccacaaaggttgagtaactcaccaaatattatcctatagtcagtggcaaattctggattaatgccaggaagtctgactccagattccgtgctgttgcacttatgctaaactaatttcagttaataaactttttattttgatttacaaaatttagtttataaatgactttcaacagtttatgtgtgactactgtgctataatgaaataaaatgtgaaagctaaatgttttttcagttgattgctcggttattagtaacaaggaccaggtgatcctcctgcctcaacaagtagctggaactacaggggtgagccaccacacctggctgatttttgtattgttttgtagaggcaggattttgtcgtgttgcccaggctggtcttgaacttctgggctcaagtgatcctcccaccttggcctcccaaagggttgggattagaagcataagcctctgcgcccagcctgtcatttttatattatcatagcatttgttgcagtttcctatatctaacaacagatctttttcagcaagggcatatcagtaaccaaaagaaagtatactttttcatagaaattatatacttactatatacttattagatgcttgtatttgtgttatttcataattttggatacaaatgtggccatattatttgaatatttaaatgtctatcctacttttgtgttttttcactgttaaataataattgatcttcctgatatttaaattacactaaaatatgtggtaaacttacccatttactttttgtgaaatgcatctgtttgggatattttaagatatactttagtttataactataatagtaattaggaatattttcaaattgtaatgtaagtgagaatatgtataaaggcagatttcctgaaagtgatattatgtataaaagcagattgagaacataaaaacactgcataatggaaagtcttttttcctttcagaaatgaaataggaaatgtttaagtttctagatccagtgaaattaagtgcttgtgttaaaaaatgttattttataaatgtggctacataaaataattgatttttttatttaaatattactatcaattctctcatgagaagataataactagaactttcagtttaggattatatgtgtaattaccagggaaaaaagtgtcttgcttacttacagaaatgaattcttgaaattcaggtagatgaagttatttgagtaattctgtgatgaaaatccttagttatatggggaaaaataggtaaaaattcacagacccatcagcctaaaattgcagtataattgctgattatcacactggagagtggcagtctctgttctgaactaatttgatggtagatccatgctgtaattgatatatagctatttatagtctttttttatttttagagtgaatattcatacgtttcaccatgttcctgaatgcttctctagactctgctgaaagtattatgtgatttatgtacagtattaactttcaaaaatctgaaaactttatattctgcaatacatatttcagataagagactgtgaacctgtatctacctcacagggttagtacgaagattaaatgagatgattgaattaaaacacatagtgtagttcctggcagatgataaacattgtgctcttgttaccattatctttttaaaaaataaatatcatcatcaacatactgattaaggagtttataaaaagtaattcaagtatagggggaaatatttgcaatttaatgggaagaatttcataattatagagaagaaaggatttgtctacattatagcatgctgtagaactttccacagtgatagaaattttagttcctttttatccggtgtgatagccactagccatgtgtacctattgagtatattaaataagccaggcagctgagcaactgaattgtagattttatttaagtttagccataaacttagcaaacagctaccatattgggcagcacagaagaaatatagtaaatacaaattatttatagaatgcttcttttctgggttgcatctgttacatttttattgagatgggaaaaatacattttacatgttataacctgtttttatatttgattttaacacggtcattgattacttttttcctgtctctcttttttaagttgtcattgtcccacagttctttatagctttgaagatgttaatttttggctactttggcaagtcagatttgattgagaagtttaatattacatttatgttccattttttagaaagtatgaataataaagaaatgtgttcagtttcttaaaaatgttcttttgtgaatgtatttatatatatatatactcttagtctttctgaaaaatcctatgactgtagctctgaatgtattacacttcattattatgtcagcatgtgtaattgaatatgtaatgtcattgtgagttttaggttctcatttttatgtagctagatttacaaaatttctggtagctgtaaaattagcaatgttatgtagtattctgtcaattcattatttttattatggtgagattttgaaaacttgttagtttaaatgtaccagcttcaaaattaatctttagaaaagggggaccaggtgtggtagctcatgtctgtaatcccagcacttttgaggggctgacgtcaggggagctcttgaggccaggagttttgagactagcccgggcaacatacttgagacgctgtctctacagaaaataaaattaaaagcaattatctgggccctgtagtcccagctacttgggaggctgaggcaggaggatcacttgcacctaggaggttacggctgcagtgaaccatgatcctgccactgttctccagcctgggtaacagagtgagactgtctcaaaaaataaaaaataaaaaaggtactagataaaaatggattcttgaccgggcacagtggctcacgcctataatcccagcactttgggaggccgaggtgggcgggtcagaaggtcaggagattgagaccatcctggctaacatggtgaaaccccgtctctactaaaaatacaaaaaaattagccaggcttggtggcgggtgcctgtagtcccagctactctggaggctgagactggagaatggcgtgaacccaggaggcggagcttgcagtgagccgagatcgtgccactgcactccagcctgggcgacagagtgagactccgtctcagaaaagaaaaaaatggattcttcattactaaaaatatatcagagagtggttagtagttttagataggaaattaatatttgatgcctatattatatattgatttgcctcgttacagtaaattctgtaaattaaaaaaggtgagtgtaattttagaaaagagtagtaaattcttaatatagtggaataaatcttgttgattttgactttttgctggttctgaagtcccatgatagttaagtttgccaaagcacagttttgattatctctagatgtgagactgatggacacttttacattacagccaaagaaatgagaattgggccaggcgaggtggctcacacctataatcccagcactttgggaggctgaggtgggcagatcacttgaggtcagtcaggagttcgagaccagcctggccaccatggtgaaaccctgtctctactaaaaaaaaaataaacattagccaggcgtggtggcacacgcttttaatcccagctactcaggaggctgaggcaggagaattgcttgatcctggtgggtggaggttgcagtgagctgagattgcgccactgcactccagcctgggtgacagagtgagactctgtctcaaaaaaagaaaaaaaaagaaatgagaattgatatattccaatgtgttttaagatgttaacatatattaacatatatgtgtgtatatgtgtgtgtgtttttaatatactaaaatatataaaaaatatatattcaaatgagtatgccatcttttgcaaatatatcttttttggacacctatgtagattttaaaaaaaaccttagctgtgaaataccatatgcctttgaaaaaaatgttgttgtagtcattagaaagttttctaattggcataacatttttttcctatgacagaatagagtacacaaccacttttctagagaagaggagtgagaatctattatctttgactgctttcttcttacctttcataggtttctgtgtcttaaaacaactacgttacaaccagtttttgccatggctagtagagttctattagcctttcatggctttctctctattcctgtattacactggttagtaatgtgtgtttaatagggaaagggggggaaattaaatttttggggttggcctggcaatcaattaatatttatttattcaacaaaaataacattctttttggttggaattactttccaaacattcagacttggaatacaacccatttctaagtcaagcactgatagtattttttattctgcctcttccaatttagaatttgtgcatattaatgtcttttatatatctctaatcctttagaagtatgtgaacatagttaatgtttatttttaatagaaataaaacttcacttatctggaatttgtaattaaatataaatatttcaaaaggcaaattgatacaaagaaaaataatgctacatctgagtgattaaggtagcatgatacagtggagaagactaggtttggagctgcaagatcttggttcacttctttctgtattggtggattttatattttaggaacaattaacccccacccccaatgaaaaaccctggaaattttatgggtaggggaactgttatatcaacattttattctataataaatgaagtattttttatacttcctcatagagacagtttatattattttctgaaaaggaaaaaattagaaaatacagaaagttcataattaacaccttaattattaaattaaattaaattaaagtgcttattggagctgggcatggtggctcatgcctgtaatcccagtactttgggaggctgaggcaggaggattgcttgagcccaggagtttaagaccagtctgtggtaccccatctctaaaaaaaaaaaaaaaagccaggtcttttggcatgctcctgtggctcctgatgcttgggaggctgaggtggaaggattgcttaagcccaagtggttgagtctgcagtgacctgtgatcgtaccactgcactttagcctgggtgacagagtgagaccctgtctccaaaaaaaacctcaaagtgctattaaggctttggtatttatctttccagtttctttccaatgcatacaaaaaattaaaaaataccaaaagcccatattataattactactgtgtaacttgggtttttacttaatatatatcacaggacttttccatgttgataaatacacagcattatctttataagctgcactataaaccctagcctcaagcgatcctcctgcctcagcctcccaaagtactgggaatacaggggtgacccaccacacctggcctaaaactttttttttctttttttaaatgtgtctagagatctctgcatagcaacatataggagactgtgtgtgtgtgtgtgtgtgtgtatgtgtgcgtgcatttgtgtagttactgtttgaataaatcaggaagccttaaatgcagtgaagccccttattatccaaggaaactgagacaatccctgaatgagttagcagcggcagtagaagtaatgagatcctcacacagatgagcaaaaaagaagatcataaaagcatctatgattcctttccaagcgaggcatacactttggggtgtgtacatttgtgtgtgacttaatttttatgttcttagtaatttttagtcattactgtgcttttttggcaactgtccttttttcctttcacctgctatattgtgaacaactatgttatcagatctttttatttcattgtgtgtatatctatcatattatttttaatccctgctgttaagtaattaggttttgtccagtttttccactattattaaaaatgatataatggaatcttgaaacctactatttgaaagtcatagaggaatttttgagtctaaagacttttttgatactaacttcctaatttttcctacaggaaagttgaactaatgtatttctatcaagttatgagagcacctccctccatcttccctgacaatttttaacagtaaaaatattgtgttttcagcttttctttgacaactgagcttgaaaatactttggccatttttatttcttcttttgtgcttgtctgtattcttagtataattctactgtatttttttttcctattaaggacctttgatatactaaaggcactgacctttggttgattatatttggcattttccctattttccccgccagcacctaaatctcgtggttgccttaaggtttgtatatagtgattaaaaaaaaaaatgagttttcattgctcatatagttgaatcagtcttatatatcttattgcttctgtctttgacagaatgtcctacccttgattttgatacatatcttcatgcactttcttacatttcatatttttagtttctatggtttaatatttaatccattgttttgttttatgatgtcagggagggttctaagttagaataatttttcttcaaattgatttgccagtgtacttaccatctcaaattatataagcctttatttctcctcagaattgaaatactacctttatcagataataaattattttaaacttttctgctttgttccgttgagtagtctattcctttgccagtactgcattattttagttattatagcttcttaatatgttttaatagttagtattatagttcaagtccatccgcataacttttctttttaaaatatttttgactcttttcctatttttatttttccagatgaatttttaggaatcattttatcaagttccaaaacaaattctaagtgcaaattttaagtagtttcatttttcttttctttttctgctttttgctgtgtactcagatttcagacattggtctgtgcaattcattttacttttaaagttgattaatgaaatcattttacatttagaaagtttatttgaaacaacactggagagaaacagtaaaaacaactgactaatgagtgggccggttaactactgtactattagagactctgaagaacttctcagttttctttaatatttgtttttcttgctagaatgtagaattgtgctgtgactgcagtatgtaaaaatcagccaaactattccctcaattttaaatcatgcagttattgtcttaattttgaatggtagtcatagctggaaataaatgaccagtttaatttttttatagatatataaaactgcattctgactaatagaattatatatatgtagatatctatgcaatataagtaataaagaataaaggtatttaatgtattctttattttgtaaatacatgatctaagtgatcaaatggttctattttaaagaaattatttctacagtagattatgaatattcatgactacttataaacagaatactaggtacagttgctccatagtactctacttgtaatacagtgatgtcctagtgaatcatagaagcataaaatgtactttgttcctaggataaatagtcccaatctgtaattttgtttgaatttatagatttatttttatagtttttgttttctctccccttggctggtaattttgttgctgtcataccagactccagcaatgtttcaccttctttccttttgaatgttgcttccagtctacaacagtatagtaatcaaatttattagatttgtatctataataagagttcataaactaggaaaacttgatacactttcttttctgaaaaaaactacttgatctttggtgcataaacataatatcagttttgagaggggtttgcttactccttggttcatattttttattgtattttctaaggctgaaattgtcaggtagacgatcaaaggttatttgtaagtcctttgggactgactcttttctcaatgaaatactgttaggatttttagttagattgctgtagttcagtacacttcttttgcttataaaaaaggtcaggtaatatttattttcagctatgcctaattaccattcatatcattttaaggaagcaggcaagacagctggttgggatggcaaagatttgaggtaggggagtttgaagagagtggtaaaggtttgttgtgtcagcggtagaattagggacagaaagctaattaggagtatactaattgttgcctaagttgtcagtgactcagctgagcttagtcagcatttataaggcctctaacaggctgtattactctttttcaaagtgctcagcagctgggcatagggctgggaaagaaagataattgggttaatttaggtatttgaagggcagatgtggcagaaggctattgaaatttgagatgttggaggttctgatcactaactttgggctggttgggagggatagaatagaaagtatggagttgatcaatttggagaaaaatggggagggagaagggattggagattttagtgaagtataaaactaggtagagtagaagtagtaattaagagagctggaggaacagaaaatgtaacagaaaatacaagtatcaccttggaaatctcatcgtcctggaagtcttctttgacatctccactcagtttcctttctgtgtgctgtggtaacttataatactcttttaagtcctcattttactatgttacagtgatctttttatttttctctcttcctcaccataagctccctgattatggggattgttttaaatttcatgttttacagtgcctggtacgtaagtatgcctggtaggtgttgaatttagtagaatgcataggaagttgtgatcttgatgggttagtatagcgtaggagggcagtctctgtgggagtggctgaagtgatgagtgagttgtatacttgaagtgttttcactaatttagagcataatttttttgtatgtatcttagtttctgtgaccagctattacagtggtcctcaaccattttggcagcagggaccagtttcgtggaaggcattttttccacagacctgggttggtggggtggggacatggggcgtatggttttgggatgcaactgttacacctcacatcatcaggcattagattctcataaggagcgcagaacttagatccttcgcgtgtgcagttcactatagggtcggagaatctaatgctgctactgatctgacacgaggtagagctgaggtggtagtgttcgctcttgctgtgcagcctggttcccaacaggccacgaactggaactgggggttggggacccctgagctattataaatccgtctgaaaatgtaaagacttcattcatttagacactactgggatatcttaaatttcctgattagaacctggcatttagctgacaaaaagagcttatccttaaaattttttgttgttttcatgtgttttataagcttcctttaaaaggcatagtaatatgattatgaccacatcttagcagccagaaattatttttagaaattattatttgctttgaagttagttttcatccccctatttttccctctcatttctactctcaacatttagtctaaagcagtgttactcagcaagtttgtgactattattggtcttctgtgagaaagcagcttgagccaaaatgtaaaccaattccctgcttcctttgttgaaatagttttcttgtgataaaaggagaaattaaatggtgtgtattacaaattacctaatgtaattgatttacattctggtgcaaattccttgtattttattgtgtacttgaaacagtttttagactagcacctgttgggcagaccacatttaatctagaagattattatatacaaatgttttttgtttattcattcacaattaccaagtgggtgcctactgtgtactatgcaccattctaggctctggagatatagcagtgaataaaacaaacacaaaatccttaatctcagggctacattctaattgtattagaaatatcaattttatttctcatttctcagaaatacttttgtttttgtagtaaactgtattcttgcagtttatagttttgtgtataaaaactttagacttaattgtatgtatctttacatatagtggcaatactactttatatttttggctctagtaattttttttcctgtgactaataaaacctttgaaaacagtaattgcttatttgagtcacttcccaattttacttgaaattagcttttctgaagcaaagatctttttatttaaaaggagatgtaaaaggaattaattttgaataaaagagaacattgacaacatgaactgattatgcagtggatggaattgtatgttaagcaatcattgtttggttgcctttcttatattctgacagatgacctgtttgtcagacttcagagtattttagagactatattgaaataatataattttaatgatgaaatataaagagcagcaaattgatgaaaaccagtgaaacaacctatgacttaaaaaaatgaatcttccagtgcaatggttcccaaaccttagtgtgcattagaatcacctgagagccttgctgaaccattaaactgctgggtctcacctccagcctttctgattgaataaatcaagggtgaactcagcaatttgcctttcaaataaattcccaggtgatgttgatgttggtgatccagagaccatacttggaaaactagtgcttttatataatgtcatcttgtagtgccccgatttatcaataagtagctaatttaatcatagccgtagcagatggtgacttaaagaaaactcagcaggtaaactgaaagccaagaaagaacccacatttttcttaatccttattttagtggactcattaaatggaagattgtgggacaaaatatagagaattattgtgattccataattgtgactttaaatatgtagaagtagactgaaatactagcgatattcttttttccccctctagtgtagttgtccctagaagaactaaattgaaatttaaataccccatttgtattataggcagtaacatttataatcaggatcccactgatttacgtaatgacagaatttaatgataccagtggaaagattataaacctctttccactcataaattcatttattcaacatttactaagtacatgtggtgtgccatgaactgtgtatacatttgtggaaataaataattataaattgtgataaggactctgaaggaaaatgtacaggatactatgagatagtgtaatgggggaactaaagcctctcaaagagagttcatttaagctgaaacatgaaggatcgataggaattttggttacacagagttgtgggaagaggaaatatcacttccatcactaaataggtaatgtgcactaacatcttcctatatattatttcatttaatgccttgttagttgaatgatattattgccaattttttttttttttttttgagttggagttttactttgtcacccaggctggagtgcagtggtgggatcttggctcactgcaacctccacctcccggattcaagtgattctcctgcctcagtctcctgagtagctgggactacaggcatgcgccaccatacctggataacttttttttttttgtatttttagtagagacggggtttcactgtgttggtcagtctggtctggaactctagacctcaagtgagccttctacctcggcctcccaaagtgctgggattacaggcgtgagccaccgtgcctggctattgccaaattttagattaagaaaatgaggagacgataaaactaatggtagagaatttttttttagaatttagaatttctttaatagaaattaaatagctttccagagtcatccagctattcagtggtagaactgggattagatttggtctttctgactccagagtcagacttttaactgctatgttatattagatttaaacttattttcttaattattaaataatgtaagtatgccccttttttctcatttctatggaaatgagaaaggtgctgcttttaacgtaaaaactataagctagacataagcaggccatttagagggatacatacacatatccacatatccacacatgtgtacacatgcatacatacctatttatataactttaaactttctctgattgtaaaagtaatgcatttgtttgagattttggaatctctagaaccaaggagggaaataattttttcattcacaggtaaccatactgacattctgtttcattatttcagtaggcatgtagtattttttaaaaatagtaattacaatgtgaatacagaattattctctgataaatagacaaacagtgttttaatgaaatatacgtcttttttttttaaaaaaaagaattgtgaagttcttttttggatgtagaaaaataaagtatttggatttcactcttctatttaaagggaataatctcacaggattatgtttcttttatttaaaatttttttctctgtcatgtgcatattcccttgcttttgcagacagaccccaagaatgctggggaatttaaaaatatatggaatgtaagccttgctgcatttatgtttattaaccagtttaaaaaatatattaaaggtcagattttgtttttctcaaacttaacatcttgcctataatgatacatggatattccttttgggttcattatgtgccatagtgatttatgttgaggtatttcttttgtgtacatctaccaccaaaagattttaaatacaattgcagaactttacatttgtaacttgagaaagaaggaaatacatcttaaaatcagaacactgttccctaacagtcatatatatatcagtgaaatcgaattcattttaaagaaatttaattattcactgtagtttaatttactatatctcttaattctaaggtgttgaatataaattaaatttagatgttagccagatatcccattatttcacttatcttaatatgatacatgtaaataattctttagtcttagcttctttctttgatagtaaactcacacatatttgtggggtatttttatttaaaatgtgttcaatttttaattatataaagtaccacctctcttttcagccatgtaagttatttttaaggcattttcttttcttatatagtatttctttagctgttaccacgtccctttgctaagtcctcctactttttgtttaggcacttgtttatttgtccatccacttccacctaatgtttcattaattcatttaagaaatgtttattgaggcccggcgcgatggctcacgcctataatcctagcactttggggggccaaggtgggcgaatcacctgaggtcaagtttgagaccagcctgaccaacatggtgaaactgggtctctactaaaaaaatataaaaattagccaggcatggtggcctgcacctgtaatcccagctagtcaggcagaggcaagagaattgcttgaacccaggaggtggaggttgcagtgagccgagatcgcaccactgcactttggcctgggcaatagagtgagaccctatctcaagaaaaaaaaaaaaaaagaaatgtttattgaattcctattatatgccaggcatttggctagatgatgtgaaaagaaagtaagagtgggagagagggaattcttgtgtatctgtgctaccaagagagtgtgtagtttagtgtactgtattgtatctctgtgcttaatgaagttgcctgtggggctgctcaggagggcatgcgaggttctagctaccctctcacccttcttcgtttcaaccctgtagactcctttaaaaatctattttatttattgggctttctcatagcatttcctatgaacaatggattttgcaatttaaaaacttcagtatcacctgtctagtagaattatatatatttacatatatacataagtagagtgagaatcttacacacatagaaactgagagaatgacaggtggtagatgcaggtaagtatgtgaaaagagttacagatatgctactataggaatatggaggtggatcagagagttttcaatttggaggatgaaagccagtgaaaatagtgtcgtttgagatttttcttcaaggataggcaatatttagccctgtagagatttgtaggtagggtgacagtgaggataggtagggaatattgcaagtacgggagacagcatgatcaaagacacagaggcagggatgaggcatttggagcaaatagcttactgtgtctagagagaaactgggtcatagaaaatacagataaaacatgattagtatcaaaatgtggcaagctttggcagactgaggagttaagtctttttcaaagacaattggaaacctttgaaaaatgtttgaaagataaaggtacggtgtgcattgatactcattaagaagaattgataatgcatcatgtaaaatgagttggctgtggaaagacctattgtagtagtccatgtaagagggaatgggaatgaagaatagcaagcaagtgtaagtgatattgcataggttagattgttaggtcttggggatttatgagattagagaattagttaccaaaaatgattccaaggtttctatcttagaggactagcaagctgatcgtgccattaagctgcaggtttgagcgttggtttatcatttgtatcctggttgaggagtctatcataattatttataatactaaaggattaaaaaatggaaattgagatgaagcctgaaaggaatagagatacaaaattaatctagaaggtaaaagtctgcagagatgcatataataaagtccctctggttgctgagatggggcaaaagtt

SEQ ID NO: 671 - DNA, 14521 bp, Homo sapiens
  source 1..14521: mol_type = other DNA
tgggctggggccgcggtggcggcagccgcggcggcgggcggcggttgctcgtgcgcggcggcggcggcgggtcccgcgggcggcggggcgctgacggccgggggcgcggcggctgcggcgggccgggcggcgggcggcgagcgggggaagatggcggagctggggaagaagtactgcgtgtactgcctggccgaggtgagcccgctgcgcttccgctgcaccgagtgccaggacatcgagctgtgccccgagtgcttctcggccggcgccgagatcggccaccaccgccgctaccacggctaccagctggtggacggcgggcgcttcacgctctgggggcccgaggccgagggcggctggaccagtcgcgaggagcagctgctgctggacgccatcgagcagttcggcttcggaaactgggtgagcggcgcgacgggggccgggtcccggctagggcactggaaggcccgcgcctctcctgtaatcgggcgcgcaggcagcgctggacctgctcgctcgctccgcaccccagaaggccccggaggtggggagggcgacgctgccggtttatagtcgggcacctgtcggaacctatgctctgagaggctgtgacgcgcccaaggtcacacagccgagacggggccgagtggggctttgaacgctggcttctgacagcagagccatttccctcaccttcagggacgccttcacaggcgtttgcggagtgcagacgttgggcaagactcggtgccttacctgagttcgtggagacaggcaggcccacagactcgacagaaagcggtgggagcaccagggaaggagagcggtgggcgccctgcggcttgtctcggggtctctggggcggccccgtttgctttctgtcactgtatgcatgtgccctgtgtggtccgcagtgcacagagtcttttgtgggtagcgtgcctggtttatgcttgggtccccacaacccacgaccttgtgcgaatggtcagtaaagaatgaacaaagaggcctggcctgggaggcctggggcttgggttttgctctctttacctttgaggtttctgtagagacagccctgtgtggggagcggtgagagctggactggatccacttacgctagcaacatcgtgtgctaggttctgtccttgagagaggaacatggttctctctgggcggtctctcagctctccttccactctggaagcttgcatccgtattagaaaggagaaaatctctagccgtattcccgctcataaccaccaaagacatgtggccatccccgggcaccctgaggaggaggggagtgagacacccccagcgcccttagctttccagagtcttcccctgctacaccaggtgcctgcttctcggaacagcatccatctcgctgccacctctccagcagtcctgcctgggctgctttgattgccttttgctttcctttcctgagtgagtctcagggccgcctcacatactcattctgaagccctggaatgttgattctcctcccaactccttagagaagatgctcctttacaaacccttacctaatggccaccagcactgggatctccatttttcagaaactccgtcccaccttgtccttccatgctgtttgtggatatgcactgagcatgtgttctgtgcggattctacagtggcggagaactctgaaggaaagagaaggctttatccctgcattcagggagcttaaagtgtggtactgacttggtcctaggcccagagctcttccctagcaccagccctccatgtccagccgcctccctggcctacctgcctctcttagttccttgttccactaagttcctgatccaatttatcagctgtctcctcacagtacatgcagaacaaaccacttcttacagccgtagtcccggctgatgtttacgtttacttcttgccttgaccactttgggagcctccttgttcgttattccccctccaccccattcccctattccacacaccataaccggagcgagctttggaagcacaaagcgcctcacaccggcctcagtggcttttacttcaattaaggcagctttagaagtgttgagcaatgagatctcatctgttacctcccttgatcgttttatatttcttctacctagagtgctctccctgtaaatcatggcccaggattgagctttccacttaaatatcagtgcctcagagggcccttcccttcaccatcccagcacttacctctacgttagctgctaaggaggcgcagagccttggtggcatatctgtgcgtatctcaggacattttcccgacagcccttggcagttggctttggacggaccagtttgacttcagagcctgtactcttaacttcactgtctgcactgccttccctgcggcactgtggaaaatacacagaacacaagacctggggaacaaaaacatctatgtggttttggaagaaaccaggctagaagtggagaggcctcttctaaaacaatactttccgaacgaatgtgcacacagagcacctggggagctggtgaaaatgcagattctgactcagctggtagaggaggcagagccaggacaggaagagaatggggctgggacttggtgcacagcgagcctggccaggctgcggtcagggcgttctcccgttgcaccagcgcgaggttacggtgaggcctgagagcctgcattgcaaccaggactcagggggtgcactggcccgtgaccacccacccccccggagtggtgaggcaccagtatttggtcgtgctgccatctccctggcagaacctcgttgcgttatcccccgggactttatttttcttcctctgaggctgttctgcagctctgagatgggtggtgctcttctgagcatgtatccagctatgtgcacagagctggcgtgtcccactttggcatatttagcctctgcccgctctgggccaggctcttcccatatgtgtcctgtgggatcttcctagcaaccctcgggggtgggttcttattcttacagttgaagaacagcagctgtaagaaactaagcgccttgtcagggattccatggcattcatgtgatagagccaggaatgaacgcaggcctatgtgattccaaagcctgggccctaacccattctgggtgagagcattaagcaatgtgggtcagaggctgggaggccatcggtgccaccgcaggagtggcagaagggcttgacctgattcactggagattagtgtggaggcagggcctggactcatgggctgtgactgtgagtgtggaaggagatggtgtgggggctggcgacagtgatgtgacgaaagatgagacctgttgagttctactttcagatggcaaatggtgacacctggcctgggggttgtacaactacatgtgggattcatgggagagggtggattgtggccaaatctggcagctttgtggtcacattttgtaccagggctgggggatggggcctgaaggggacgggatgtagctgagcagggttaacagtgacacctgggggcttagggacaacccgtgtgctggtgtgtatgtttgatagcgaggggcagagagaacaggttaaaggaccttggctacagtgggtaagagttggcaagcagtggcctagagtcagattagcggggtctggcgtctctagaaggccggtttgtgatgggttctgcgcaggattccaagagttagaggatgcaggccctgctggagcacaggaacacagacgcaaacacaggtgacagctgagggcaagtcgcagtggtggcagaggagccggagctgttgattggttgccaaagaaattgggctgacactgaggagctttaggagggccagtgctcctctgcaggtggtggtcaggagggctttggcggggaagtggggttcaagctggcccttgtggttttgaatcaaatgagcatgtgaagttctctgtgaaccatggaaggccttgtgcacacacgtcaacactcaggctccttcttggagccaggtggggtgtcctgagtagagctgcaccctttgagatgatggtggacacccaggaggtggcagaaggccagacacatcgatggtcactgccttgtgcgtgcattcattctctcgctcattcattcagttagcacagcctcggggcctggtgtgcgccagcccctgtggtgagaacaggctaggaggaagacagctgcctcacctggcaggtgccgtgtgggcaagtgggcctcaggatgtcctgcggagggaaggacacaagatggctgtgcaggtagaggagagtgtggaggaaggaagggttttgtgttttaagagtctggtgtattcagggccaggcaaaagccagcttggggtgagggaggaagctggtgaaaagccctgggtgctgggtacaagagtgttgctggctcaggctctgtgatcacgcagtgtctgctcgccagtgccaggccctgagcaggtgctttgacacgcgcccctctcaccatctccccgtcccctaatccctgagacaggtgctccccacttttacaaacgaggaaacaactgtgggtgatgtgggaacgtggaatttcaacccaaggcttctgactccatgcctagaaccatccgtttcattgttcaccagccatgccgcaggatcccctagaattcccagggatcccctgagatctgctggattgtcacctctgaggccgaggtctggaaatttggatggatggaaagaaccccagggagctgtgaggcatggttgggaaccatgggaagtggggacttaccttccccgccggggcaggagcctccactgtgcgggcttccagggatgaccattaaggatggcgggagggggagggagagcccggatgggagagtggctgggaggggcagggcacgcagaggtggtctccaactccagcccacagtgggacacccaggatgcctggtttacctgagtcacccccacctcccaagctgctgagtcaggggtggggcttagaatctgcatttctaacaacctcctaggtgctgctgatgcggccgccgtgggaccccactttaagaaccactggggtagagtggtaagacatgtcactttataaaacttcaaaattatttaaaaatatattgatttttattgtggtacaatacgtgtaacataaaatttaccattttaaccgtttttaagtgtctggaagcattaagtccactcccagtgttgtacagccatcaccaccagccacctccagaattttgtcatcttggcagactgaaactctgtccccattcaacactcactccccctcccccttccccagtccctggcacccccattctacttcccgtctggcgctagggacctcaaatgcgtgggtcctgcaggatttgtccttttctgactggcgtatttcactttgcctcatgtcgtcagggatcatccgtgttgtggcatgcgtcagcacggccttcctttcatggctgaacaatcccttgtcatctgtgtggcataatgtgtttatctacatagctgtgacggacattcggttgcctccacctcttggcgaatgtgaacaaggccgctatgaagatggtgttgagggatctcgtcaagtaaataaaagtggaattgctaggttaggttctgtgtgtaattttttttttttaagggtttcgctctatcgcccaggctggagtgcagtggcacaatcatggctcactgcagcctccacctcctgggctcaagcgatcctcctacctcagcctctcaagtagctgggactacaggcatgtaccaccacacccgcctaatttttaaattatttgtagagacggggtcttgccatgttgttcaggctggtcatgaacttctgggctcaagtgatcctcccgcctcagcccccgaaagtgctggggttaggctaagcctggccttgtgtgtgattttgaggaaccgccctgctgttttccacagtgaggaatgccactttcaaaatctctgtcacagttagccttatctgacctgaaggtgtcagtcaccttgagggccaatgacaactctaagtcactgaggtctctgagttgagagagacctagaactgaggcttgcagggctgcccactggaacaggctgggggcagtggccagggacagtggggtctccgaaaggtctgacacctggaagcagtggctgcaaagccagtaagtccccagcctctggcatcagagggatgcttgtgctgagagttgagctgttagagcagggaggagggaaggggaagatacagggggtgacccggtgtcctcaagttgtctctttaaaggtgacagacaaggctgaaagagggaagagccaggggccaccgcatggccgtgactgagttggtgtgccagccccgagggctgttggcatcccacgcctacctttgcccggccgctctgtcctgccgctagctgcaggtggccctagttgttggcccagtgtctgaggctgagctgagactggaggtgctgaagtgactttgctgtggaatgtgatgaggacagcctagtcagcctggagcccatgcggcatggaggtgcgacttggagctcctaagaggggctggtggcctgggtggcaggtggggccctcccatgtctgcacgcttctgcggagtggccaggcaggtgacatgtcagggctctctgacctgtgcagatgggaaatgcacgcgtgggctcggcttggagccctcccgcgctgccacctgtggcctgtggttggtgtgtttcttaccttgctctgcccctggggccagtggttccctcctgtcctttaggacatagtccagtcccctgtcccatggattccattgcctcctggccctgcaggggccaccagtgtgcccagctgctccttgagagctctgcccgctgaatgcccttccctggtgggacccctcccttacaccgagctccctggggaactgagccttcctggctttttgagacttcttcatttggagaaaaaggagctggtgctgggcctccctttggagacgacgcctggccccaaaccaccgggagaagcccagcttgtggccgggatgagctgtcctctgcctcgtccttcacagaccagatgggggtgaggaaaggacagcagtggggccaccgagggacagcagagccgcagggctttgcggcatcgcccgggacaggagatgctccggagcctgcagggctggcagcctcgggcacgacgccgggcgcaaaggcctgcgttcactgcacatcacgggggcagggtcagcctgagctgtggcacgtctccaacgtgcttgttccagaaagaagagcagaagcccagcgtccggcttcgctctgcctctcatcacaacatcgggaagcggctaggacccccttctgctgtgcgctgcatcgtgggatggtggggggcgcgtggcgacgggtgtatgctcccagccacattacctggtgtggaagtggctcagcattcactggtcttgtgcccttggcaggggctcaccctcaggtttactttccttatctgaaaaccgtaggcggtaacaacactcctcctccgtgggaagcgcacggggtgagtgggatgatgggcgtagacgtgcttatctgctgttgttttaaattttattggtaaaacctgcaaaaggagggctggcaggtcaggaaacaagctgagaggaccacaactgatggaaagagttgagcccggccctgggggtcactgaaggcttcctggacccggcgacctggtcttggataaaccttccctgtgggagggaagctaacagcatccagcgctggggaaagctgccgtgaccgagcacacgctgtggccgcacctgcctcctcactgccctaccaggtggaccccagcccctagcctgggcacgaggagcaaagggcacctccagcagggtgggcgctgccaggcctccaatgtctggctgggtgctgggaagctcctgacaggtgcgaggcaggagccagggacagctgtagaccccacgaggcacactaaggagtccagctgatgccgatgggtttgtgctccagacttccagatttttgaaggattttggaggctgacctagtgttgctaacttgaaaatctgccaagtaagtaagtttttttttttttttggttttgtttttgagacagagtctcgctctttcgcccaggctggactgcagtggcactatctcagctcactgcaagctccacctcccgggttcacgccattctcctgcctcagcctcccgagtagctgggactacaggcgcccgccaccacgcctggctaattttttgtatttttagtagagacggggtttcaccatgttagccaggatggtctcgatctcctgacctcgtgatccgcctgcctcggcctcccaaagtgttgggattacaggcgtgagccaccgtgcccagccgtaagtaagatattttaaaaacatctctgcaagtgagaagtctgcaggcctcttcctgctagtctcactggcttgagaccagggccaatgccaggggggccccactgactcaccttgtgaccttgggtaagcaagccggcaccacagagcctctgggacgagggggacacccagcctcacgtgcctgggaacctggtgcagcagccatcggagcctcctggaaactggcctcttgagtcggctgtgtatgcagcagcccctccgcagccttggacagaagctggtgtcgagggctggagaagctgcacaggccaaggccggctctgcccctgccgcccgcctgcgcggtggaagcacagacgtgaggcgttgggatggaaattcccatcttccaggcaccccaggatgttcacccagggtttccacccaacatgaccctttccttcctaaagggcgggcgttagggactgttgttccgttaggtagacacggcctgtagttatctgtttcagaggccattgcggttcctggggctccctggccccaaggttgtcggggaagagcatgagttcctggtggcgtctgccccggctgctccatgagaggggacttcgcgctcgctgtgtggggcccactctggccctgaaggcttttcttacccatgtgaggtgtgtggggctgcacgtgtctcctcttctggcaatgacagacccgaggctcagagatgggcagtgaccagcctgggtcacacagagtggcagtagctgccggcaatagttgtgacttggtgttgtgttttgttttaggccaaatgcttcctggggaaataaaatgaacagatttgctacaaacggtgtttttaaaagaagcagtcattgtccccaaagaccagaatcaacatttagctctaatatttttactttatgattctcaaagaggcccacagttgagttttggcactgccttctgtagtcagagtcctggagattcctgggccccaggtggcggggggaagggtccagcacctcggctccaggcatgtgtgccagaggaagccccagctgtgggatcccatccgttcctggagcccagaacacttctctcccagacgccagctcatagtcatcagcctggatggggtggcggtccctctggtttcagctgggcctctggcagtgctgcaggcagcgctgcagtgctggttccacacccaggcgggcagaggcaggtgggggctgggtggctgagaggcggtggccagggaatgagtgcgcactttgggcagttactttctgaagtggctttagcggttgactttgaggaagaggcctctcggcagaaggaaaagattgagggagttatacagtttcctcccattaaaccttgtatttatgggttaccctcttgtaggaatgatgaatgctttcagccagtggcagactcccagccagctgcttaaccgtggaaggtgctaaaaatgaaggcctgctcccttgaagagccacaggcccatcttctgcagtcactgcctaggaaagggccacgccagcccccccggcgcatgaaggccaggatgggtgtgcggccaggacaagcgtcacagaggtgtcctggcccttgcttttccagcgggtggcaacatggtagaactgggtcccctcctgcagtgccgtggacttggcctggtctcacaccctggcacaagcccgttttctagtctgaatgaggcgagttcaggcattccttggcctgccctgctgtctcctgggacattcagacagcccctgagtgcagggtttatggcagtaccaggtgggctcctctggtcgcaggtggggaatgagaacaaagtccaaacctcagccaggggttctggcctcagctctgccaccagctcaccccaagaccttgtgccagcttgtgcctctctgggtcttcactttctcatgtacagaatcagcatgtgttgttgcttcaacattgtcatctctcccctgagcccagctcataagacagtgtgtgactgaatgcctttggggagggtgggtaacggtgctgtaggaagtactctaggtcagcctttgtaaaaacgtgaagagaatctgtgcggaacccaaatctggcaccctgatggtggaactaacttctgccctttgtcatcgtaggaagatatggctgcccacgttggtgcttcccggactccccaagaggtgatggagcattacgtgagcatgtacatccacgggaacctggggaaggcctgcatccccgacaccatccccaaccgcgtgacagaccacacctgtcccagcggaggccccctctcacccagcctcaccaccccgctgcccccgctggacatctctgtggctgagcagcagcagctgggctacatgccgctgcgggatgattacgagatcgagtatgaccaggatgccgagacgctcatcagcgggctctctgtcaactatgatgacgacgacgtggagatcgagctgaagcgcgcccacgtggacatgtacgtgcggaagctgaaagagagacagcggcggaagaacatcgcccgtgactacaatctggtgccagccttcctggggaaggacaagaaggagaaggaaaaggcgctgaagcgcaagatcaccaaggaggagaaggagctgcgcctgaagctgaggccgctgtaccagttcatgtcatgcaaggagtttgatgacctttttgaaaacatgcacaaagaaaaaatgctccgggccaagatccgagaactgcagcggtaccggcgaaacgggatcaccaagatggaagagtcggcagagtacgaggcagcgcggcataaacgggagaagaggaaggagaacaaaaacctagccggctccaaacggggaaaggaggacggcaaagacagcgagttcgccgccattgagaaccttccaggcttcgagctcctgtcagatcgcgagaaggtgctctgcagctctttaaacttgagtccagcccgctacgtgactgtgaagactattataattaaagaccacctccagaagcggcaaggaatcccctccaaaagccgccttcctagctacctggacaaagtcctaaagaaaaggattttgaatttcctcacagaaagcggctggatctccagggacgcgtcttgaagctgagacgctttgaaagccagggtgatgctcagacagtgtgccagccaaaatgacttgggggaggggagccgcttccccactgttgctcttttttaaacaaattgagttcctttttttaagatagaaattcttttcatggtcctctgaaagaagcaatagtaacaatcttatattggatcatgggggaagcaaatgtgtgtattttaagtgagttcctgcgagtcatacactgcgatgatgctccgcctttacccgttcagttgggagcttattgtgagattggatcatttccttttgagtgttcttctctttggtacaaaagctattgtgggtgacaggagcagtgttttcctgctggacccgcaagccaccagctatttcctggtgacacaagctcttctcaggcggggctgcctgcaggctcccgttttctgagcccacgctgcccacagctgaccccagcgcagccccgggcacgcggcactttacatgggggcagcttgggcccagactcctccgctgtgtagcagatgaggaaaatcaggccagaggacaacaggctggcgttttgttgggaactgaagaggaatctgttgaacacagcgaccagatgaccttccatttcaccggcggcagcagtttcagcgtgcagttcccaaaccccaaagctgaccctgcgccccatttgaatacggccagagcctgctggttcactttgggtagagccgtgcctcttgggcaggctcccatagtgaccacgtccccacgaatgggaaagcacgttagtgggagggacgtaggacacgtgtggaccgccaggccctctcagtccattttccggggctgctcggtgctgctgttaagacgtgagtgcatttcacttggaagaacccattgtacaaagttcaaggctaagagttctgaattctggcgtcagcttcctcaggattttcttcagttgcaagtacctttccactgaaaatatgagcatgcccgcctggctagtaggcatctgtaagagtgtcgccaggcccgcgccagctgaggcctcagactagccaggcaagagccgtctgaccagttggctggcggtggttctggtggagcacgagggagcccgggtggtgccctgagcctcgagctgctctctgtcactgtcttgaatcagactcagaaatggcttcttcccagccctgcctacaagtttttctctggggtcctctttcaaggatgtccacggtaccttcctcctgaaacttgaggaagtcttttgtcttccagctgctcagggttctctggtccaagaccctgctttaaagagagtctttggcgtgctcagactccagcgctccgttcttcaaggaggttgacttgcctctcgggccccgtaggtaccaagagactgtttacctcccagaatgtttgggcttgaagttacattaaagtgaagttatttgaaagaaagaaaacctcatcatttctaaggatgacttaattactgtgccttttcctttctttttacacatcctactgtcccttagggtaaaattttcagcattaaataaaacatttcaaatatattgtatatggctttagttgtaaactatactgcatgctgacagagaagcgctcttttagctaagcccagaacttctcttttgacaataaagtactgagcagtggtatcatgagggccacctccacattgtcccctgcagaataaatgcggatgacagaaagcttatgctgtctaccactgaacagtgatggagatggtgctaagtttttacagttgtcttagccccagtggttctcaaggtggggctcctggcccagcagcagcaacttgtttgttagaatgcagacgcgcaggccccacctggcctcctgaatcaaaatggtgtgcggcagggtgcagcgagctgttttcacgaggcctccaggtgactggatgtaagcttgcttgagaactatgggttttagctattctggtgtctccctgattttctacagcgccaggatcctagtttggtgaggttttaaatttaatcttatttttatataaaatgattgccagacgtactatattaagcttgaagaagcagaagatccctgttaatgtgtatggcccaggccaagagctgtcaaatgaaaaactttgtgctgaagcaggtttttagtatgtatatctttttgatggtatgaagaatttatttaggcttgactgttttaaaacaccataatgaatgtataattaatttatgttaaagtattaaccctttgtcacaaaggaatggtaatgtgattggctgcctgttagcccatcgactattcccgtcacggtagtccttacctctgtcggcagctcagagcctccacatttttatatttaattctcatgataaattagccaccataatcccatggaattaggtcttgttaaaatctagtccgggcgcagtggctcacgcctgtaatcccagcactttgggaggccaaggcgggctgatcacgaggtcaagagatcgagaccatcctggccaacatggtgaaaccctgtctctactaaaaatacaaaaattagctgggtgtggtggtgcatgcctgtagtcccagctacttgggaggctgaggtaggagaattgcttgaacctgggaggcggaggttgcggtgagctgagatcacgccactacactccagcctggtgacagagcaagactccatctcaaaaaaaatctaagcaaactatctttgagtcaaaaaaagttggataactcatctatatttgaaataatgctgtctgaatggccaacatcccaagaatgtattaaaaacagcaaccctgcctaccgttttgatgacctttttccatattaaacaagttgagaacaa

SEQ ID NO: 672 - DNA, 32744 bp, Homo sapiens; identical to SEQ ID NO: 639
  source 1..32744: mol_type = other DNA

SEQ ID NO: 673 - DNA, 32744 bp, Homo sapiens
  source 1..32744: mol_type = other DNA
cgcaaagcccggaggcgcgcgcgaccggcggctctttggcgcggattagggggtctcggcgaggtgaggcgccaggcagcgctgggcgggcgggcgggtggcggagcgcgagcccctctagcgggactagggagaagcgggggccacgaggtgcggcgggggaggagtcgcgggctgcgggccccggcggcgggcttgacgcggcaggctggcgggccggcgggcgggcagcggcgggcctcgccgctctgtgggggagggcggtgtggggccgggcctgaccccgggggcccgccccgcgtctgggcggtgccccagtgccccggcctcgccatttcccgctcagccctggagcgcgtagctctaccaagaatggccactgtgccagatgcccctgaccagcgttgcccatttgaatttcctagcaggccccccaaagtaggtatttcagtaccctgttagagctgaggcgcaggtaaaatgactggcccaggccggtcccaccccgtaaggatttgaacgttggctccacaactcgggagcctgcgcctttcctcctcccaacgtggactcctgcccggcgaagtgcctcacttccttctcccggtaactgattcgaatttggtgattgttagtttggagctagcgccagtgtttccacggaagttggtgtcagaatgtggtctcttgtgaaagggggagaaagaagattctgcagactgcaatattgtgcttttttgcctttttttttttttctcctaggctgtactgcagtgcagtggcacgatcgcggctcactgcaatctccgcctcccaggctcaagcgattctcgtgcctgaggcgtgggccaccacgcccagctaatatttgtattttcagcagaggtggggtttcaccatgttggccaggctggtctcgaactcctgacctcaagtgatccttccgcctcggcctcccaaagtgctgggattacaggcgtgagccaccacgcccggccctactatttttttattttttgagatggcgtttctttcgcccaggctggagtgcaatggcgccatctcaacacactgcaacttctgcctcccaggttcaagcgattctcctgcctcagcctcccgagtacctgggattacaggcgcccgccaccacacctggctattttttgtatttttagtagagatggggtttcgctgtgttggccaggttgatctcgaactcctgacctcaggttatctgcccacctgggactcccaaagtgctgagattacaggcgtgagccaccgcacccggcctcctactgtgctttttcgagtgttgatcagtccctattgactgtgcatcctttactggacgtctgtttttgtttttgttttttgagagggagtttcacacttgttgctcaggccagagtgcaacagcgcgttctcagcccaccgcaacctccacctcccgggttcaagcagttctcttgcctcagcctcccaagtagctggattacaggcatacgccaccacgcccagctaattttgtatttttagtagagacagggtttctacatgttggtcaggctgatctcgaactgccgacttcaggtgatctgcctgcctcggcctgctaaagtgctgggattacaggcgtgagccactgcgtccagccttgacatctgtatttgaaatgacacagctatcccttgtaagacactgcgcaagtaacatactctttcagagcttgcttgcttttgaaaaagcagcttgccccaaaagtgtgggagtgaggattcaaagaatccccacaccttggtacccacgggtacctagcaaattgaaaaagttcagtaaatttggctgttatttgattgctgcgttcgtaatacacccttgctagactcatttttcttcagagctcaacttttcctgagaggacagcaaagggagacctaccccaccccaaaaagggaaagttctttgatggcagcgttagcagaaatgttgcccacacttagtgatgaattattctccaagctaaaaattaccagggtgaaaaaaatcacttcagaaaagctaaagataaattaaccttttgtagaattaacatttattagtccactactatgtgtttattgtattcctcctgtatgcttggcattttaaaagcatacagataggtatccgatatagtctctgctttcacttatttattatttatttttgagacaggatcttgcactgttgcccaggctggagtgcagtggcacaatctcggctcactgcaacctccacctgcctggttcaagcaactctcatgcctcagcctcccgagtagctgggattataggcgcccgccaccacgccaagcaaatttttttgtatttttggtagagacggggttctcactatgttgcccaggctggtctgaaactcctgacctctggagattcatctgcctcagtctcccaaagtgctggagttacagacatgagctaccacacccagcctgctttcacttaatttagaagtgggggaaaatagacattcagaagtaatactcacaaagtagaatgtgaaaaatgccagataaaaagctgtgagtgggccgggtgcggtggctcatgcctgtaatcccagcacttggggaggctgaggtgggcagatcgcctgaggtcaggagttcgagaccagcctggccaacatggtgaaaccccgtctctactaaaaatacaaaaattagccaggcctggtggcccgcgcctgtaatcccagctaattgggaggctgaggcaggagactcgcttgaacccgggaggcggaagttgcagtgagctgagatcgtgccattgcattccagcctaggcaacgagagcgagacttagtctcaaaaaaaaaacaaaaacaaaaacaaaaagctgtgagtgtacagaagaaggattattttttgacttagtgtaaaatattattttatttctgcttcaaagaagatactttgggccaggcatggtggctcacacttgtaatcccagcactccagcacttttggaggccgaggtgggcggatcacttgaggccaagagttcgagaccagcctggccaacatggtgaaaccctgtctctcctaaaaatacaaaacaattagccaggtatggtggtggcacatgcttgtaatcccagcttctcaggaggctgaggcacaagacacaagaataaaaaatgagaaccaaatggagaatgagaatcccttgaacctgggaggcagaggttgcaatgagtactccagcctgggcaacagagccagactgtgtctccaaaaaaaaaagaaaaagagacttagtctgtcctccaagctggagtgcagtggtggctcactgcatcctcgacctcctaggcccaagcgttccacctcatcctcctgagtagctggaaccataagcatgggccactgtacccggctaacttttttttttttttttaagagatggggtctccctatgttgcccaggctggtcttgaactcctgggtcccagtaatcctcccacgtcagcctcccagagtgctgggattacaggcatgagccactgtgcctggccctgttacgtacttgttgaaagagtgaggaacaaatgtatgttgtaatagataggattttttggtttccagttacagaaactcgttcagtcttatgattaaagttgagtttattaaagtttattaaagagagagaaatgagagaagagttaaacagttgagccacctggggctagggatttcaacagccagagcacatggactgaattctttgaatgaattctagtgaataactaagctccaactgccttctgtcctttcatgtcttactcaagatccagatttctggaagaagagacctggttgctttagcttttgtcaggggtggggaatggggtattgtgattggcagccccaccagtatcacatgaaatgtgggagggtcagtttcccaaataaagatggcagctaaggagagaaatgatgctgagtagagaaagccaacagttgtttattagaaatatgtagcatttgcccctgccaccctcagtgccccatagacccagatccttcctcataaaaaagaaaaatatgtagcatttatagaggaccaggtaccatgctacattacttatatggattatgatatttgattataacatttaattctcacaactttggaaggtaggcactgttatacccactacagaggaagaaacaggttttcagaggtggaataatttttcaacattacaaagctaagatgtggcagagctgagtatgttgcatatcttctctttatcttgtccctttgaatgattttctgatccatgtgccacttttgtttgttcctagggagtcatcaagctttggtgtatgtgttggccggttctgaagtcttgaagaagctctgctgaggaagaccaaagcagcactcgttgccaattagggaatggaccgtttgggtccctttagcagtaagtacagtgggaacaagtctcaggtgacttattattattttttttttgagatggactctccctctgttgcccaggctggggtacagtggcatgatgttggctcactgcaacttctgcctcccggctttaaacggttctcctgcctcagccgcctgagtagctaggactacaggcgcgcaccaccacacacagctaattttttttatttttatttttagtagagatagggttttaccatgttggccagactggtcttgaactcccgacctcaggtgatccacccacctcggcctcccaaagtgctgggattacaggtgtgagccaccactcccggccttcaggtgactattaatagcaaactagagtggaagttgatcaaggaagaaaaataaacgatgaagttaggcaataaagccctttgactctgattctaagggaattatgagtatcaaaataaaatcaattaatacatattgattacccattgaacacatgacacaaacatatgaccctgggtcttacaagaaaatgaagcagccgggcgtggtggctcacgcctgtaatcccagcactttgggaggccgaggcaggcagatcacgagatcaggagatggagaccatcctggctaacacagtgaaatcccgtctccagtaaaaaataaaaaaaattagccaggcatggtggcaggcgcctgtagtcccagctacttgggaggctgaggcaggagaatggcatgaacccgggaggcggagcttgcagtgagctgagattgtgccactgcactccagcttgggcgacagagtgagactctgtctcaaaaaaagaaaaaaaaaaaaaaagaaaatgaggctgagatggaccaggcatattctgattaacctgtagttaaacctagaaaagccatgggatttctgtttagaccaataacatgtttcaggcaccttgataagaaatgtgtcagtggtaagataaaggaaagatcatcccacctcccccttgatgtggaacttgtttctaagagtaaaccacggtagaataatttagagaattatggggtatgtatgaagtaaattcaagtagccataactatggataaaaaaattatactggccaggtgccatggctcacgcctgtaatcccagcactttgggaggtcgaggtgggtggatcatgaggtcaggagtttgagaccagcctggccaacaaggcaaaaccccgtctctactaaaaatacaaaaattagctgggggtaatggcgagtaactataatcccagctacacgggagctgaggcaggagaatcgcttgaacctgggaggcagaggctacagtaaaccaagatcatgccactgcactccagcctgggtgacaagagcaagaatctgtctcaaaaaaaaaaaattatactgctctttttccctgattctgaatatatgagatttggcagaaatagaaattccattgttagatgtttagtagtatcctaatgagaagaatcagaaaagtactttttgggtgttgtttcctcttcaacaattcgtgttttttttgagatggagtcttgctgcattacccaggctggagtgcagtggcatgatctcggcttactgcaacctccacctcccgggttcaagcaattctccgtctcagcctcccgagtagctgggagtataggcgtctgccaccacgcccggctaatttttgtatttttagtagatacagggttttaccttgttggtcaggctggtcttgaactcctgacctcaggtgatccaccagccttggcctcccaaagtgctgggattacaagcgtgagccaccgctcccggcctgacagaacaatttcttaaaggagctctaatttactttttgatcacactcctaatataaatttaggagagaatggagtcttcagacacatctagttcaactctttcattttacatgtagagaaatctaagtggactgctctaatgctgggagtgtccaaaataaacttctttttggaaataatttcaaacttaagttgcaagaataagaatacaaacaatacccacataccttttgttaaccttttactccatctgctttgtcatttgcatgtgcactgtctgtctctgtgtgtgtgtatatatatgttttttattttttaattttttttatttttaagagatggggtctcactgtgtcacccaggctggactgcagtgacacaatcatagcccactggagccttgaattcctaggctcaagcgatgcccccaccttggcctcccagtgtgttggtattataggcataagccaccatgcctggcccaatctttactattaaggttgcaaaaagatgattccccccccaccccctgccaaatctagtgctctctccacatttactagttagcatttttagtttttattttaagttcaggggtacatgtgcagggttgttatataggtaaacttcttgtcacaggggttttgtgtacaaattattttgtcaccaagataataagcatagcactcgagaggtagtttttgggtcctctccctcctcccactgttcaccctcaagaaggccctggtttctgttcccctctttgtgtccatgtgttcttgtttttttagctcatacttgtaggtgagatcagagggtatttggttttctctttctgtgttagtttgcttaggataatgacctccagctccatccatgttgctgcaaaggatgtgatctcattacttttttatggctgcatagtattccatggtatatatgtaccgcattttctttatctgttcacttttttacttattttttattatggacacaggaattcctattttttcaaggatttacgatttattagcatacataactagctaggttcatggattattccaaatttggccactgggagtcccttcaaatgggctcctacatccttatagcgtactctcatcattttttttttctttttagcatctccgtcctttttggcataactaaatactccaagtgcatcctgtactccccccgccctggaatcagccacttctctgaggagtcctggtacttttacaagggagtcatatcagagaccgagatcttttcatctactagaatatttttgcatcttggcccttttggctgacagaactaggaaatatatgcatgttatgtgctatatacatatatgccagtatacatacacacatgcacatttacgtacacatatacttcttttgaggaaatcatgagttcacattgatacctctaattcatcatcatgggcttttttcttgtctgcattaattcctcattcacatgtctctactcagtgagaaccctggctcccaacatcaatataattccactatcccctgccctcaaccccttgtacttaccaacttcattgttttctggtttaatctgtcccttaatcctttttgcaaagaaaagaggactgttttttactctaatttttttctttttcttttctcttttttttttttgagacagagcttcgctcttgtcactcaggctagagtgcagtgccacgatctcagcttactgcagtctccacctcctggattcaggtgattgtcctgcctcagcctcctgagtagctggaattacaggtgtctgccaccacacctggctaatttttgtatacgggatttcaccatgttggccaggctggtcttgaactcctgatctcaggtgatccacccgccttggcctcccaaagtactgggattacaggcacaagccaccgtgcctggcctctaatttcttataggaaagatagcatactatatatatgtgttcttttgtacttttaaaaaaattcttcaatcagcaccaggattgtacttttttcccctcacttaatagtatctcctggaaatactgtattagttggtagaggttgtcctcattctgttttttatagttgcataatacttcattgtgtggatatgttattattcaaataattgcttatacttggacatctaagtagtattttgcaattacatctaatattatatataaccttggatgtgtgtatttttgtattattggaaatgtatattcatggtaaaaaattcctggaagtgagattgctgggtcaaaagataatgcccctctatatgagttgtactattttgtattcccaccagtgatacgtaagagtgccccggctgggcgcggtggctcaggcatgtaatcccagaactttgggaggccgaggtgggtggatcatgaggtcaggtgttcgagaccagcctgaccaccatggtgaagcctctactaaagatacaaaaaattagctgggcttggtggtacgtgcctgtaatcccagctactcaggaggctgaggcaggagaatcgcttgaacctgggatgcagaggttgcagtgagccaagattgtgccactgcactccagcctgggcgacaagagtgaaactccttctcaaaaaaaaaaaaaaaaaaagtgtctatattcccacagcctgactaattatattgtcaggcattgaaacttttgccaatctgatgggtgagaaactatatgtcagggtagttttaaattttatcttgcttatgagtgaagctgaacattttttcatatgtttaaggccattttatgtctcttttttttccccaaattgtctttgtgtctttcgcagcaggatctttggtcttttattctccctctcaattttttttttttttttaaacggagtttcactcttgtcacccaggctggagtgcaatggtgcgatctcggctcaccgtaacctctgtctcccgggttcaagcgattctcctgcctcagcctcccaagtagctgggattacaggcacatgctgccatgcccagctaatttttgtatttttagtagagatgggctttccttcgtgttggccaggctggtctcgaactcccaacctcaggtgatctgcctgcctcggcctccctctcaattttttaaagttgtttgcatactagggatttcagtgctttttttctgatatgtttacaaatattttcttaaagtatacttgcttttttactttccttatggtgtttttgccaaaaaaagttttttgttttctttttattaatgtagtcaagtttattaaccctttattgaatttgaatgatggttaaaaagcctcactcggccacacatggtggctcacgcctgtaatcccagcactttgggaggccgaggcaggcagatcacgaggtcaagagattgagaccatcatggccaacatggtgaaacgccatctctactgaaaatacaaaaattagctgggcatggtggcacacacctatagtcccaactacttgagaggctgaggcaggagaatcacttgaacctgggaggcagaagttgcagtgagccaagatcgcaccactacactccagccttccagcctgccagcctggcaacagaacgagagtccgcctcaaaaaaaaaaaagcctctctcttgtttcctgttatctcagtgaaaaattagataaaaagtctttctcttagattttaaaaaattttgaaataccttttgaaggacagttgggctctgtgtatcaaaaacctaaaaatgctcaataactgtacactcaacaattttagttctaggaaaatatatatcctgaggaacagatgtgaaatgtacatacaaaagaccgggcacaatggctcacgactgtaatcccagcactctgggaggctgaggcagacggatcacctgaggtcaggagttcgagaccagcctggccaacatggtgaaaccccgcctctaccgaaaatacaaaaattagctgggtgtgttggtgggcgtaattccagctacttgggaggctgaggcaggagagtcgcttgaacccgggaggcagaggttgcagtgagctgagatcgcgccactgcactacagcctgggcaacagagcaagactccgtctcaaaaaaaaaaaattagctgggcatggtggcatgcacctgtagtcccagatactagggaggctgaggtgggaggatcactgagtctgggagggagagtttgcaatcagccaagtttactatttggaaataaaatacataagacaatatgtctacatatgtgatttctttttttttcttgagacatagtctcgctctgttgcccatgctagagtgcagtggcatgatctcagctcactgccatctctgcctcctaggttcaagtgattctcatgccacagcctcccgagtagctaggactacaggtgtgcgtcaccaggcccagacaatttttgtatttttattggaggtggggtttcgccatcttgaccaggctggtcttgaacttctggcctcaagtggtccacctgtcttggcctcccaaagtgctgggattacaggcatgagccaccatgcctggcatacataatttcaaaaattaaaaataataatgctctaactataataaaagagataaatacaagagaagtaatctatggtaaaacaatgcaatttataataaagcaatatgtatttcaatatgtttagacataattacaatagaagacatgatttaagtactagatacttgaacccatatgttgaatcactgtgcatatacaaatgcagaatgattcaagcgtgtcatgttggtgactaagaaacaccacaagctagaataactaaacgttctgaacaaaacaaaatacattctcctctagacttatatacaattgcctgtctggaaatttcagtgcatattaaaattctcaaaaatactttgctttatatataacatggaattagcttctaggtcatatgagatttttcattcacttgaatgtctggtgggacatttgaaagttgcacaggacacacaaaaaagtcaatttttattagaatgtattgagcattgtaggatacctagaatccctgttttaggggcctgcagaatgccagtggggcactgatcattgtggaaacaaaaaggtacctcctcagatttccaaatggctccctaggggggagttgagtacaattaggttatataatataattaatacaatggaatgttatttatccattagaaagaacaaggaaggtcaatgtgtattgtcatgaaaacatgtccgcaatttgttgtcaagtgaaaaaacatgtatgatattccactttttctttttcttttttttttttgagacggagtttcgctgttgtcacccaggctggagtgcagtggcgtgatctcggctcactgcaacctctccctcctgcgttcaagtgattctcctgcctcagctcctgagtagctgggattaggcgcccaccaccacatccagctaattttttatttttagtagaggtggggtttcaccatgttggccagtctggtcttaaacccctaacctctagtgagccacccggctcagcctcccaaagtgctgggattacaggtatgagccaccgtgcctggctattttttctttttattatttttggtagaagcagggtcttgcagtattgcccagggtggtcttgacttcctaagctgaagcgatcatcctgccttttcctcccaaagtgctggggttacaggcatgacccacagagcccagcctctacttttgttgaatatatgtactatattatatagaagaaaggttggaaaaatatttttcaaaatgctaattgtggatgacatactttacagttttattttagtctggaatgttaagaacttacttttacaaagtaattgcttttttttttctttttgagagagggtcttgctttcttacccaggctggagtgcagtggcatgctcaaggcttactgcagactcgatctcagctcaagtgatcctcctacttcaggcctccgtatagctgggaccaccaagcatgcaccactgcacctgcctaattttgtggggtttttttttgtagagacatggtttcaccatgttccccaggctggtctcgaactcctgagctcaagtgatccacccaccttggtctcccagagtgctggaattacgtgcatgagccaccgtggcccgtgcagtaattgcttcttgacataaggatttaaaaaatcactttgggcctgcaatcctagcactttgggaggctacgccaggtagattgcttgaatccaggagttcaagaccagcctgggcaacatgggaaaaccccccctctactaaaagtacaaaatttagctgggtgtagtgcacatacatgtaatcccagctacttgggaggctgaggcatgagaattgcttgaacgtgggaggcagaggtttcagtgagctgagatcaagccattgcactgcagcctgggtaaccagagtgagacactgtctcaaaaaaaaaaaaagaccacttttcaggagttcgagaccagcctggccaatatggtgaaaccctgtctctactaaaaatataaaaaattagccagtcgtggtggtgtgcacttgtagtcccagctactcgggaggctgagggagaagaatcgcctgaatccaggaggtggagcttgcagtgagctgagatcgcgccactgcacttcagcctgggcgacagagcaagactccgtctcaaaaaaaaaaactactttgctcagtggctgatgccttttttaaaaataggatagttggaggaaagagagaagcaagcttatatctaacaggaagtgaggaagagggtaacttggtagaagttggcacctgtcacttaatatacaataatttttggctcagcgcagtggctcactcctgtaatcacagtactttgggaggctggggcagaaggatcacttgaggctggaagtttgagaccagcctgagcaacatagcaagatttgttcttctgcattaaaatttaaaatgggggaaatggagtagctgcgcagtttcatatattgaatttgaagctactgccaggagtacatttttttctttcatcattttcttctgtgtctttttttttttttttgagatggagtttcgctcttgtcacccaggctggagtgcaatggcacgatctcagcttactgcaacctctgcctcccgggttcaaacaattctcctgcctcagcctcctgagtagctgagattacaggtgcccaccaccacacctggctaatttttgtatttttagtggagatggggtttcgccatgctggtcaggttagtcttgaactcctgagctcaagtgatcaacccgcctcagcctccgaaagtgctgggattataggtttgagccaccgtgcctactctctctatcttcttaaaaacaaataaagagaacagtgatcttcacttggaagagggaaaggtaccttgaagaacatttcttggactttagggaggcaaatactgttacagaatgtgagaaatcctgttccaggctgaacaaattaaattccttcatctaccttcaaagcttttcttctcttagattcttgtgattgatcatagagaacaattttgctaggttgccgtgactccagaggccgaatttggggcaaccagggacacatatatctgcatttttatgagttttgagagtttggattgtactccttgtcttcatagtttggagacataccactgtcattggagtagaagatctgctgtgttatgtacttaccatgggagaaagggaggaagcttcctgggtttcaattcccactcagagccaggtgtggtggctcatgcctataattccaccactttgggaagctgaggcaggaggacttcttaagaccagtgtgggcaacacagtgagaccctgtctctacaaaaattaaaaatttagccaggcgcagtggtgcaagtctgtccctcctcttgggaggctgaggtgggaggaacacctgagcctggggagattgaagccacagtgagccatgatctcaccactgcactccagcctgggcaacagtctaagaccctgtctcaagaagactctgtctcaagaagaccctgtctcaagaaaaaaaagaaaaatccgaacccaaatataaaatagtatattccaaaatatgtatttagaagagacatgtatttagaggctagctgagtgtgatggctcatacctgtaatcccaacactttaggaagctgaggcagctcaaattcctggaaccgtttgagcccaggaattcaagaccagcctaggcaacatagtgaaactcttgtctctacagaaaataaattttaaaaaagtacccgggtgtggtggcttgtgcctgtagtccctgctagttaggaggctgaggtgggaggctcatttgagcctgggaggttgaggctgcattgaggcatgatcgtgcaaccacacttcagcctaggtgacagagtgagaccctatctcaaaaaaaaaaggagttttctcttatttgccccaactttttattatgaaaagttttaaacttaaatagaaaagtcaaaagaacagtacaatgatgatgatgtgtttttttatttttttatttttttttggagacggagtctctctctgttgcccagactggagtgcagtggcgtgatctcggatcactgcaacctccgcctcccgggttcaagcagttcttctgcctcagcctcctgtgtagctgggactacagatgcataccgccatgcttggctaatttttttgttttttttttgagacagagtcttactctgtcgcccaggctggagtgcagcggcgcgatctcggctcactgcaacctgtgccttctgggttcaagtgattcctctgcctcagcctcctgagtagctgggattacaggtgtgcaccaccacacctggctaatttttgtgtttttagtagagatggggtttcaccatcttggccaggctggtcttgaactcctcacctcatgatccacccgcctcggccccccaaagtgctgggattacaggcatgagccaccgtgcccagccaatttttttgtagttttagtagagacagggtttcactgtgttgcccaggctggtctcaaactcctaagagcaggcaatctgcctgcctcagcctcccaaagtgctgggattacaggcgtgagccaccatgcccagctgattattattattattattattattattattattatttgaggcagggtctagctctgtcgcccaggctggagtgcagtggcacaatcttggctcacggcaacctttgccttccgggttcaagtgattctgtgcctcaacttcccaagtagctgggattataggctgcgcccccatccctggctgtttgtatttttagtagagacagggtttcgccaggttggcaaggctggtctcaaacttctggcctcaggtaatgcacccaccttggcctcccaaagtgctggaattacagggtaagctaatgtggccggcctacagtgattatttatatgcttgctacctagattcagcaattgttaacattttgtcagattttctttatattgtatgtgcaggtatgtgtccattttatgctcctggaaaaataagtttgggatattatgaaacttccagttaaaaatgtgtttgtgactgggcatggtagctcatacctgtaattccagagctttgagaggccaaggcaggaacattctttgaacctaaaagttcaagaccagcctgggcaacatggtgagacatcgtctctacaaaaaattaaccaggtgtggtggcatgtgcctgtagtcctaactacttgggaggctgaggcaggaggattgcttaagcccaggagtttcaggttacagtgagctattgtcaagccactgcactccagcctgggtggcagagcaagaccctgtctctaaaaatatataaataaatcaacaaacaaacatatgcttgtaaatttctctgcagggttcatatctacgtaaatgctgtgtgaaaaggaacaatgctgccctgaagttaaaaggatcataatttttgcttttttttatttgtaatgagctcatcttgtctccatgaacttttcagcttagctcactacttgtgtggtcatttggggattttcacctttttgcacttaagataaccgtaaggtggtctgaaatgtgcatttgttttctgtttgttctagatgatccctctgataagccaccttgccgaggctgctcctcctacctcatggagccttatatcaagtgtgctgaatgtgggccacctccttttttcctctgcttgcaggtaactcactaatgctggcttctcctagcctagttttatgctattttttatgatgtaatatttcggagattactgtcaactgctaaggagatctatatcttattaaatctattccttccaatttttctttttctttcttttttttttttttgagatggagtctcactcagtcgcccaggctggagtacagtggtgtcatctctgctaactgcaatctccacctcttaggttcaagcgattctcctgcctcagcctcctgagtagctgagattacaggcacacaccattatgcccagctgatttttgtatttttagtagagacggggtttcaccatgttggtcagggtggttttgaattcctaacctcatgatccatctgcctcagcctcccaaagttctgggattacaggcgtgagccaccgcacccggccccaatttttcattatacgttttaccagtgaaaagttgagaaacagagcagttagatgagacagactgttgattagtccacatctgtgtttaaacctaatacttggccgggcacagtggctcatgcctgtagtcctagcacttttggaggctgaggcaggtggatcccctgaggtcaagagttcaagaccagcccggtcaacatggttcaacatggtgaaatcccatctccacaaaaataaaaaaaaattagctgggcatgatggcgggtgcctgtaatcccagctacttgggaggctgaggcaggagaatcttttttttttttttgagacgaagtctcgctgtgtcaccaggctggagtgtagtggcacaatcttggctccctgcaacctctgcctcccgggttcaagtgattctcttgcctcgcagattgcactccagcctgggcgacagagcaagactctgtatcaaaaaacaaacaaaaccctaatagttaacactgttttttttgttgttgttgttttgttgagacgggagtttcgctattgttttccaggctggagtgcaatggtgtgatcttggctcaccgcaacctctgcctcccgggttcaagcgattctcctgcctcagcctcctgagtagctgggattacaggcatgcgccaccacacccggctaattttgtatttttagtatagacagggtttctccacgttggtcaggctggtcttgaactccagacctcaggtgatctgcctgcctcggtctcccaaagtgctgggattacagggcgtgagccaccgtgcccagctattttttcttttttttcttttccacgacagagtcttgctctatcacccaggctggagtgcagtggcgtgatctcggttcactgcaagctgtgcctctcgggttcaagggattctcctgcttcaagggattctcctgcttcaacctcccgagtagctgtggttacaggtgcatgccaccattcccagctaattttttatatttttggtagagatggggttttctcatgttggccatgctggtctcaaactcctgacctcaagtgatcctcctgcctcagcccccaaagtgctgggattacaggcgtgagctaccacgcccggccataacactgtttttttaagttaatttaaagtattgaaattacaggaaacataactggaagattattccttttgatgacactgtttattgtcttgttgaagactgatctctgtacagatgacaagggaagaaacaatttttgtgggtgataatggtaataataatactaattataagtacttgctctgtcccaggcaccactttgagtactttacatgaattaacccttaaatcatcactgtaatcctatgaagtacctatgattagtatccccattttatagatgaagaaatttaggctaagagaggttaagtaacttgttcagggtcacacagcaaataccatattttatcagatctaagacaccattgattataagaagcacctcaatttcagaaatgttaaaatgtaaaactggctgatgaaagttgtgatgtactttcgattataagatgaatcttgatttcagagagtttttttatttttttgagacagggtttcactgtgtcctctaggctggagtgcagtggcatgatcatggctcaatgccacctctatcttccaggcttaagtgatccttctacctcagcttcccaagtatctgggactacatgcttgtgccaccatgtccagctaattttttttttttttttttttctgtggagaaagggtctcgccttgttgctcaggctggtctggaactcttgagctcaagcaatcctatcacctcagcctcccagaatgctaggattactccaggcctacttcagggactttttatttttctttaaaaaaaaataaagaattttttttagagatggggtcttgctctgctgttcagcctggagtgcagtggtataatcatagctcactgcagcctcgacctcctgggctcaatgatcctcctccctcagcctgccctgagtaactaggtctatgggcacaagccacaatgcccagcccagagtttaaaatatgaaacaatatttatcttagaatggctgaaatacggtttcagagccaggattcaaatttaggctatatgattgtgattccagggcatatgctctcctcaaagagttgtcttagaaaaaagtatttttttcagacttgttttttctccatgagggccactgaaaagctgtgatcatgattccaccattctattgcagctgcagacaagattaaatgaatccttaaaaaattgttgtccgggctcggtggctcacgcctgtaatcccagcactttgggaggccaagaaaggtgaatcacaagatcaggagttcgaggccagcctggccaaggtggtgaaatcccgtctctgctaaaaatacgaaaattagctgagtgttgtgccggctgcctgtaatcccagctactcgagaggctgaagcaggagaatcaacttgaacctgggaggcagaggttgcagtgagctgagatggcgccactctagcctgggtgaaagagcaagactccgtctcagaaaaaaaaaaaaaaaaaaaaaaaacttgtcaagaagtggtgtggtggcccacacctgtaatcttagcactttgggagactgaggtacaaggatcccttgagcctaggagttcaaggctgcagtgagctatgatggtgccactgcacttcggcctgggtgacagaacgagaccctgtctccaaaaataaaattttaaaaacccaaacttgtcagaagaataacacaaacctcctctgtcctttaagaaagtagcttttgctaatttaatttttctttctttgcagtgtttcactcgaggctttgagtacaagaaacatcaaagcgatcatacttatgaaataatggtaatgatgaagttgctgggaatttctgttcactttttttaagaattagactgggaagtagtttttcttttccatttttctttaagctctcttggacttcagggaattagttttcttaatctctgagtatctttaccttttctccccttcggaaataggtaattgttatccaataagttttttagggttttgtggatctatcaaggtatttaagcacaaaaatagttttatatactcagatttttgtttgaaatttggaaattattcaaaggaaatacttttgatatgaggataacaggtatgctgctttttaaactcattgataaacatagccaatgtgttgtcactgtgtgctcatggtatttttatgtggttcatgtggacagtggtgtttttgttgagcagttcattcccttgccttggggaaattagttaccttctgagagtcaggttataaagtgaacacagcaaatgaattaatacataaaatcactgaagaggcagactggtttataagcttgaataaaacttggctatagcttaattgtaatgccacacttaaagaaggaataagagtgttcgtagtgtccttccaagccctggccatgggagtgggtggtttaataagccaaagtgaatatccagtctgcttgacgggtatatatacctttgtcaagatagttttgttggccaggcacagtaactcacgcctgtaatcctagcacttccagaggccaggttgggcagatcacttgaggtcaggagttcaagaccagcctagccaatataaggtgaaaccctgtctctattaagaatacaaaaattagctgagtgtggtgatgtgcacctgtagtctcagctacttgggcgtctgaggcaggagaatcgcttgaacccaggaggcagaggttgcagtgagccaagatcgcaccactgcactccagcctgggcgacagagtgagactccatctcaaaaaaaaaaagacagttttgtcagttatcagaacatattaagcatataactaaatctcctacttcaagcagttttctgacatttggcccccatgcagttgttcttacaggaaaggatcctggcaggcttgacagttaaaatttcacatagtagattaatctatattttctatcgatgctgcaacaaattaccaaaaattagatatcttaagacaacacaaatttgtctcacagttctgtggatcagaagatcattaggctcagctggtttgctccaggttccataaggctgaaatgaagatgttggccagcctgggctctcacctggaggccctggggtagaatccacttctaggttctttcaggttgttggcagaattcactgccttaaggttttaggaaggatgccactgttttgatcagggcatgttctccgtttccacaggctgtctgcattccctggctctgggccccctttctccatcctcaaagccaggagcacaggaagtccttgaggttgttgatgaaatccagggaatctctatgacctctcctattgccttatctttcctgtgctgaatctttatgagtgattcttctgctttcctcttctactttgagacagggtctcactctatcacccaggctaaagagcagtggcacaatcacagctcactgtaacctcgacctcccaggcttaagctatcctatctcagccacctgactagctgggactataggcacaagccaccatgcctggctaatttaaaaattttttttgtaggccaggcttggtggctcatgcctgtaatcccagcactttgggaggccgaggcgggtggatcacaaggtcaggagatcgagaccatcctggctaacatggtgaaaccccatctctactaaaaacacaaaaaattagccaggtgtggtggtgggcgcctgtagtcccagctactcgggaggttgaggcgggagaatgatgtgaacccgggaggcagagcttgtattgagccaagattgtgccactgcactccagcctgggcaacagagtgagactccgtctcaaaaaaaaaaaaaaaagaaaaagaaaaattttgtagacaggggtctaggggcctttctatgttattcaggcgtctaggggtctttctgtgttattcaggctggtctcaaactcctgggctcaagtgatcctcccacctcaaccctcaacctcctaaagtgctgggattacaggtgtgagccaccacagcaggcacctcaactatgtataaggactcatgtggattacattgggcctatcagggtaatccaggatagtctctctactttaaggtcagctgattagtaacctttattccatctgtaaagtcctttcccagcagtacctcgctagtgtttgatggactagtcagaagacaggaatcttaggatgaggggaacatctttatttttattttatttatttattgaaaaaaaaaatagagacagggtttctccatgttgcccaggcaggtctcgaactcaggggttcaagttatccttccacctaggcctcccaaagtgctggaattatagacatgagccaccatgcccagccagagaacatctttagaattgggcctcctacagcactgcagtatatttacttcagtctcttaaaagtttagaaagggtgaatcagcatctctgagcctgactattggtggagtcctattaaaatgagtttctgggcttataatattcagggtcagattctaggccacaatgaattaatcaaagaaccagttagagttcttgggagccaactaactagccttcctctatccatctctaaacaatttcagtcttttaatggcttcagtaattgtaagacttggaataaattttttccccctttaaatgcaaaaatgaagggttaggagactgttcaaagtagctgtggatttgagttaatttcaccaaggttatcaggtcttcagaaagctggtttatttttcccaaattaatgcgagaatacctagagccagaatacaaatttattcattcacattgtgaaataactccttaagggataattcagtatagcttgggtaggttggtagtcatgcttattcactgtaggaaagctgaccatgagctttctttagctattctggcatcatgtcttcttcataatgctgaaagcactgactaagtttcactccacatcacttcattctgattacatcatccttttctcacgtattcaacacccatacaatcacatttcagagtactgtcctttactttggggagcttttgggggttactaatacttcctttttgtggcccatcttatttattcccagtgaatctttccttctataggcatgatgaccaaattttagctttctacacaaaacttgatttttttgcctcagataactttaaatggttttcagtacttttgtcatgtcacagagctgtatttttgggagttactcatgctgtggtaggtggtgtgttaaccaggatttctgaattctatgcctatttttgtcttgtaattcttagaactttgaacaagtcaaggcagctctttctgccacacccttttataccagtgattcttaaacttcagtacataagaactgcctgggagcttcttataaatgtagatttctagactcttctgtgagagattgtggttcagaagtgctgaggtttggtccaggagttgaataatattaattcaactttttgtaaaactgccttgtgccttctttggtgtgtctgtgatgtagaaagtttttattgtttatctcacagtaaagttggttgagaaacaattaatattctaaaatacagttttacaaatgacagtctcttcaactaatgtgtgtgttgtcatatttacatgtcttttggtacttgctgaattgagagtgattatgaatttagtatagatatagactctgaaatttctctgttggatttcataatacctcatgtgctagatatattcgtagtacgtgctcagatgaaaatgtgttgcttattggtagtgtaatctcacaaatcatgactttttttttgtcattaacaaaaggtataacaagttctaagtgcctgtgtaatctgaagacctcctgtgtggtcttcagattattttttttttacttgttattatagaaaagttcagatatacacaagagagaatgatgtttggttatctattgctatgtaacagctacctcaaaacctcatgcttaaaaatgaccattttattatctcccacagttttgtgggtcaggcattcagattaggcacagtgagggtggctcttggctccacatgatgtacttaggctgaaagtcccaagagggttatgaatttagtataggcatagactccaaaatttctctcttggatctcataatacatcatgtgctaggcatattcatagtacgtgctcagatgaaaatgtggttgtcattgtaaccaactactacataatggtaataaatttccgtttacccatcactaactcttaaaattattgactcgtggccaatcttactttatctaaaccatcaccttttcttttatcttttcttttttttttttttgagacagagtcttgccctgtcgcccaggctggagtccagtgggttgatttcggctcactgcaacctccgactcctgggtccaagcgattctcccgcctcagcctcctgagtagctcagattacaggcacacaccaccgtgcccggctaatttttgtagagacagggtttcaccatgttgtccaggctggtcttgaactcctgacctcaggtgatctgcccacctcggccacccaaagtgctgggatgacaagcgtgagctactgcacccagcctaaaccatcacctttctagattattttgaagcaagtatcctagacagtatatcatttcatctttcagtatttcattaggtctctacgtaattctagtcacttttcacattccccgtcatttcataaaggcttaatatctaaaaccctgctgccttttttacccttgaaacaatcactgttctgatttttttttttatcagcgtagattggttttgcatattctagaactgcatatatatggaatcatactgtatgtacacttctgttgtttctggtttctttcactcagcttttttatttatttatttattttttttttgtgacagtcttgctctattgcccaggctggagtgcaattgcacaatctcggctcactgcaacctccgcctcccgggttcaagcagttctcctgcctcagcctcccaggtagctgggattattataggcgtccaccaccgcgcctggctaattttgtatttttagtagagacggggtttcaccatgttggccagattggtctcgaacccctgacctcaggtgatccacctgccttggcctcccagagtgctgggattacaggtgtgagccaccgcgcctggactcactcagcatgcttttgagttttattcatgttgtgtatgttactggtacatttgctactaatcatttcttttaattactgagtaatattctgttgtacgaacataatacagttttttatccattctccctttgatggacacctgggccttgcccacgtttaggctattgtgaataaagctgcaatgagtattcttatataaagctttctatgtacatatgttttcactgttttttggataaatacctaggagtgaaattgctgggtcatagagtaaatgattgtttaacttttaaataaacgattggcaagttttccaaagcatttatatcattttacacctctgtcgacaatatatgagagttctgattgcttcatgtgcttgccaacatttggcattgtcagtttcattcattttagctattttagtcagtgcagtgtggtattgtggtattacaattttttttttttttttttttttttttttactttttgcagtttgtttaattcagatacaaataagattcacacatttcaattttccaattggttgccttttatgtattttctattctgtatgggttttccttccctttctctcatttcttttttttggtcttattttagaataattattttttaaattttcttcttaaaaatatagggaaatagaaatagagttttgccatgttgtccagggtggtcttaaactcctggactgaagggatcctcccaccttggcctcccagagtgctaggattacaggtgtgagccaccgtgcccagccatttttgggtttactgaagttgcaaatgtagtatagagagttcccatctatccttcatcctgcttccccaaatgttaacatcttacattatagtacatttgtcaaaattgagaaatgaacattggccgggtgcggtggctccttcctgtaatcccagcactttgagaggctgcggtaggagaattgtttgagtccaggagtttgagaccagcctgggcaatctagaaagaccccattgctgcagaaaaatttaaaaattaggtgggtgtggttgcacatgcttatattcttagctacttgtatggtggaggcaggaggattgcttgagttcgggagtttgaagctacagtgagccatgatcacaccagtgcactccagcctggtcaacccacaagaccccgtctcaaagagaaaaaagggctgagctcggttcctcatgcctgtaatcccagcattttgggaggccgaggtgggcggattacttgaggtcgggagttcaagaccagcctggccaacatggtgaaaccctatctctactaaaaatacaaaaaattagccaggtacagttgtgtgtgcctgtaattccagatgttctggaggctgaggcaggagagtcgcttgaacccaggaggtggaggttgcggtgagccgagatcatgccactgcactccagcctgggctatggagcaagacttggtctcaaaaaaaaaaaaagtggggggcaaaagaaatgaacattactacaatactagtaactatagattttattcagatttctccagattttccacaaatgtccttttctgttgcaggatccaattggggatcccacattgcatttagtcataatgttttctccaatctatgacagtttcttagattttccttgttcatgaccttgacaggtcgaagtgtattttgtacagtgtctctcaattttgtcttcataggtttgatattttatcatgattagatttggattatagatgtttaggtggaagatcacagaggtgaattgccttctcattttatcatatcagacgatacataatttaacactggtgatgttgaaaaatgagcagccagccacaagagatgcatgaggcagggtgtatgtgggaaggggtacggagctttcctgtcctctctgggtacaccgccctctacctccatgtgttcagcagcccggaagctcctcgctctcatttcttattattcgtttgatttttaaaagctggattgtttgtcttacagatgttagtacagtctggattctgttgactaatgtgttcctctctcttctgtgtttcctataaattagtagttacatttaatgactacttcagattcatttaggaccattgtctggatctgctaattcaccaaggattgcaaaacattaatcttttaattctatcactcattttaatttatgagttagaaatttcttattattgtgtggtcccttggagtaacgtttatacaggaaaggaaacagaaaagatgattacttccctttatttactagttttgagaatatgcattggttccctagcatcctctacatatttaaaatatttgatgtttcagtcctttgtggttattatacttattgatgctcaaaatattccatttttagttaacaggagtctctggaagttgacttctgaatttttttgacatgacctttatagtctttaagagcttctttgctgccaggcacggtggctcatgcctataatcccagcactttgggaggcccaggcgggcagatcacctgaggtcgggagttcgagaccagcctgaccaacatggagaaaccccgtctctactaaaaatacaaaattagccaggtgtggtggcacatgcttgtaatcccagctactcattgctactgggttggtcatttttcctggaccttttcaatgaacgatgttaggaaattatttttcttgtaagatacaacacatgagttcataataaaactttcaatttaaatacgagactacaagagttttgtttgtttgttttctgtttgtttgtttgtttgtttttgaaacggagtctctctctgtcccgcaggctggagtgcagtggcgccatctcggctcaccgcaagctccacctcccgggttcacgccattctcctgcctcagcctcccgagcagctgggactacaggcacctgccaccacacccggctaattttttgtatttttagtagagacggggtttcaccgtgttagccaagatggtctcgatctcctgacctcgtgatctgcccgccttggcctctcaaagtgctgggattacaggcatgagccactgtgcccggcctgtttttggtttttatgagacagagtctcttgcccaggcgggagagcagtggtgcaatctcaactcactgcagactctacctcccgggttcaagcgatcctcctgccttagcctgccaagtagctggaaccacaggtgcgcgccaccatgcccagctaatttttgtagtttttgtagagacagggttttgccatcttgcccaggctggtctcaaactcctgagctcaagcaatccacccacccaggtctcccaaagtgctgggactacaggtgcatgccaacactcccagctaatttttgtagtttttgtagagatggggtttcactatgttgcccaggctggtctcaaaactcctgagcccaaaaagtccacccacccaggcctcccaaaattctgggattgcaggcatgagccaccatgcctggccaactacgaggtttttacataacctcacagatcttacagctatatcttttttttttcccaagccaaaaattatacttcccaatgacactaaccaacgtaattatttatttgctttacctcataacatatacacatacactaatctcaaaataactgtcaatactaaagaaacattttaagatttggcaatttcttttgtttttaaggtatatcctacttagagatatttagtcaaattaagtgtttcaaaatcacttgaaatagttcctttctgtgtgattatgccttcaaattgatttctgagttcgttatattttgcattttattcttaagattttgaagtttatttttatttttattttttgagacggagtcttgcttgttgcccacgctggggttcagtgctatgatctcggctcactgcagcctccaccttccagttcaagcgattctcctgcctcagcctcccgagtagctgggactacaggtgcgtgccaccatgtccggctaatttttgtatttttagtagagacgaggtttcatcatgttggccagccttgtcttgaactcctgacctcaagagatccacctgccttggcctcccaaagtgttgggattacaggcgtgagccactgaggccagcctaaagtttaatattatactctttatgtttcaaagttaaatctacaagcaaggaatattcagagacatctagcttctggatagatgtctctaccctgttctctttcttcctccccatagtaacctttttttttttaaagtgtgttttattcttccatttaaaaaaatacatacatatttgtcttttcctctttcttagctaaatgggagcgtactgaaatatttatctctacctctgtgttaagtttaaaaatatatgtatatctgcatgaattgcttggcatttataggtgatatggaggcccttctagctaatggtggaaacgggtgggagaggtggacaactaataagaatgtaccctgggtatctctcatcattcggctgtaaactattactacagttgaagttcctagattccatttatttttaattttttttttttttttgaaacggagtcttgctctgtcgcccaggctggagtgcagtggcgcgatctcagctcactgcaagctccgcctccgcctcctgggttcatgccatcctcttgcctcagcctcccaagtagctgggactacaggcgctcaccaccaggcccggctaattttttatatttttagtagagacggggtttcactgtgttagccaggatggtctcgatctcctgacctcgtgatccgccctcctcgacctcccaaagtgctgggattacaggcgtgagccactgtgcccggcctatttttgatttttgagacagagtcttgttgtgacgcccaggctgaagtgtggtggtgtgatctcagctcactgcaacctctgcttccgcagttcaagtgattctcctgcctcagcctcctgagtagctgggactacaggcgtgtgccaccatgcccagctcatttttgtgtttttagtagagatggagtttcaccatattggccaggctggtctcgaactcctgacctcaggtgatccgcccgcctccgccttccaaagtgctgggagtataggcgtgagccaccgtgcctggcccctagattccatttgtatctctgttcttaagcaaaacttttttctccttagacttcagattttcctgtccttgatcccagctggactgctcaagaagaaatggcccttttagaagctgtgatggactgtggctttggaaattggtaagagcttggtgttaagagttgtcctgccctagtggactcagagaagaagctgttgttgaagagtaaaggaaggaacctcaggaagagaaagtatgtgttgctttcctatcaacccatgatttagaggcaagttagtcccctctgtacattatttttccagtgtcgaaatgtgtcacgaggatatgggatgtttagcggtccatgactgagcagctttaaaaggccactttggatgtatcaacagtgggaagattgattattattcctttctgaatagtagggaagtttagtttcgttagttattactcccttctgattttatgaatttttgttagttgtagatgccctagtcatttaagtgaatcagactttagctagatggtcatacgtaagattcaagtttcacagacttcctgatagcattctctgtttttagctttcaaacacctacctgccttagtccaaaaccggcggaattgaatagcacttattgctgttgacctagggggcagcaccacttaatactaccactttcgtttttatcttttgggaacactttcatatggatgcttttattttatgaactagatagcagaggcattattgaatatattttgttcacaaattatctgaagcctagggggttgaaatgatttcttgtgattacatagcttattactgaaggactcttaattaggtcctccctgtcctgacttactagtgtatataacctttcttggtgttcatcagaataaactctgctgcctgcctcccttatgtccagggacctgaagaaggagacctgaatttagttcacattttgcttgtattcattcattcagtatttattaagcatcataaaatactgtgtacaatgagaaataccaaaggaggtagaaaagtaatcacttgtgaggagtttgctagtcatctttggcctagtttttcattttttgcttaccattctctctaaaatagtctaaacctctctgtcctccttccctcttaacaaagaacataaaaaagacatagcttctctatccgctgtgggtaaggcactaagtttggcagtgagtgggctagagctaagaattatgagatgcatcctgtcttcagaaagcttatagtttagcaggggacttaaaaatacaagtgattgaagtacacaaaacagcacagtgatgccttaggggaggtcaagtgaaatgctgtgaaaaagagaccttgaggaaaggacttccacctgtacctctccattaccttggctcaagtcagggatttttttttattgagacagtctcactttatcacccaggctgaaatgcagtggtgtgatcacagtcactataaccccgaactcctgggctcaagggatcttccctcctcagactcccaagtagttggaacaacaggtgtgcgccaccatactcagctaatttttaaattttattattattattattatttggaaacaggatcttgctctgtcgcccagggtggagtacaggggcatgagcttgactcatttcagcttcaaccttccaggctcaagtgatcctcccagctcaggctcccgagtagctgggactaccggcgtgtgcaaccacccctggctaatctttgtattttttgttgagataggattttactgtgttgcccaggctggtctcgaactcctgagttcaagccatcctcccaccttggcctcccaaagtgctggaataacagatgtgccccaccatgcctggccagattcttaagcaagtttcttaattattttgggcctca

SEQ ID NO: 674 - DNA, 23811 bp, Homo sapiens
  source 1..23811: mol_type = other DNA
aagatggcggctcccacaattgtggtctgagcgccggcggggctgcgacgaccgcggcgcttgtggctcctttccacccgccccggaagccggccagtgctggggacttgggggtgtgggaaccgggccggggctccgccatttccggcgggggagggctacgactgaggaagggaggagagagaggcggctcaagatggcggctcccagggcctcccgcccgagcttgtaagcgggagcgcccggacaagtagtcggggcgacgggactcagcggcctccagcttcttgagcctaggcgctcgacagtttcgggcggctcttgcggagacggggtgagcgagaagaaagggaagagccaaagggaaggagggcagttaagatggcggcctccatggagtcgtctaccgctgtgtgagaaaccgcttctccgtgagagctgccttagacgaaagggggtgtgtgaaaggaattgaggggctcccttcccgcttgttgacttctccccaccgcaccctttcccggaactatggcttcggccgtgtcgcccgccaacttgccagcggtgcttctgcagccccgctggaagcgagtggtgggctggtcgggtccggtgccacggccccgccacggccaccgcgccgtggccatcaaggagctcatcgtggtgtttggcggcggcaacgagggaatagtggacgaactgcacgtgtacaacacgggtgagtgcaaagcccgctgggtcttcggctctttccctccctccatctcctccctctccctcctctttcctccctccctccatctgctccctccctctcctccctccctccatctcctccctcaccctctacccttccctctctctctcccctcctcccttacccgtccttctcccctctccccgtccccctcccccttctcccctcctccccctccctccccactgatcggcttgcccctcccctttgctgtgccgggcttcagtgcttttctctgatcttctccccgttcccttgtctctcccgtgtttgaggattggttttcgttagttaaaagaaagcccctagtccgactggtgagggagaggggctgtcgccagcggtggtgacttcagacccacaccgttacccagcgggctggggctggggctggggcgggcggatgtgtccccttggcgcaggcagagctcccctccctccctccctcccttctcctgcgcctgctcagctctccctcatctcgagtgcccattctggagaaatgaccatttctagattacagattcgttctctgtctctcgaaaaagggagggaagggaagcgctcttaggacgcagagtttaacatccgccgacccgggtaatgccggagccttggggacccctaggacgggccggcggcagggccgcctctccctttccacgtttacttctgcagcatttctttccaagtcgccccttctcctaatctggtgccttctggtttacaagctgaattccagttacccctcagcggcctgcgtagtcgtgtgtctccccgcttctgcggatccagggggttaccccacccgctcttctgcctccctgcaaaacccaaagcccgttagttgggaaggggaggaacctctctcttcaggtatggctgatgcaccacggccttcgtgggggccgtttgttgttgcctctgcctagtagccttgcttagtctctagggcagaaagcctgctgctgtccacgacagctttgtggcatcctttttcttggtggctacttggcccgttttgtgcccctagcacaagggtcagttcccaagttgcctactgactgcccgttggcccacaggaccctggccttgcccagaaggcagggtcagggtgagttcggtcccaggcaagagctggaagagtctgggtgagggaaaagccccctgcaggcggctgggggagggccttgggatgccctagtcctgagtggcaggcacggctcccagcactaaccccttgctccgcggccgttctctcctgggggctctagcgatcccctggcctcggtggtggccctgcagacaaaccctcgctgagtgggctttgtgtcctgagcggtgagaggctgctgttctttggctgagctccagtgcctcgatgctctgggggtgggaagctggagctgcctggagggagaaagttggtttagggagttgggaaggctggagctgggctcttgggtgccgcttccttccccaccccccaaggcagaaagtgctggtttctccacatctcggagattatcgccacctaccacgttgactttgaaaggctggtgggttgtctgtgaccgtttttcgttccaggtctctcagcacctgttgcctccagggagcagggcctttctcagcagcccccgggcgggggcgcttggtggttggtggtgccccgcgccagcccaggcagctgcagtagcaggaattagctcagtaagctaaggcttctccagtggtggggctgtttatagaggcaccgtcaccatgagcagcaccttctccactctgtggaccgactttcttctcataaggcctggagcaggctccctggcagggaaatgcaattttagaaagtagggcaggggcctaattacagtcggctccagagtccaccaccactgctgccttggcttcctggggcctctgcatattcattagtttattaaaatgaattgaccactttggcatgaattcattaccagtctgcaaagacaggttgtgcattagaggggtagcctgccttccaaagggctgcttaaaatgaagctctgggatcctccagggtagcagtttggaaactgtcatcggcaattcctcagacgagagagcagctggcagacctgaagccctcttcctcaccggggtttctgccccctcccgccagcccggcctcgtcacctttgtcttgtcttcttttgttgtgtttgggatgagatcagggcatattctcacgcctgtgccccttgcagttctgcgggatcagtcctcaaaaagccttgtacctttggagagagctgatctggaaggggttcccgttgctaggataagaaagcttcagggggtgtgtgctttgagagctcttagggtagctactgtgcttgtccttagggaattttagttccatgtggcaagccaaaggattcagagtgctgccaggtgtggggggtgggggagcgagagctttggctacggtggctctgtaatgtccataggttcttggagctggagggagccttggaaaatacctagtggaactacttccttgtttctgcagatgaggaaattggggtccaagaggggaagtgacaggtccagggtcgccctcccagctggtggcggagttgggcgggagtgcaaaccttcatagaggccgttctgccacctgtctttggggcccatcacctttgaaatgcctccattctctcctctgtccctgtatctaattgttcattgcgttgggcaggcatcaaatgtgtccccttccacaccaagccctcctctcctcttactagactcttgcagtcacttcctgattggccctgctagtttcatttgtcgggaaatcctgttcacccttcaaggcccggctgaaacgtcacctcttctgagaagccctttccactcctgtcctcccctctccagcagtcgcactgctctgtgctcccaagggcccggcttggtcagagctcttctagggtgtttgtctcatcgtgggaggggggcatgcagccttcctaccccattgggagtatgagcacaagatcggtgtcctctgtgcctcccagcacgtcgtatgccacacaggaaatgctctaatgtgacaggtagaacagagaggaaggcagctcgttgaacttgaccggccacctcactgcatgggcaccagtctctaggtggtgatgggacagtggcaaccagggatggagcttgcagagcatgaagtggttgggggagctgatgaaacacagagaggccggggcacagccttgctcaggagaggggagctggagtggtcttcatctagtgcagggtcctttccccaccttcccctcccagctgagagccagcatttccaggatgaggggcccaaggattgggttacatgacaccccccagatgattcaggggtgactgagagcagctgtcacattgaaaagctgggagaagggaggagagcttgctcgtgtgctttcagggggcggaaccaggactcgtgggtgagatgaggagccgcaggtttgtcgtcacaccaggagctgtgctccctgacagacctctcttgacgggggtggggagggcccctgccctgcctggagtgttctagaatgagatcagcacctcttgggtcctgtagaaggatctggtgagcgggatccccaaagatatcacagggcgcttctggcctggcccaccggctcactgatcagcgtgtgataggaaagctgcccactgaccccacgtgccatttagctttgtcccaaactctgacccgcagccccatagctgtgggctttgaccacgagggtgctcaggggagtgagggtggctgcctggacatgggaccctagggaaggcacagatcggttgcttcaagtcagtgatggggctgttgtctctgtctctgttttacgctgtgacctcaggtgtcgcttgccctcctgggctctgcccctttacctaccgagagcagttggcccaggcagccttaggtctcgttatgcgtttaccctggtagcttgcatggagctccctccagggattggtcaggacggctctccagtgcgcaaggctgttggccttggcagctcttgcttttctggggtggtttttgcactgggaatgagaaagaggcagagggccaggatccgagcttgcacatgcgggcggcacaggtgttgtccctctgctttagggaaatggcaggggagctctagtgctcggcatgtccgaggcccagtgactcagctgaatggctgcagaggctgtcagcctgctcgaagcctacccgcagagtgggtgctggagagcggggtgggggtgctctcgcctcaggaggagcggtggtggtacagttgtgctgtgtggggttttctgttttttttgtttgtttgtttgttttgaggttaggtcttgctctgttgcccaggccgggatgcagtggtgcggtctcagctcactgcagcctcaaactctgagggtcaggcagtcctcccgcctcagcctcctgagtagctaggaccacaagtgtatgccaccacactgagccagtgttttaaaattatttgtagagacggggtctccctgtgctacccaggctgggagttgtgctttggataagggctagccttgcacacggttccgcattgagccctgggggtgacagtgtgagactgggtgggaccagagtgcagtggggcatgcattcccaaccatggtcagccgcctggccctgggtgcacacctgaatatggaaaaaaaacactgtttttcctcttctatggtctcacaacacttttggccaccaaactgaatagtctgtattatatcacaatatcacagcatccctgtgtggaagccttcccaccccacaggaatccccccatgccctgtcacgtcctgggggacccatcttgcgtcttgagtcatgtggaggggcctcagttccttctgccgtctgcttgctgagatctcacccaggccagctcagaggcacagagtcggggttgcacctggcccccagtttggggtttctggaaagagtgtggtgaatcctctgagggacccctcataggaggaggttttcggggaagccctggcctgccaggtgtgaggggagtcaagtttgaggacatgagggaggggcctggtcccagctgaaggctgctgtgccatcctgtggaagcaaagcagtgcctaaggtctgatttccctctttcttggtggtcgcctcaccctcatgagcttttgagaagcttctgtcacagctctgctgagactgctgcctctggcttgcaagaatgttctggagtaccataggtgtggcagcaggggcagggagggatgctggtggaccatcacctaggagaccagaggaagtccgggaggtcagagcagaggccgggtctcatccccatggctcttcgtagcctgcagcggtcactgttttggccacttgaaagtgctgctctgggctctggctgtcctgaccctgtgatgaagggacaaaaatgtgggctccagggaggaggagcacaggcccaccaagagggtattttggggagaaattcatgtctgatcactgagtgctagggaaggaaggcagtggctagattcccagtagctgatgagggatcttgcacagtaacttcccgctcattaagatgaccttggcgagaagcagggtggtcacaggctcttttgcactggcctgaagtcgaggggtttggaagatggcccaggtagcgcagctggagttgctagagcgcccgcagggatggtgctggctcagcccctctcaccaagcttgacggctggcacatttggggaatgagaggaatgggggctcccgggtgttctgacttctgcctccttctgttccccagcaaccaaccagtggttcatcccagccgtgaggggggacattccccctgggtgtgcagcctatggcttcgtgtgtgacgggactcgcctcctggtgtttggtgggatggtggagtatgggaaatacagcaatgacctctacgaactccaggtaaagcagccccaggttctcactctgcctccttggccccatgtgacctgacggtagtggcttcagggttgaggcaagcgggaggtggaagggacgcttgagagtctgccaaggctgctctgaacttggcccacctcagaagaaggcagcaaggaccaacacccaggaccttcttgctccagcaaggcacctcgctcacccccggccatttcctcctccaccacaagttgccccgggtccctagtggtggccttctcatcccacggttcagtctccaggtcttgattttgcaggcgagccggtgggagtggaagagactcaaagcaaagacgcccaaaaacgggccccctccgtgtcctcgactcgggcacagcttctcccttgtgggcaacaaatgctacctgtttgggggtctggccaatgatagcgaggacccaaagaacaacattccaaggtgaggcttggtccttttctctggaaccccccgggtgggtgtgctctcacatgcacagggctccatggtgtcctaaagaatgtgcgcagcagagccccgtggccgggtccctttctcgtgctgggttgtaaatgagagagcggcaccggatgccctctcaggagctttcgggctccaaaatcgctactgaccctgagcaggcctcgtgggaggagggccaagctggaggtggaagccactttgccttgggctggcccagctctcggagtcggcttagagctgctcgcgttccttctcagcctccgctgcctacaagtttcctgatgggtattttccaaggcccgtggccaaggactctctgtctggaggtagtcccaagccagcgccccctcttgctctgcggagccctcatataatacccagctttgtgtgcatggcgggggcctgctgctgggtctggactcggggctgctgtgcagcctcacccaccctgtgtcccctgttccagttggactcatcctagggagcttctggcagccccttcctcaagagctagggtagaagaacttcagagctcccacagccctagcccctttgtgttctggggaggctgccactcactgatagccatccagcgaagcctctggcgtgaggagtcgagacttgccgtaactgatctttcctcgtcaggtacctgaatgacttatatatcctggaattacggccaggctctggagtggtagcctgggacattcccatcacttacggggtcctaccaccaccccgggagtcacatactgccgtggtctacaccgaaaaagacaataagaagtccaagctggtgatctacggcgggatgagtggctgcaggctgggggacctgtggaccctagatattggtgagcagggtggtagcaccccagcagccatgggacaaagcgggtctgcctcttggctggccccgtgggtggcgctgttgtatggtgaggtggggctcttagggagctggagcataccacttcgtgctttcctcttgtcatggtgggccagggtggggaaccctggatcgtccctaggtttggggctgttatctctgccctgtgctggctgagtgggctgaattggtctgcgggcttataagagaataagtcattaaggctttctagaatggaattctctggatccgggtagcattagtccctcttgactcgtcagtggtcagactgtgtggagtgctgcatcctggtctgactgctgtggtaccattggatgccggtaaaccgtgaggccttcggggactgcttgggccggtcaccaggtggtggtatcaggagtggctgggaaagattactaactgtggatctccggaggcctcttcagctgggagagaggagatggcgatgttgtcctatagatcagagtcggcactccaaagaagcagtttcccgtgagagaattttccaacagtttgccaaaatgtctgtagcctaaggtggttatggcggtgaacgtatttcatggagagttcggggtgtgcccaccactcctcccccagcacagagtgcagtcctggctcagggcaggtgctcaggatgtacctgaaggagcgctattgctagcctggtcgaaaccgcctgggtaacacaggaatctagctaccatgacaacagtcagagggcctgccgtaggctatagggaagccagggatggaattctctcactgagacagatcctaccttcctgagctagcttgaatccagggaacgacctgtgtgcagtctaccttgtgtaaccctttcccctccgtctctctgcagacaccctgacgtggaataagcccagtctcagcggggtggcgcctcttcctcgcagtctccactcggcaaccaccatcggaaataagtaagtggctgctcacctgcgtctctcttctctagactggcgtggcccctcccccgaagggctctcactcagttttgtcctgtcagaccctaaggcctgaggatgcctctttctggctgggctggcatttggcagccctgtttttccattacgaccctgggggaccaaggaaagacagattcaggggggagagggccacacacaagctgagtctgagaccctccccgggcctgtgaggctccgccctatcaggtacagagtgttctaggtcctctgtgcaagcacctgggtgtctttgtggatgtccaggtcctaaagggaacctagaaactgtggacatgaaggtgagctttagatgagctgaacggcacttttatgtggtagaggtgacacagttctcctgagggctgagccaccaggcaggagagggccacgtcaggaggcttcacgcatccttggggactctcctggggagagccagaggactgagctctagaactggggtagcagaggtggcctctagcttggcaccaactctacaatcctttcccactcttccctcctcactcccagaatgtacgtgtttggtggctgggtgcctctcgtcatggatgacgtcaaagtggccacacacgagaaggagtggaagtgtaccaacacgctggcttgtctcaacctgggtatggcctcctcgggctccgagtggcctgtgggaggctgcaggaggctggcccttctcagcctaagagctgtgtggggtgtgcggggagcaagctgggcccccggctccctttggaatccactggaaggatccagtgggcagagctctctgaagcaatgttccgcctctgagttttttgaatgagctctccatccaaatggcccaacatccaaaagtgcaaaagcctctacggtgcagggcctccttccctcctcccggttctccggttctgcttctcagaggcagccatgtgggtggtttcctgtccaccctgcaggggctcttcatatctgagcattagccataggtccctttaaaaacaaacagtggcagcctggcgcacgcagtgccacacctggcctttctcatccgccgtatcttggagatcactccacgtccctgccccgcagcagcctccttcgagttgcggttgtgctgctgtaacttgtacaggcgccgctccgtgagtatccttgcaccatctccacccgtgtgcaagtgtatcctaggggtgaaaacctagaagtagggttgctgtccgatgcggctgaactgccctgcacagaggctgtgcccacgtaggcgcctccagtggtgccctcacggaatggtcaggccactctttgccaagcctgatgggtggccgaagctccccctccggctcaccttgagccccagctgctgcgggcctgaaaataaaaatgccaggcgccgatggttgaagtttagatttcttttgcgtgagagtgtgtgttttttcttaagatctttctatcacgttttccctaaaccactttcccattgccgtctctttctgtgagttgtagtgttctttaacgggcaaggaggtaaacctctgactgtgtttctcatggttttcttagttggccgttggtggtttgtaattttattttttgtgttgctttttgccacaaagggtttctttgttttgttgtttttaatgtaataatccaataacttcttgattttaattcccatccttgacaacaaaagaaccaagggcaaccaggggtggcgggtttcctccatcctccttgctgacctcccttgtctgccctcccccagataccatggcctgggagaccatcctgatggatacactggaggacaacatcccccgtgctcgggctggccactgcgcagtcgccatcaacacccgcctgtacatttggagtgggcgtgacggctaccgcaaggcctggaacaaccaggtctgctgcaaggacctctggtacctagagacaggtaggcccggcccagccgactcccctcctcccatagcctcccgccccttctcaccaactgcgttctcccacagaaaagccaccacccccagcccgagtacaactggtacgcgccaacaccaactccctggaggtgagctggggggcagtggcaacagccgacagctaccttctccagctccagaaatatgacattcctgccacggctgctactgccacctcccctacacccaatccggtcccatctgtgcctgccaaccctcccaagagccctgccccagcagcagccgcacctgctgtgcagccgctgacccaagtaggcatcacgctcctgccccaggctgcccccgcacccccgaccaccaccaccatccaggtcttgccaacggtgcctggcagctccatttctgtgcccaccgcagccaggactcaaggtgagccaggggaccagggacgtttgaaagtagggggctagcctccggggagaggcagcggccaagtaggggctgcgagacggcagcctagacagcaggccagcagccgggagctttgggcttgtctccaagggttgtagggggatgctaaagcctggccccacctgtggaaatggtcactctcagggcacagagaagagccagactcccacacaagcaggccaacagaagtggctcagggctgcctgcaaaggggctggggacatcgtgcagaaggtgatggctgacggctggccccttctctcatcaggtgtccctgctgttctcaaagtgaccggtcctcaggctacaacaggaactccattggtcaccatgcgacctgccagccaggctgggaaagcccctgtcaccgtgacctcccttcccgccggagtgcggatggttgtgccaacacagagtgcccagggaacggtgaggagtggtcactggggcgggtgggatttcctgttgatccagtggattaagttgcaagtgtactgaggggttcacatccctctcgggctctggtaccacgcaccccacacctttccctcctgggacgtgcagatggggaaacgctcctgcgaggtcatggtgggaattaataggttaatgcctagaaggcctaacctgctgcctgatcctaagagcatttgccacgtggactttcttgtcctgcagcctgagaggaggatctagccagctgggcttgccacaggcccatgagaatcaacgggacctgactctggtctttagaaaggatccagagctcccagctgcctcttgccacgggggttgccgtgcatggtgggtggtgggagccctctgtgtctggggccaggagagcggggtctggcagtagagaaagctgagccatgctggcgggatgaggctcccaagagcagggcagcccctgggcaggttccggtgaggtccaccaagcagggaggtgggtggcacctgtgacctggcctcacatgcccgtgcctgctgcaggtgattggcagtagcccacagatgagtgggatggccgcactggccgctgcggccgctgccacccagaagatccccccttcctcggcacccacggtgctgagtgtcccagcgggtaccaccatcgtgaagaccatggctgtgacacctggcactaccaccctcccagccactgtgaaggtggcctcctcgccagtcatggtgagcgtcttccggggcttgtcactgtggtcaaacaagcatagtcattccctccgggctttagagttagccgttggaccgtgggctgcagaataagctgtctccattaggggcgtcatggcctcaggtgagagctgcaggctcagcctcctcccttgcctgttaaaggaagggggaaccaagctgttcttgggcttgggagcaggaggaggaggaaggtgagtgttgaggcaggagctatgggcccaccgtggacatcttgggtggtttccccatcgctttctttgcctggcctgtcactcgtctctgcctcctccaggtgagcaaccctgccactcgcatgctgaagactgcagccgcccaggtggggacatcggtttcctccgccaccaacacgtctacccgccctatcatcacagtgcacaagtcaggcactgtgacagtggcccagcaagcccaggtggtgaccacagttgtgggcggggtcaccaagaccatcaccctggtgaagagccccatctctgtcccaggaggcagtgctctggtgagtgatgggtgctgccaggctacggccactgccagtggtgaatggccgccctgggccagctccaggagagtctcagccaggccatgcccttgtttggtttccagatcactccttgctccatcccttcctttttagatttccaatctgggcaaagtgatgtcggtggtccagaccaaaccagttcagacttcagcagtcacaggccaggcgtccacgggtcctgtgactcagatcatccaggtgagctctcagtctttgcacatacgcaagagtgggggcctgggtgccaggccacaggaagaactcatgtccctgcccatggaagatcccatgagcacacatggctcagcaagttctgctgctcactcccctcgcccacagcctccagaacattccctgagccgccaaggctgccggcggagagtagccagaccacacttcccttcctggcagtgatgccggctcatgcacctgcttccccctttcagaccaaagggcccctgccagcgggaacaatcctgaagctggtgacctcagcagatggcaagcccaccaccatcatcactaccacgcaggccagtggggcggggaccaagcccaccatcctgggcatcagcagcgtctcccccagtaccaccaagcccggcacgaccaccatcatcaaaaccatccccatgtcggccatcatcacccaggcgggcgccacgggtaggggcctcccccgacatatgagtgtctgcaagtcctcactggaggggaaatggagtccgggttataaggcgtgctgtgtttctgtttagtttacccttttctatcttctccttgctgccttttgtgtctaagggtagtgaggagatgggcagggctatggctgtgacttgtggatgttcattatagtctaggggcagcaggggcagccctcacagagcctgtctcccctgggccccactctcccatccaggtgtgaccagcagtcctggcatcaagtcccccatcaccatcatcaccaccaaggtgatgacttcaggaactggagcacctgcgaaaatcatcactgctgtccccaaaattgccactggccacgggcagcagggagtgacccaggtgaggcactcccagccgtctctcagcccagtgtcctagtgcagtccaccccagcacgccacgcaggtcctcccgacaggcctgggaggggcagcatcggtggcatctaccagcctggtggtgacgttggtggcactttcctctggtgttccaggtggtgcttaagggggccccgggacagccaggcaccatcctccgcactgtgcccatggggggtgttcgcctggtcacacccgtcaccgtctccgccgtcaagccagccgtcaccacgttggttgtgaaaggcaccacaggtgtgtacccataggccaggtcccctgccacccctagattataacgaagcagggctggccttcaatccccatggcacagctgggtggcacagcagctcctctctcccgagccttctatgcaagcagctccagagtgccccagcctgtgcaggaggagctgctgggaaggagacagcagcagccttggcccaactcttgcctcctttccttcaggtgtcacgaccctaggcacagtgacaggcaccgtctccaccagccttgccggggcggggggccacagcactagtgcttccctggccacgcccatcaccaccttgggcaccattgccaccctctcaagccaggtgatcaaccccactgccatcactgtgtcggccgcacagaccacgctgacagcggcaggcgggctcacaaccccaaccatcaccatgcaggtagggcagggcctgaggccacgtgtgggcgagggaccccacacaagtggaagcacgtgaggctcacgccgtccgtccacaggcctttccttcctggtgttgcgctgctgccgggtgcagccatggcaggcctttcctcacctggggcattttccctggtgtcacatggtccctgtgtcatagtccgtggtttggctgtcatggtttggccatgcctggtgtttgaacaccgggttcttcctctcgcagtgttctacaggacgccgcagctcgtctgcatgtgtgtgcagtgttctgttcatacatattaaggaaaacggtgaaacgtttgttgttggcctttgagcattgagggggatttccattctctgacaaaggacttgacttcagccagcctcctgccttccccttgccctgtcctcacagcctcttcctcatcccagttgcctttgaggcaaagtggtgcctcttccctggcctctgagcaagtcagtgtcttgggggcaggggtgagtgggtcttacgtctgccagggccgttgagaagtggtcagtggtcccagcctgtgtggtgacagtgcaggacagtgggagggacaggcagacagccagctgcagcactaactctcctcctcgtgtgtctccccagcccgtgtcccagcccacccaggtaactctgatcacggcacctagtggggtggaggcccagcctgtgcatgacctccctgtgtccattctggcctccccgactacagaacagcccaccgccacagttaccatcgccgactcaggccagggtgatgtgcagcctggcactgtcaccttggtgtgctccaacccaccctgtgagacccacgagactggcaccaccaacacggccaccactactgttgtggctaaccttgggggacacccccagcccacccaagtgcagttcgtctgtgacagacaggaggcagctgcttctcttgtgacctcgactgtgggccagcagaatggtagcgtggtccgagtctgttcgaacccgccctgcgagacccacgagacgggcaccaccaacaccgccaccaccgccacctccaacatggccgggcagcatggctgctcaaacccaccctgcgagacccacgagacgggcaccaccaacactgccactacagccatgtcgagcgtcggcgccaaccaccagcgagatgcccgtcgggcctgtgcagctggcacccctgccgtgatccggatcagtgtggccactggggcgctggaggcagcccagggctctaagtcccagtgccaaacccgccagaccagcgcgaccagcaccaccatgactgtgatggccaccggggccccgtgctcggccggcccactccttgggccgagcatggcacgggagcccgggggccgcagccctgcttttgtgcagttggcccctctgagcagcaaagtcaggctgagcagcccaagcattaaggaccttcctgcggggcgccacagccatgcggtcagcaccgctgccatgacccgttccagcgtgggtgctggggagccccgcatggcacctgtgtgcgagagcctccagggtggctcgcccagcaccacagtgactgtgacagccctggaggcactgctgtgcccctcggccaccgtgacccaagtctgctccaacccaccatgtgagacccacgagacaggcaccaccaacaccgccactacctcgaatgcaggcagcgcccagagggtgtgctccaacccgccatgcgagacccacgagacgggcaccacccacacggccaccaccgctacttcaaacgggggcacgggccagcccgagggtgggcagcagccccctgctggtcgcccctgtgagacacaccagaccacttccactggcaccaccatgtcggtcagcgtgggtgccctgcttcccgacgccacttcttcccacaggaccgtggagtctggcctagaggtggcggcggcacccagcgtcaccccccaggctggcaccgcgctgctggctcctttcccaacacagagggtgtgctccaaccccccctgtgagacccacgagacgggcaccactcacacggccaccactgtcacttccaacatgagttcaaaccaaggtaagtgaaggtggccagcctggctttcatggtctcccagccccccaggctgaaaggccaagacaacgatggcgggggtccgtccagagtccaccagtcaggctccttggcacccaatttaccagtggggagagctggggcgtcctggctgtacctgaagcagacagaggtctccaggagcctgtcctgccttatctggccctccccttggtggtagaggaagcctgtggtggtcaagccaagtacaggccgggggggctcctgctgagcagccgcctgcctgtcgcccccacagaccccccacctgctgccagcgatcagggagaggtggagagcacccagggcgacagcgtgaacatcaccagctccagtgccatcacgacaaccgtgtcctccacactgacgcgggctgtgaccaccgtgacgcagtccacaccggtcccgggcccctctgtgccggtaagagcccagggggccgtgttcttccccgccttcccggcctacgcccgtgcagttccacactcagacgccagatgtcgctcttgtaccaggcatggggccgctcctggtcccttttccggaccataaaagggcagcctcggtgcctgctgcggcaggaggcaggagcctcaccgtcccccgcatctctggggcgcttttatttctgggactggttctcatcgcgtgtcacttcaccgcagcctgtataagacatggcgggggtctgagtgcccatttgtccaggccagggtgactgaggacgggttaaacctgaccgggggtctcaagggcctttctcctcatgctggtcagagaaccactgtcccctccctatttaacatgggctggagctggcccatcaagaatgaaaacttaggcccacaaggaaaggtgagggctggcttgcttctcagccctgctgcctggctctggcccctctcctcccctctgacaggggcttctctccctttctagaagatctcatcaatgactgagactgccccaagggctctgactactgaagtccccatcccggccaaaataacagtgaccatagccaacacagaaacttctgacatgcccttctctgctgttgacatcctgcagcccccagaggaactccaggtgtcgccaggtcctcgccagcagctgccgccacggcagcttctgcagtcggcttccacagccctgatgggggagtccgccgaggtcctgtcagcctcccagacccctgagctcccggccgccgtggatctgagcagcacaggggagccatcttcgggccaggagtctgccggctctgcggtggtggccactgtggtggtccagccacccccacccacacagtccgaagtagaccagttatcacttccccaagagctaatggccgaggcccaagctggcaccaccaccctcatggtaacggggctcacccccgaggagctggcagtgacggctgctgcagaagcagctgcccaggccgcagccacggaggaagcccaggccctggccatccaggcggtgctccaggccgcgcagcaggccgtcatgggtgagtgccggtgcaaccctggggaagccgggccgctcgggggagcaataggccgcggagacagcctgggaagaggagcccatttccctcgagggtggcatgagccagatgtgatggggaggacgagcacaggggaccccaggcaggccaagtagtagagactgccgtgtagaacaggctggctggggttagcgcctgggaaacaggcagggcccctcggccagggcttagcctacagtggagcacggtaggaggtggacggggtctctaggacaggctttgggggcctccgcccgggctgcccgcttctggccagccttcctagtaagtagtgtttctctcgaccctggagcaggcaccggcgagcccatggacacctccgaggcagcagcaaccgtgactcaggcggagctggggcacctgtcggccgagggtcaggagggccaggccaccaccatacccattgtgctgacacagcaggagctggctgccctggtgcagcagcagcagctgcaggaggcccaggcccagcagcagcatcaccacctccccactgaggccctggcccctgccgacagtctcaacgacccagccattgagagcaattgcctcaatgagctggccggcacggtccccagcactgtggcgctgctgccctcaacggccactgagagtaagcgactgagggcgaattggtgctggggtggtgggggcacccagggaggtgagggcaggacgggaggctcggtctcacttgggagccaggtttcccgagtctttcccgctgacaccttctttcttcctaggcctggctccatccaacacatttgtggccccccagccggttgtggtggccagcccagccaagctgcaggctgcagctaccctgaccgaagtggccaatggcatcgagtccctgggtgtggtgagtcgggtgtgttggggctcctgagtccgtggcctggggggcagcactgcctctaggtgctgagggcctgatctcgtcgcaccgattctgtcttgcagaagccagacctgccgcccccacccagcaaagcccccatgaagaaggaaaaccagtggtttgatgtgggagtcattaagggcaccaatgtaatggtgacacactatttcctgccaccagatgatgctgtcccatcagacgtaagtgtccccaggtgctgatgtcctcaggtgggtgggtcttggctccaccaccctgagcggggcttacaggaaactcctccatctttgggccaagctgagtagccaggaagcctgaggaaggtgggcagagaccatcccccctgaagcagtagaaaaggagagctttggttccttcccgccagtaccgggccacagtcagcctcgccacgtccctccttgccgtgaggggccagccaccgctgacctcttttccctctggcccatagttaccatggacctgcagtgttcctggggtggcccagagctgccttctccacagtggcgttcatgccactcctcttttcctaggatgatttgggcaccgtccctgactataaccagctgaagaagcaggagctgcagccaggcacagcctataagtttcgtgttgccggaatcaatgcctgtggccgggggcccttcagcgaaatctcagcctttaagacgtgcctgcctggtttcccaggggccccttgtgccattaaaatcagcaaagtgagtcttgctgtggggtggccgtctgtccctggttggtttctgcctgcctcagcacatgaggtggccgggggggggcataggagagctaggttttgagtcccagtttgtcttagtccttccacttgggggaagatctctttgaagctccttgaactaccacatggaatatctctactgtgttagaaaatggcttatgggaaccatgattagtcagttctggaagcctctagcctgttctgttgaccttctgaccccctggcttctagagtccggatggtgctcacctcacctgggagccaccctctgtgacctccggcaagattatcgagtactccgtgtacctggccatccagagctcacaggctgggggcgagctcaagagctccaccccggcccagctggccttcatgcgggtgtactgcgggcccagcccctcctgcctggtgcagtcctccagcctttccaacgcccacatcgactacaccaccaagcccgccatcatcttccgcatcgccgcccgcaatgagaagggctatggcccggccacacaagtgaggtggctgcagggtgagtgtccttcgtggagctcttcaggcacagggaaggcccaggaagccgggtgcagcaggaggaactgtcaccatctgagattttttcccatgtgcggcgtctccctgcttcctttggcgcgcacacagccccccacgggggtggccatcaagtagagcaggggacccagctccgggcctgggggtgcaggggacgccaccccaggatgtttgaggggacaagcagtgagagggctggcgggaaagtgtaggtttccaggcccgaaaacagcacgtcccaggtccctggagtgcagcaggtgagggatggaggccagcctgcctcctgtcaggtcatgctcctgctccagctcccctggggctctgggacctgggagggcagtgagaggtgggagctgagctgagtgggtttctaacctacgtccagaggggagtgagtggtgtcgtgttctggtcccaaggagtggcgtaaaaggtgaccacccatagggcaggcgccccacccttgccagctgcgggtcatgccatgtggcaccaagagactctgcaggcgggcagggcgcatgtgttccttgctctcgttctgtcacaatgctgctcacgcatctctcccgttccttccagaaaccagtaaagacagctctggcaccaagccagccaacaagcggcccatgtcctctccagaaatgtaagcaggaagcccctctcgggaaccttctgagactaggggtggaaatagctgggttcagcctcttgtcaaatgactgggggcccctaaccggccctgcaccagcagggcctccagtggtgcagggcccacactaactttctctttcctttttctgccttccaaggaaatctgctccaaagaaatctaaggccgatggtcagtgagaggaagctgactagcccctggattcttctccagacccccctgcttcaggaacacccgccagggcccacccctcccaccccgtcccagcattcgcacttcaccctcgcgagccgctgttcactcctctcccctttctctttctctctgtttttaaaataatctaaagaaagcacattttaccattgctgttgggaggaagcagaggcagatgggaaagcagagagaggagcgcgcttcctttcctccccgctgccgcccaccctggggagagacttttgcggggagggaaggcggagctgaggacagccagctccgccctcccaaggctgtgcgttcctgagggccaggtcgggggcaggcatggaggggaggaaaggcgtccctcttggccctccccagagtggctttcctggcaccctggcctgggtgtctggttctgttttcttttcttccccttgtgtttccagtcacctaacttcccttcctcaggctcccccggcccaccctgctcagtgaccccacaggaagcttacacattttctcagaggcctttgtgctcccacctcttctaccctccccctcttctttcccattttaaaaaagaaaagaaggaaaaagaaaaaaggggcaaggagccccgcggcggcctgggcagcgcctgtgcagacctccctgcaggccgcactgccaactgctgcatttgttgtgttttttaggttgcaattggtgaagttcacactttcattgtaattttagcgtgtggggttttgtcccttttttgttgttgttagctgtgtacagaatgtgtaatcttttttcttttctcttttttttgttttgttttgttttgtttttgtttttttacttttttcttcttggctaattcttggcagggatctttctggaggaaaagctggggccagccagggcaggagaggtgtgaaatctgccacgaggggcctgctgtttgccacccagcccaacttcctgttgctggcccctgccctctgcccttttgcctgtcctcaggccgctggaacaaaggaaggacagctcattcctcatgggcgatcactccgcatctatagggtcgagcctaggggagcttgagggagggctggggcctccttgtcctggatttccagctctccccatgccccctccctgagcaccaccggcaccgcctcccaaacagggctgctggtttccgcagccactgctccacctcccccaaatcgtcatggaaagggtggagaatggaggggaaccaggcgtccttggaggcagcttgggagggtgactgtgtagtgtcacccacaagggaggctagggcaatggagcaggccaccagcagcagctgtgcagcatggaactcaggccaggctccgaggctgggggatctgcttggagttttctgccccccaccccaaacttctgtcgaggagcaaggcttgccagcaagtcagaaggatttgaaccgagcagccaatctttccagccctcccctaccgacctctgcctggagacgcagcagcctgtgtcctccagggcctctggtttgttgtattatagtatatttcgctgtggaaaatgtcacgtttagtcaccttggagcccactcacctggtcctgttgttttaccccatcccttctctcgcgcgcctattgatttgtttctgaggagagtacaccgttcactattgtagagtaacccctgtgactcaatattaccatagtgcgatgtcgttttgtgctattttgaacaattaaaagactttttttgaaata

SEQ ID NO: 675 - DNA, 13047 bp, Homo sapiens
  source 1..13047: mol_type = other DNA
accatctatgctccgagcggggtagagagcccttacgaacgcttgggccttccggaagttttccacctagggctgtctcggtatttttaaattcttgcactcgagtcactatttaagctcctccaggaatgggtgcagcttccctttgtgccttcggccttcttgtcacctttgccacagcctcccccaggtatgcaatggtacagcccagcttcagattgggcaccaaattaggacaagccgaagcggacgagcccttcgtttcttccggttctgtacccccatcctttctctcgcccctcctacccgcagctcctggcgctcggcggggctaactgcagcgcggagatctcggccgccaagctccgcctcccgccccgggctgtgccccggggctcgcctgaggccgaccacccgcaccccacctctagcggctttgctcgaggcccaccttcttcccacccccggcaaactccagtaggctcgccctcgctgactccccgcccccgcgtcaactgcaaggggcccgcccatagccagttccggggcggttgctcacatcgaccggaactccccgccccctcccgcggcccctggggccgtaggaggccgcagcgaggaggtagagggggcgggggtcgcactagggtgtccctagagaacgaggactctgaaggcgggacatttgggcgacccccgggcggggccagccattaaacagtcccacttctgtgccagacactgaactgggctcttgacgggcatcatctcttaatcctcagaacatcccagggaggtaggtactattgttatccccatttttcagattcagacttttaatggggaaacagaccgagacttcttttgtccccattttacagatggaaaaactgagactgaaaaaggtcaaataacatgttcaggggcatataagtagagaatggtaaagcctgggcttgaacccaggtctgtctggcttaccagcccacgttctaaaccactgttagtgactagagaagggagaaaggtggaatagggtaagaaaagaggccaagagtcccagagaacatggtaagaatggggtgcttggaactcaaagtcttagcagaacccaagagaaatagaagggaaggaaagagcatcagaaaggcgaggcaaggcatagcagtatagcatggtgatcagggtgcagactcaagactagcggggttcaaattgcatcttggaagcataggcacatacccacccttacagagtctcagtttctttctctgtaaaaacgagatcacaatggtccttgttcatggtgctgagtgagaaattcagtgagataaactgataaagtgctctgcacctagcttggtacccagttaagtgccctgtgagtaggaactgtgccatcaattttgtcagtaagggactgaagctgggcttccttgaggctgtccctggaggtaagaagcccttgggcttttctcagaccactttgtctcccatcaatggccctgtcctctccagctccacaggatccccatatcctgggccatgagtgagttgaaagactgccccttgcagttccacgacttcaagtctgtggatcacctgaaggtctgtccccgctacacggcagtgctggcacgctctgaggatgatggcatcggcatcgaggagctggacaccctgcagctggagctggagaccctgctgtcttctgccagccggcgcctgcgtgtgcttgaggccgaaacccaggtgataaccccagagaggggccagcaccagagatggactgcaacaagttatgggatgggtcattgagttagccccatatgctgagacttggggtacaggggtttgtggggagagggagagagacgcaaactgggtttgcatgacacaaaaaatacacaagaatatgcatgatcctcttaaattgcaagatttctaattcagtaagcttttattggcaccccactcatcccccattgtgttctgggtcctatgctagtcattagagaaaggtaattaggacagttatggctgtcagggagcttggcaactaggaaagtgagaaagtcaagtacataccaggtgatgtgatgttgtggttagcagtcctagggaactggaatggggaaacctggatttgaatcctggcataagcgcttgctagcattgctgtttcctagctatgtgactttgagaaagttgcctcatatctctgagtgtcagtttccctatctgcaaagtggggtgaataataggacctaccttagtgcttttgtgaggattaaaagagaattttttgcaaaaactcagcccaatgccagacactaagtaagtacttcagatgttatttatttgctactctgatgactttattcactgcataaagatgccttgagccttgtgtgccaggcgctatgctgtattctgcaaaatagagatggttaaggtgggctttctggtcctcagtagcttatggtctagttgaagagacaaggtgtgatggtcattccagtgtgaccaaacaacacgattgggtgcacgttggagctgtgaagtgccagagacttgtggaggaaggaggtgccaactggacctaaaaggatgaatggaattaacttgtccctgggaatccatggaccctccttgaggaaggctatgactcaagttgtattttagcatctaagaacctgggtaactgattgagagaaggcatctcagtagtggtgacatcgaagtgaaggtttgctgagaggactcttctgttaaacagtatgtgactggcatgggtgatacagaagtgaatcagtatagatgaacaagtgaatgagattatgagaagtatatgaataaagttctaggaggccaggcacagaaaatgagctgaattttgaaggatgagtaagagtttactaggtaaaaagaggatggggaaagacccaggagcctctgtagattctagatcctaatttattcactagaggaaagagatattctgtgttttcccttctccccctcagtgacactttctgtaaatttcagatcctcaccgactggcaggataagaaaggtgacagacgattcctgaagctgggtcgagaccatgaacttggagctccccccaaacatgggaagcccaagaagcagaaactggaagggaaggcaggacatgggccgggccctggcccaggacggcccaaatccaaaaaccttcagcccaagatccaggaatatgaattcactgatgaccctatcgacgtgccacggatccccaaaaatgatgcccccaacaggttctgggctagagaacatagaagggggcctcaaggttctggtggtggaggcactggtggggcaggggcgcccactcaggatctgcttctccctgcaggttctgggcttcagtggagccctactgtgctgacatcaccagcgaggaggtccgcacacttgaggagttactgaagcccccagaagatgaggctgagcattacaaggtagaaactctgggccttgatagacatgatgcggaacaagagagttcagaggtgcctgagaagtaaagctaccaaagccatgcatcatcttccttccccaaccctgcccagtctgctgtctgctccatcagtgcctccagacacctaggcccaaactcagctttctccgtgcactgcctcccctctaccccagccaaatgtcaacacgccctcaagcatctacttaagtgaagtctgcccatgttcctttatccccatcccctctgctttggtccaagccttcatcaacttctatccaaacagcctcttaactctcttcctgtttcgaggcctctggaggaacctttcttctttctttaagatataaaacttgggctgggagcagtggcttatgcctgcaatcctagcactttgggaggccggggcgggcagattgcttgagctcaggaatttgagaccagcctgggcaacatggtgaaaccccatctctaccaaaatacaaaaaattagccaggcatggcggtgtgcgcctgtagtcccagctactcgggaggctgagtcaggaggatctcttggacccgggaggtggaagttgcagtgagccgagatcacgccactgcactccagcctgggcaacagagcaagactccgtctccaaaaaaaaaaaaaagatataaaagtcacctcacgcctgtaatcccaacactttgggaggctgtggcaggcagatcatctgaggtcaggagttcaagaccagcctgaccaacatggtgaaacgccgtctctactaaaaatacaaaaattagcctggcacggtggcatgcacctgtaatcctggctactcgggaggctgagccaggaaaatcacctgaactggggaggcatcggttgcaatgagccaagatcgtgccactgtattccagcctgggtgacagaaggagattccatccattaaaaaaaaaaaagccgggtgcggtggctcaagcctgtaatcccagccctttgggaggccgaggcgggcagatcacaaggtcaggagattgagaccatcctggctaacacggtgaaaccccgtctctactaaaaatagaaaaaattagccgggcgtggtggcgggcgcctgtagtcccagctgctcgggaggctaaggcaggagaatggcgtgaacccgggaggcggagcttgcagtgagctgagattgtgccactgcactccagcctgggtgacagagcaagactctgtctcaaaaaaaaaagaagatataaaactatgttttaatgatgaaaataaataaaacatgctccattaaagaaaatttagaaaatacagaaaaatgttgagggagaatcctcccataggtgagctgtcatgatcagatgtgctcatgacatggcgctgcatccaggcctttcttcctcccgttatctacaggatcaagtccacgcatcccagtccttgctggcacagctccagtgcccctctccattttcctcggccatatccctcttcattgccgtgttgaccagtcccaccaagtatctcgccctcattccaggacaccacagcctcctcgctggtctctgggcctctggcaagctcttctctccctcttgtctccttgacagacttgactcacccttcaaggccctgatctcatgttacctccaccaaagcactctttcagattccccagcagaaagttagtcagtctctcctttgtgctgccacaacactttgatctctctctttcacttcacttatctgatttcttaaaaatttatctgaaaaagagttcatacagacagcagtaaattcaagcaatacaaaaggtaattccctgtcacccgtgacctgaaggctcctaattctctcgagaggcaattgctgtgacctgagacaatctgtgtacgtattctgcaccttctatcttgggaattatttcagattggcttctgtgtgtgtgtcttagttctttttggacctgtctcccttactagagtgtgaagtacaggttttatcttcgttgtactttcttacctacacctgacactgggcttggccttggactagggacttgagagagatataagataggtaagtgaatgaatgaatgaagcatggctggccagtgcttacccactcagggttgggtgccatcttttccacagatcccacccctggggaagcactactcccagcgctgggcccaggaggacctgctggaggagcagaaggatggggcccgggcagcggctgtggctgacaagaagaaaggcctcatggggccactgaccgaactggacactaaaggtaggcctctcacctccctgccaaccccaggtcaggacttgaattccagaacttcagcccacctcccctcctttcctgtgcccgcttagatgtggatgccctgctgaagaagtctgaggcccagcatgaacagccggaagatggatgcccctttggtgccctgacgcagcgcctcctgcaggccctggtggaggtgagcagcctaacccaaaagaggaaccatatttactttgtgttttaatgtgttatgcttattttttatcggaatttatcatacatttattaggttggtgcaaaaataggttggtgcaaaagtaaaaacctggactaatatatagcaaaagattgggaataatatataacttgtgcacctaatagaaaagtgcacagatcataaatgtacagttttcacaaatgagcttgtattaccagcctggagattacaaaatgaaacattactatatcctagaagcccctctcatgcccctgtttttctccaactttccccaaaggtagccttactccacaattacttttgctaagcatctgttggaggggctttatacacatcctcccactggaggccaggacagtggttaacgctgtgttacagataagaagattgaggctcagaaaagggaactgttcacttgaggtctcacacaccaggattcaaaccctagcttcaggggccctgtctttatacctgctggttgaccttagacacaccctcacactctttcacctcattgagactcagttttctattctggctcaaacacaagagtttatctcatggaacagtctgggtacatgttgcaggttatctaaggtaggggaaggggcaggtctctatctcatatcatcagacagggaccccagctgacggtggccttgcagtctgcacaaggtcactctgggcgtaattgtcactccagtcccacagaataagagcaaggaggccgggcgcggtggctcacgcctgtaatcccagcactttgggaggctgaggcgggcggatcacaaggtcaggagatcgagaccatcctggctaacatgatgaaaccccgtctctactaaaaatacaaaaaaattagccgggcatagtggcaggcgcctgtagtcccaactacttgggaggctgaggcaggagaatggcatgaacccaggaggcggagcttgcagtaagccgaaattgtgccactgcactccacagcctgggtgacaaagtgagactccatctcaaaaaaaaaaaacaaaacaaaacaaggaggagtgtgtgaaggaaactttttggcccatgcctagctatggctcttatctcttctgatcactttcccctggagagaacttgtcacatgaccatacccgcctgcaagagagcctgggaagtacaactggacaggcattgcctagctgccgtggaggaaagaagagtatggcattcggacagctagcatctccgccacagcaggcctagcacactgcctggtgcgttgcagacgcttcacaaaccttagctgttcattaccatcattgagtgttaatcatttctcttctgtgttcctttttcttcacatcagtacgaaaataaaagggatttctagaatgatcaaagcaatttgggattggtatgggaaggcttcccacggtaggtgggatgggaaagataaaaggatatttctggtgtttgaagactgtcagtgtaggtcagaaaggagcaggaaagtggaacagctatttttccttccactcatttttgtggtcttctaggaaaatattatttcccctatggaggattctcctattcctgacatgtctgggaaagaatcaggggctgacggggcaagcacctcccctcgcaatcagaacaagcccttcaggtgagtggtgtcctatccacaacccacagtctggcccccgcttctgttggcttctctccatctcaacctggggaagtcctcatcagtaagaggctgggggcagttaggtgaagcctaatagcagtctcaagtgtgagtgatgacccagcgtgtctgcatgcacagactgagtgcagggttgttcagcacagaactgttcataccataaataacccaaatgtcctgctgaaggggaatggttggctaaattggcataactccatatgatgaaataacttggggctattaatcatatagctgcaagtatagagaaatatagttaaatgacatgaaaagatgtaaattatagagtgacaagtggagaaaatattagttgtagcccagtatggatggtataatactatttttacttaaaatatatttctttttttctttttctttttttttttttgagatggagtctcgctcttgtcgtttaggttggagcgcaatggcgcaatcttggctcactgcaacctccgcctcccaggttcaagcgattctcctgcctcagccaccaagtagctgtgattacaggcgcctgccaccatgtatggctcatttttgtatttttagtagagacggggtttcaccatcttggccgggctggtcttgaactcctgacctcaggtgatcctcccacctcggccttccaaagtgctgggattacaggtgtgagccaccatgcctggcttacttacaatatatttaaatatgtgcacataagggaaaaaacctggactaatatgtagcaaaagattaggaataatatataacaaaatctggaatatatataataatatataacaaaataatagtaattctctctgggttgttggcattatgggtttttccatattttttgaatagtagatacatacgttgcttgttttaaaaaccagaccagatgtgtctgtccctccctttgtatctggatagatacagagggggtgcccaaagggaaaggcaggttttcactgaccttgggaagccctgggaacctccaaggtgggcccttctccaagctggctcttgagtctgacgggcctgcctcccgctgcagtgtgccgcatactaagtccctggagagccgcatcaaggaggagctaattgcccagggccttttggagtctgaggaccgccccgcagaggactccgaggatgaggtccttgctgagcttcgcaaacggcaggctgagctgaaggcacttagtgcccacaaccgcaccaagaagcacgacctgctgaggtgagcgttagcaggatgcacagtcccgggggtggccttggaggctgtggccacggctagtcacctttcaggggttttacaacaggctttccaatcctggctggcctctaaatcacctggagagcctcgaaaaaaacagcagtggccagtccaccgggtatgtcccaaacaaattctgattccacagagtggggctcaggcatctgtgactgaccgattgatttgatttgtttttgttttgtttttttttgagagggagtctcgcactgtcacccaggctggagtgcagtggcatgatctcggctcactgcaagctccgcctcccaggttcatgccattctcctgcctcagcctcctgagtagctgatactacaggcacccaccaccacgcccagctaatttttttgtatttttagtagagacggggtttcaccgtgttagccaggatggtctcgatctcctgacctcgtgatccacccgcctcggcctcccaaagtgccgggattacaggcgtgagccactgcgcctggcctagtttggttttttaattatggtaaaggcataatataaaatgtatctccatgggaggctgaggcaggagaatcagttgaacctgggaggcggaggttgcagtgagctgagactgcaccattgcattccagcctgggcaacaagagtgaaactgcatctcaaaaaaaaaaagaaaaaaaatttacgcttcttaaccatttttaagtgtacagtttagtagtgttacccatattcacattgttgtgtgatttattttttgtcttttcatgcttcttttctttttatccccaaagttttgttattaaaaatttgatacacacagaaaatctgaaagaatcatacaataaacatcagtatattctccacctagactaattaactgttaacattttgttggagatctgtgatttttatttgctcatcacaagaaattgaccagtgttttaggacatgttcttttgggaatccatcacagtgcctgccattcatttgatgtcaactcccatccatcttgttctgcattgatcacgagggtataggtgacatcttgaggaagactgtggaatagctaccctttaggtaaagagatagggaagcaacccgaacaagtctctttgcttctcacagacaagtgctgtgtcttaacttcatagagccctgacaggacagggcacattcattcatttggccttttttttttttttttgagacggtgtctcactctgttgcccaggctggagtgcagtgccatgatctcggctcactgcaacctccgcctcccgggttcaggcagttctcctgcctcagcctcctgagtagttgggattacaggcatgcactaccatgccaggctaatcatttggccattcttactgtctcttagatattgtgctgggggccagcaagagaggcagagcaagggacttgcagattactagcagatgatcagtaaagataagtgccattaaaaggagaggtagttgctgacaagctgccagggtatttaaggataagagtgactaatgtatgctgagggcctactgtgtgtcaggggctttatgtacactctctcaagtgtcttgacaacaacccaggagggaggagctattttcgttgtttaccagatgaggaaataaaggcccagtgaagcgaaatgctctgctgaaggtcacacagtcaataaacagcaagctgagacttgaacctgtggttgaatcaaagcctctttctataatagtttgttttctctgaaaggtgagaagaagaaaacacagatggaagaggcactgagggaagcagagggagagagaggaagagagagaaaagcaggcatgtgcagttacagaagtagtgggccctagctgggcctggtggctcatgcctgtaatcccagcactttgggagactgaggtgggaggcttgtttgagctcaggagttcgaaactagcctgggcaatgtagtcagacccccttctctactaaaaatttttaaaaatcagctaggcatggtggcacatgcctatagtcctactcaggaggctgatgtgggaggattgcttgatcctgggaggtagaggctgcagtgagcttgatcaggccactgtactccagcctgggtgacagagtgagacctgtctcaaaaaaaaaaaaaaaaaaaaaaaaagaagtaatgggcaatgaagaaatggcttgcagctctcaggaaaccagagcacagcccttaccctgctgcagagcagctgcaaggccttaagcagcccctgacctgagcatctccttccccttctggaaaactggcaggctggactcaatcactaagtgaccttccagctccaccatcgatgaaatgtataaatcagaccctgttcagagagattgatctggtgtctcacccacctcctgtcagcctcaggctgcctagaccttagggggctctggaatgcagatgccgacgtaagcaggccttctgctggcaccggaacacctgaaacaacagtgtttaaaaacaagagtttggccccagcctgctccagatctccccctcactaactgtgggatcctgggatcatctttgagcctcattttcctcacgggtaacatatgaataatagtacatattttgcagggttgttaggattaactgaaagacagagagagagagtgggtgtgcctgtgtgtgtgtgtttgtgtgtgtgtatgtatatatatatatattttagagacagggtcttactctgttgccgaggttggtctcaactcctggcttcaagtgatcttcctgcctccatctcccaaagcgctgggattacaggcatgagctactttgcccagcctactgtgtatatttttaagacctttttttttttgaagacacagtcacgctctgttgcccagactggagtgtagtggcatgatcatagttcactgtaaccttgaactcctggcctcaagcaatcctcagctcccttggagttgggactacaggtgtgcactaccacacccagctaattttttaaattttttgtagagacagtctcactatgttgctcagactggtctcgaactcctgggctcaagtgatccttctgccttgggctcccaaagtgctgggactgcagatgtgaacccccatgtgcagccaagactttattcttctagagcagttttaagttcacaacaaaattgagagaaaggtacagagaattcccgtatctccctgtccccacatgtgcacagcctcccccgtgatcaacatgagttaatatttttcaggagcttaagatagtgccatgtaagtgtaggtcagtaactgctttttggtcacgactgtatgacacaatccacaggcatgccagcctgggctggtgggtaggctcggtcttgaagagggaggggttgttctctggaggtgggctgaccctggcacctggctggctggtccccacaggctggcaaaggaggaggtgagccggcaggagctgaggcagcgggtgcgcatggctgacaacgaggtcatggacgcctttcgcaagatcatggctgcccggcagaagaagcggactcccaccaagaaagaaaaggaccaggcctggaagactctgaaggagcgtgagagcatcctgaagctgctggatgggtagccctcacccctgcctcaggctgattatctggcctaggggaggggaagggaggcccacttccttctttgggcacaggaaacattggcctgtggctgtccctcaaatggcggcagtctctagagggccgtggcccttcccctgaggtcttttggcctagctctgtacaaccaggacacaggaagccctgctgggctagcctgaggcctagtctctgcttggtccccgagatggggttggaggggacttcgtttctgggtcttcctcttcccctctttaccatcccccactccctaatcccctacccctgtctccccttcaaggacttctcccttgtggttttgtaaagtgcaaacttaagaataaagtgactgctgtggtttttcaaaaaaagc

SEQ ID NO: 676 - DNA, 32742 bp, Homo sapiens
  source 1..32742: mol_type = other DNA
tgtgcggtcacttccggcccgggagcgcgcgggttgattcgtccttcctcagccgcgggtgatcgtagctcggaaatggcgggtaagttaccgggaaaagtttaccaaggggaggaggcggccagatcggggatagaacgccgagacggtggtgacaatgcccgcctagaactttcgggctgtagcctgggttccagaaggcctgcttgggaccggaagcgcggaactctcagcccagcagctccttgttggcggcggtccgcgcccccgcccccaactgcttggggttctgcgccttctgccagcaatccggcccctaccgagggccgaagacgccagggaaaagcgtcatgatttgggctcgtaaaatgccacatgccttggggcctgtttctcttcccattccttttgtccactgctgcttgcttcagctcttgtacatctggtcctgttcccgccagctgattttaatgctcagatcctcctcctcttccaggtctccgtctaccttccactacagtcaacttctgagctagcgcattgctgccttgccctgctctggcgctcccacttggatctcgactgacttcgtagtcgtctcgttaatctgtcacactttagtattccgaggatcgtatttagatgccctttgagaaagactttgttcctgaactgctcccttctcttttagggttggactactataatacaattctcttgtgtacattctagagacccttcaagttacaacatttaataatgtataattgctattactttgtacgtgtattaaggctgttttggtgtgattatttttttcgattacttatcttttgaagttatggacagtttctttttcctgagacagggtctctctgtcgcccaggctggagtgcagcgatcatagttccgggcagcttccaactcctcgtaggctcaagcgatcctcttgcctcagcctcccgagtagctaggactacaggcatgcgccacaacattcggctaaaaaaaaacaattttttttaaccttttagagacagagtctggctgtattgcctcaggccggtctggaactcttggcctcaagccatcctctcgcctcagcttcccaaagtgttggaatgacaggattgagccacttcgctggcctttgttgcttttatcatctctttacagggcattcctcatagtctctctacattaaccattccatttttatgaatatgtgggatagacaagctgttgtgtgagctctacagatgtttaaagaaggacttttctaccagatggagattgtaggatcttgaagtaccacagaagagggaggacgtactctaagaattacatctaaattcgaattttgggcccatcatttagtagttggatgcccttcaactaaacctctttctaagcctgaacttttgaatgtaaaatggggttgatgtaatacctacttatagaattgtgcagattgagctaatatatgatttcacaggttaaattttgttgcttacattcctcgaagtaaattctgtaatctcggttctgtagattagggtcagaggggttaagtaatgtgctctagttccctgagcttactagctcagtaagtgtgtgaaatagtcagaatccaggaattctcactccagactattaatctgtactgcttcaagtctttcccattttctgtgtgtgtgttttaacccctttttgaagtttatagcacatcattgtacccctttttattttttgcttatggcttttttctgtctgaatttttactgattttttttttttttggagactgagtctcgctctgtcaccaggctggagtgcagtggcgcgatctcggcaacctttgccttctggattcaagcaattctgcctcagcctccggagtagctaggactacagtcacgcgccaccacgtccagctaatttttgtatttttagtggagatggggtttcaccatgttggccaggatgatatccgtctcgacctcgcgatccccctgcctcggcctcccaaagtgctgaaattacaggcgtgagccaccgcgcccagcccatttttactaatcatatgcccattttgtcaggagatttgttatcttgaaagtttctcttgatagtgatatcttccaatgttatttattatgtatattattgagtagccactatgtagtaaaactattgtgccagtagctcacagtttatgactttaggcatacatgatttttaaatatttaatacagtggaaagatgttttctttgtgcccctgttcctcttccttctttctttacccatggtaactatggttaccagatatttgtgtattcttcttgagacattccatgcattatcatttccttatctgaagcactctggtagactttttccaatacttaaaatgaaattctgtcataattatcagaggacattctcattttgctttttacatcttataatgaaaaagacgacttaggtataaatcctagcaggtaatttgtattagtacatgttcagaaatgttagtaatctatcatgttaattttcaggtttattcatttatattaagtattcctagtttataagcctgtatctcaaaagtgatttctttttctgttttgtaatgaggcattctttttttttttttttttttttgagatggagtcttgctctgtcgcccaggctagagggcagtggcatgatctcggctcactgcaccctctgcctcctgggttcaagagattctcctgcctcagcctcccaagtagctgggattacaggcgcccgtcaccgtgcccggctaatttttgtatttttagtagagacgggtttcaccatcttggcgaggctgacctcgaactcctgaccttgtgatccacccacctcagcctcccagagtgctgggattacaggcgtgagccaccgtgcccagctggcattcttaatacatttatttaagagtatgtggagaatgacttgtgcttttatgatctatcagcatgttttaaatcatacccctattccacttataataaccctattgcaggtttgacaatttaagtcacttccaaactaaaccttttaaaaaccttttctcttaggatttggtgctatggagaaatttttggtagaatataagagtgcagtggagaagaaactggcagagtacaaatgtaacaccaacacagcaattgaactaaaattaggtatgtatgccatttctaagtgatgttatgtacatactgtgtgtgtatatataatctttcattttaaatttgaagtaaaattttatgtaagagcagttatttatgcaaatgtatggttttctgcatttattgaacatattcagattttattcagttttgatttatgtcatggaaggtgtagatgtttgaaaggtgacagaattttatataaaaaggaaagacggtggggcaaaaagtaataagtatatatagttttagcctcttaaaaatattttttacttttttgcctgtaagaataataaacaatagcaaatattggtgaggatgtggaaaaaaacacttgtatattgctggtgggaatgtaaagtgatataactattttggaaaacagtttggcaattttcttttctgtcttttttattttctttccttccttctcttctttcatttcctcccctcaccccttttttttctttctttcttttttaaagagacaaggaaggtctcactctatcacccaggctgtagtgccacggcatggtcatagctcactgctgcctccaacccctgggctcaggcagtccttctgcctcagcctgccaggtagctaggagaccacaggtgtgcaccacccaagcctggctaatttttataaaaaattttttttttgagacggagtttcactcttgttgcccaggctggagtgcaatggcgtgatcctggctcactgcaacctccacctcctgggttctagtgattctcctgcctcagcctcccgtgtagctgggattacaggcatgcgccaccacgcccggctaattttttgtatttttagtagagacggtttctccatgttggtcaggctggtcttgaactcccaacctctggtgatctgcccaccttggcctcccaaagtgctgggattacaggcatgagccaccacgcctggcttataaaaattttttcatagagatggaccctacgtgtctatgtgtccaggctcatcttgaactcttgtcttcaagcagtcccctggcttggcctcccaaagtgttgggattataactgtgagccacagcgcccctcctggtttgacagtttcttaagaagttaaacataaatgaattatatgacccaggagttatactgccaggtatctgtctactcaagagaaatgaaaatgtatgttcacgcaaaaacttgtacatgaatgttcatagctgcgttattcacagtagccaaaaaaatgtaagaaacccagatatatatcagctggtaaatgaataaagtatagtatagctataccacggaatactatttgacaataagaaggaatgaaattctgatacctattgcagtaaaccttaaaaagattgtgctaagtgaaagaaactaaacaaaaacaccatatattgtgtaattccatttgtatgaaatgttcagaaaagacacatccatagagacagaaagtagtggttgcacagtggagcgcagagtaactacaaatgggcctgacatttcttttgggaattatggaaatgtttgaaagttagattgtggcacagctctgaatttgctaaaattttacacttagaacaagtgaaaaataatatatgctcatgattcctggttgcattactttccatgcctgagtttcctcattgttaatagtacttcacagtggttacaaagattaaatatggagttaaatatcagtaaagtgtttaaactccttgacatgcagaaaatacttggtaagggctgagtggagtgactggatgtggttgctgagatctgcgtattttttttacatgtcccctcatttttcaattacttcattctttgatagtttgattaccttggaacatcctgtcatctgttgtctctgccccagccttggaatcagccatttctccaaggatccctggtttcttttagtaggaaatgttattttattttattttagagacagagtctcactcagtcgcccaggtagagtgcagtggtgcgatcttggttcactgcaacctctgcctcccagattcaagtaattcttgtgcctcagcctccgtagtagctgggattacaggcatgtgccaccagccctgggtaatttttttgtgtttttagtagagatagggtttcgccatgttggtcagtctgtctcaaactgaccaagtgatccacctgcctcggtctcccaaagtgctggaattacaggcatgagctactgcacccagccaggaaatggttttttattttgagatggagtctcactcttgtcacccaggctggagtgcaatgacgcggtcttggctcactgaaacctctgcctcctgggtttaagtgattctggtgcctcagcctcccaagtagctgggattacaggcacccgtcaccacacccagctgatttttgtatttttagtagagacggtttcatcatgttggccagactggtctcgaactcctgacctcaggtgatctgcccaccttggcctcccaaagtgctgggattacaggcatgagccaccacccccagccacaggaaatgatattttaaagccaagattcgggtgctaaagccaagatctaggtgctaggtgaacacattgctgttagtattgctctagcattaatgagagcaggcttagtagatagaactttattacttactgttcagtccctgccacctgcaaggtgactacagtctcatttctttgaccaaaattagctttctgtgttctagcactttatataaatggaattataccatatatactggctttgtgactggcttgtttcattaagcataatttttatgaggtacatcatatgttgtctgtaccagtagttcattccccattttttttgttgttgttgtttgagacagagtctcacgctgttgcttgggctggagtgcagtggcatgattgcggctcaatgcgatctccaccttctgggttcaagcgattctcctgcctcagcctctggagtagctgggattacaggcgcctgccaccacgcctggctaattcttttgtatttttaggagagacggagtttcactatgttggccaggctggtctcgaactcctggcttcatgatcgcctgccttggcctcccaaagtgctgggattacaggcgtgagccaccgtgcccggcagttcattcctttttattgctgaatactgttctgttgttggatacatcattattcgccagttaatagatatttgagttgtttctagtttttggctgttattgtatgagtttttttgtggacatatgattttattttggataaattcctagctgtggatttgctgggtcaatagggtatttgtatgtttaactttatgggatacttggccagactgacttccaaagtacttttatactcacatcaacagtgtattagaattttcgttattccatatcctcaccaacattttatgttgtcagtttttaaagttttaggcattctactgggtttatagtagtatttctttgttaatagtacttcatagtggttgtaaagattaaataggttttaattgtcttttccctcataactaatgctattaaggattgtttttttaatgtggttatcgactatctccttttggactcatgtattcacatcttttgcccattttaaaattaggttatttgtctttttgttattagttgtaggtgttatttacctacatattctggatgagtcctttatgcagattacatgttttgtgcacatttttctctcagtttgtggtttgcctgttcatattctcaactttttttgtataactggaagtttttagttttaatcatgtccagtttattaattttaaaaatttctattagtgttttctggttcatgcctaatatctttgtctaccccaaggagatcatgaagctctcctaatgttttcttctggaaggtttttagttttagcttattaaaattatgtccatgatccatctcatgttatttttcatgtccaatatgaggaaagggattaaggtttgttgttccatgtggatatccacttgtttcagtataatttgtgtgaatgccttggtgcgtttttaacaaaaaaatattgaacttacacgtgtggatctacatctggacttttctcattcattgtctgtttttctgtcaatatcgtactgtctggattagtgtaactttctattgattcctggtagtgtgagtcccacatctttattttttaaagattgtttcgattattcttgaccttatttctgtatacattttggaatcaggtggttaatttctatttaaaaagttctgactaatcttaagattacattgaatctaaaattgaatgtggggagaattgctatcttaataacattgagccttccagtatatgaacatgatgtatttctgtattctagaaatgtttcaggttttcagtcttgcatgtattttgttaaatttatctgagtaaatctacatcttttgatttttgatgctcttaaaaatggtatacttttttatttatttatttttgtatgtgtgacatgttctcactttgtcaccgaggatggagtgcagtagcgtgatctccactcactgcaacctctgcctccgagctcaagtgatcctcttaccacagcttcccgagtagctgggactccgcatacaccaccatgcctggctaatttttgtattttttgtagagacagggtttcgccttgttacccagactggtcttgaacttctgggttcgagtgatctgcccacctaggcctcccaaagtgctattacagatgtgagccactgtgcctgacctaaaaatgatatactttaaacattttctcttccaattgcttgttttatgtgtgtgcatgtgcatatgcatggacacacaatggcacagtttgtgtaattgttttgtattctgcaaccttgctaaattcacttattattgtagttttttgtattctgggctttttctgagagagtggctcactccattgccaaggctggagtagagtggcgtgattgtggctcactatagccttgacttcccaggctcaagcgaacctcccacctcagcctcctgaatagctgggactataggtgcgtgccaccatgcttggcaaaatttttttttttttctagggacagggcctcactatattgcccatgctggtcttgaactcctgggctcaagcaatcctcttgcctcagcttcccaaagtgctagggttgcagacataagccaccacacccagctataggatttttttttttagatgtagattatttcagatttcctgcacacaaacattacctgttaatgaagaaagtcacagtttttctttgccttatacagttgtccattggtatcttcagggatttggttccacgatcccccgtgaataccaaaatctgccgatgatccggtccattatacaaaatgccatagtgtggctgggcatggtggctcacatctgtaatctagcactttgggaggttgaggcaggcagattgcttgagcccaggagtttgagaccagcctgagcaacatggcagaaccccatctctacaaaaaatacaagaattagccaggcatgatggtgtgcatctgtagttgctactcaggaggctgaggtgggaggatctgcctgagcccaagagttctaggctgcagtgagctgtgattgtgccactgcactccagtgtgagtgacagagtgagaccctgtcttgatagatagatagccatatagccgggcatggtggctcacgcctgtaataccagcactttgggaggctgaggcaagagttcgagaagacaagcctggtcaacatggtgaaattccgtctctactaaaaatacaaaaattagctgggcgtgatggcacacacctgtaatcccagctacttgggaggctgaggcaggagaattgcttgagcccaggaggtggaggttgcagtgagccgagattgtgccactgcactccagcctgggcgacaaagcaagactgtgtctcgggggggaaaaacagccatatagtacagtcagctctttgtatctgcagattctgtgtttgaggattcagccaatctcatgttgatccgtaattggttgaatcagtggatgtggaacctgcatatgtggagagccacttgtgtttcattttcttgccttactgcactggccagaacctctattacaatgtcaaatggaagtgatagagtagacatccttgccttattcccaattgaagaaggaaaattttgagcctttcaccattcactatgatgttagctgtaggtttttcatatgtgccctttatcaggttgaggaagtttccttctattcctagtttggtgagagtttttattatgaaagtgttaccttctaatgctttttctttatcaagataatcataagatttttctcctttaattctgataatgtggtgaattacattgatgaggttttaagtgttaaattagccttgcatgccagtatattatcctttttctgctttgctagatttgacttggcaatgttttgttaagactctttgttcatgacaggtaatggtttcttttttcatacgtctttgcttgattttggtatcaaggtttcctggcctcataaaatgagttgggaactgtttcttctctatcttctggaagaatttgtataagactgcattattcctttaaatgttcagtagcattcaccagtgaagttttatgtgccttgagttttctttgttggaaggtttttaactatacatctaataaatagatttaatactgttctgatcttctgtttcttcttgtgtcagttttggtgatttttgtcttttaaagtatttctctattttatctaactttcttggcagaaagttgcttacagtattcccctgttaccatttaaatgactgtagagcgaggtgcagtggctcagacatgtaatcccagatctttgggaggccaaggcagaaggatcgcttgagcccaagagttcaaggccagcctgggcaatataatgagatctcaacaataaaataaaatttaaaaattagccaagcatggtggcatgcacccatagtcctagctacttgggaggctgaggtgggaggatcacttgagccggagaggtggaggttacagtgagctgcgatcatctcactgcactccagtctgggtgacagagccagacgctgtctcaaaaaataaaataagtgactctagaatctataatcccttcttgggggtattggtaattctttttctctttgtcttttaatgtctccttacaagtttaccaatcttactgatcttttcagcattgcctttgtctgttatttatctgttttcttaatctttataaattctttcatcttactttgggttaatttttttattccttcttttgagacaaggtcttgctctgttgccgaggctggagtgcagtggtgtgatcatggctcactgtagcctcaacctcttggctcaagtgaccctctcacctcagcctcctgagtagctgggactacaggtgtacaccaccacacttagctaacttttgtattttttttgtagagatggagtctcactgtgttgctcagggtggtctcgaactcctgggctcaagtgatcctcctgccttggcctcccaaagtgttaggattgcaggcatgagccaccttacctggtctaatttgctttttttaagatctttctttttaaagtagatgtgtatataattaactttaaactttccttttctaatactagcattaatgttataaatttacctctagttgcagtgagccaagatcgcatcactgcactccagcctgggtgacggagcaagactctgtctcaaaaaaaaaaagaaaaaaaaatttacctctaaatattgatatagttgcatcctaccaattctgttatgttctatttttattgctcaattcaaaatatttttaaatttcccttgcgacttcttttttgacccatgagttatatagaagagggttacttaatttccaaatatttgggacttttctagctgtcttattgtcactgatttctgaattagttctgtcaaggtcagacaatatagtcttatttcagtccttttaaattcattgagccttgttttatagcttatcatgtaggatctgtttggtcagtgtcctaggtgcactgaaaaataatttatagtctgcagttttatgtagtgttctataagtgtaaattgacttaatagtattaaagtcttttatatttttactgactttctagcgattaggacaattgagagaactgtcaaaatctccagctggaattgtggattgtctatgtcttcagtcattaatttttgcttgatgtatttgcagctctgatattaggtacatacagatttagacttcctatgtcttcttggtgaattgaccttactcattataaaatgttccatctttatctctgtcccctctttaacccatcttgcctcatatttaagtctactttgttagctattaatatagaaatgagaatgttttaaacctgtaagaaataacagcatgtttatatgctgatgccaatgatctatcagagaagggggaaataatacaggagtatttctggaagtatcagagaaggggagtatttgttgagtaatatccttgacaatgtaagaggggtaagtattttattaatcagtggaaggattagccttagataggagcatggagaatttctaccataacaagatgaaggagggtatacaggaattgctgcagtaagttagaaggtgtagaggaagcattttgtgcagtttcttttctgaatgcttctgtttcctaagtgagatagtaagcaaggtcatctgtggagaacgtgcttatagaagaaggcgttggagatttgaggaaatagtcatctaggtgagtgggaggagtgagtagacttgagaactgttaccattgtcaggtagcactaagggcccacttcaagttagttctcatgaatgtaaagtgaggtcagccacgtccagatgaaagtgtgccacaaagaatagacatatagttaaatttaactagagtgggttttttttttttttttttgagacagaattttggtcttgtcatccgggctggagtgcaatggcgcgatctcagctcactgcaacctccgcctctggagttcaagtgcttctcctgcctcagcctcccaagtagttgggattacaggcgcccaccaccacgcccagttaatttttgtatttttagtagaggcggggtttcgccatgttggccaggctggtctcaaactcctgacctcaagtgatccatctgcctcggcctcccaaagtgctgggattacaggcgtgagccaccgcgcctggcctagagtggttttctttttacgaggctgctatgaaaaaaattaaggccaaggggttgaggatgtttaggatggagtaataacattgatggaccatggaattctgcactggaaagggaggaaaacgaggatatgaagtagaagagggacagtgaaattatgttcaaatcaattcattgtggccaagcacggtggctcatgcctgtaatcccagcactttgggaggcagaggcgggtggatcacccgaggtcaggagttcgagaccagcctggccaacatggtgaaaccccgtctctactaaaaatacaaaaattagctgggcatggtggcacatgcctataatctcagctacttgggagactgaggcaagagaatcgtttgaaccttggaggccaaggttgctgtgagctgagattgtgccattgcactccagcctgggcaacaagagcaaaactccatctcaaaaaaaaaaaaaaaaaaaaaaaaagacaaaattcattttaagtcttggtgggggctgaagaattgttagaattggggtatggttgggtgtggtggttcatgcttgtaatcccagcactttgggaggcccaggcaggatgatcactttagcccaggagtttgagaccagcttgggcaacatagggagaccccatttctacaaaaaataaaatattagctgggtgtggaggtgcgtgcttgtggtcccagctactcaggaggctgaggcaggaggatcacctgagcctgggaggttgaggttgcagtgagctgtgattggttgtgccacaacactccagcctgggtgacagagccagaccctgtctcaaaaaacaaaaaacaaaacaaaaaagaattgggggtatagggagtgaggtaggaagataagtggtgatggtaagatggtacaatgtttgaaatagagattaaggaggtataattgtcaataatgataaataaaggctagggcacatcatgggaataagtggctaaggtacagtaaagacaaaattcttggggaggaatcaaggaactccaaggctggattggaagattcattttcattaattttgaagttaccaagatttaagtcagatgtagtgttggaaagtgcaacagtgagcctggagctaaattattcaaagaatgagggagagaggtggagcatgaactttaaagtggtttattcttagtgtgtggggagagagacattagtctgaaaccagcaatgaggagcaaggaggataccttgttctagcagtatgaagacagagaaaacaaccactacctgagaggtctgtaagacaggagcatccttaggggagagccatgtgtgccaaagaactgttagcgcaagataggagagcatttgataaagaggttggggatatggagaattttggtggtaactgacctctaagtttcacagtggtcacaatgagttgggaaggggtgggaaattagatgagtatttttatactactgtataatacagggatgagaatcccagtgataagggaatttttaagaattggactgctgttaatgggaataaagagtgtgatgggattaattatggcatctctagggaatatttaatgttgagatacctcattttgcagattgtttgtgctgatgggaatgttgccagcacactggggccactcttgtgttttaaaattatataattaagcttgtttttcaatttagcatgggtaggaaaagatgtatcgggcaatatgctaagatttcagttatttaaagaacacaggattatgaataaacttagatgtagtccagaatacaattagatactataccccgtgggggccagaatccatttatgtctgcattatgagcacctgttgatagatcatatatattaaatgtgttaaatacttaagtatttatttatttatttgagatagggtctggctctgttgcccaggctggagtgcagtggtgtgatctcggctcattgcaacctctgcctcccaggctcaagtgatccttccacctcagcctcctgagtagctgggactacagatgtgtgccaccacgcccagtgaatttttgtattttttgtagagatggggttttgccgtgttgcccaagctggtcttgaactcttatgtatttattaaacaagctttaaaaattgattaaaataatgtgccttggtgatttcttaattttacttttggttaataagacatgtagactatatcttctttcatgcatcttgcctctccaaaactactgaagtgattctaagaactaggaagtatatgaacttattgccatacatggtggtttgtgcctataaaaaggtggtgccactgacagggacacaaagattggaggggagagctggctctggtggtactgttgctggtgatagttgaagccaggaaaaaagatgagctctgaaaggaacacactgtgaaagaagggcagaccaaggaccaagtcttggaaaatgcctatatctaagggagtggcagcaaaagaaaccaggttaagtcagaaaaacaaggaggtatagtatataagtgagaaaggaagaataatatttcgggtagaaaaagagtttaataacatctactgttatggagttcaaggagagtgaagaaaagcagaacagcactaattgtacaataaagtcatcagtaactctgaaatagaagtagcatgatggttaattatagtaatggagctgtaggaaaaagggtggctgagggaggaggatcacttgaagccaggagtttgaggccagcctaagcaacatagcgagaccttgtctcttaaaaaaaatcaaacaattagccaagtgtgtggtacacacttatagtctcagctacttgggaggcttgagcacaggagatcaaggctgcagttagctgggattgtacactgcactgcagcctgggcaacagagcaagaccccatctatctatctgtctgtctactgattctctctctctctctctctctctctctctctctctctctctctctctctctctctctctttaaatgaactgtaagagtagaaacaatagggcagggcaggcatggtggctcacacttataatcccagcactttgggaggccaaggtaggaggattgcttaaggctagaggagttcaaaaccagtctgggcaacatagcaagactctgtctctacaaaagaaagaaagaagcaacagtaaatatattcaaaaggaagaatcattgcaggccctatgttctatatagcagcagtccccaacttttttggcaccagggaccagtttagtggaagacaatttttcttcagaccagggagggaggtttgcggggaatggttttgggatgattcaagcgcattacattcattgtacactttttctatttacattgtaattataatgaaattattatacacctcactgtggaatcagtggaaaccctgagcttgttttcctgcaactagacagttccatctgggggtgatggatacagtgacacctgaagtgtattgcttatgtccagtctactctgtaatctcgttttggttgctgtcattgcagaaaaccctgcctcacaaggataagatgttgagaatggaagcaggcttttcagtacttttctggcaatctcaggatgttctgccttgattttaatccagaacataaggagatttgaagttgtctgaaacatattttttttttttgagacagggtcttgctctattgtccacactacagtgcagtggtgcagtctcagctcactgcaacctccacttcctggattcaagtgattctcgtgcctcagcctcccaagtagctgggactatgggtgtataccaccaaaccccactaatttttgtaattttagtagagacggggtttcgccatgttgctcaggctggtcttgaacccctggactcaagcaattcgcctgccttggcctcccaaagtgctgggattatagatgtgagccaccaggcccggcctcatacacacttttaaggccaccttcatttgctgtcttaagcagttgaccctattccagcacggataaagtcgattcacctgacttattcaaaaatgggtcacggatccattccttcccagttcagggttcttttgtggttgggaattaatgctcaaactcttttgaaagctgagataggtgatcgtgcaccagctggaagtaagaggaccctgtgagccagggcctttcaaaatctctgctaatgtttgaaacatgtcaacaaacccagtgttcgctcgtcaccctaatacttctgctttggctttgaatgcagccactttatctgccaacttgaacacaattgttgttctcccttgaagtgatagatcaagtttgttaaacaggttgaatatgtcacaaaaataagcaagttttgtgacccattctgtgtcactgaaatgtgctgcccgtggtgactgtttttctaaaagaaatctctggagcggctgttgtaactcaaaaactttagccagtgatctacttttagaaagctatctcacttctgtgtataagagaagatatgtgtgatctgtgtccatttcctcacagagcaatgtgaacaggtgtgaggtaagggcatatactttaatgtggttgataattttaattacgtcctgcaaaatgtcaagttcaggtgacattttttagctagccagcattactcaatggatgaaatagtgcgtagactcacatttggaaacaactcctttttttcttttttttttttttaagacagggtctcactttattgcacaagctgactgctgtggcgcagtcatggctcattgtagcctcaacttcctgagctcaagcagttctgcctgggactacaggcacatgccaccacacccagctaattttttattatgtgtagagaaagggtatcactgtattgctcaggctagtctcaaactcctggactcagcgatcctcccacctcagcctccaaaagtgctgggatcacaggcatgaaccactgtgtctggccaaggtgacctctttgacctgaataatgaaaccagaaagctgtccagtcatggcagccacttcgtccatgcatataccaacacaaaatgaccaattcagtttccctgatatgtaatcattcaaagacttgaatagttctgcagtgtggtattggttggcaagaaaagtacacataacgtattctcatgcacatcctcctgaaaaatatattgcacaaaaacaagcgttgttgccttgttgtcaacattggtagactcgtcaacctggattgtgcaccatggtgactcaaccctctctaacaattgtgcctcaatatcccctgctatttcattagttcttctagttatggtatgagcctaaggaggaacacgcgccaccttttgaattcgagcctctcctaaaagttcacgacaaatgtccttagcagcaggcaggattaactcttcaccagtagtaaagggcttcttagttttagcaatttggttagccattaagaatggagctctcagtgcagatgcatttgatgaagtggtggccttcaataaattgcttctgttcttcatgttcatgtttttttcttttgaaaactccaaaggcttgtcttttaatgcagggtgcttggtctcgatgtaactaagcagttttgaaggttttgtggctttgttggatagctggtcaccatgtactatacaaagagggcttggagaatgtgaatcacctgttgcagtgaacccataatttaagtaggactcttggtattttaaatgcagctttctttttgttggcagtcttagagtcttctgctgtctcatcattgggtctttcccctttttcaaagaagctcttcagtgatatttgtttttcactcattttgactagggttagcaaaaagacttaccaaaactgtgactgagacaagtgtacagtgtgagaaagaggcacagatggaagtcgcaaataaaataatgggttggcaacatggggactaaaataaatgttggattctgacttaaagcctgccactagatgtagctgtacaatggaactacatgaactcacttgccattataaagcctgccaccagatgcagcttagttgtcacttgccactcactactcactgatagggttggtgttttttttgttgttgttttgttttttttgagacagagtctcgctctgttgtccaggctggagtgcagtggcgggatctcggctcactgcaacctccacctcctgggttcaagtgattctcctgcctcagcctctggagtagctgtgattttaggtgtgtgccaccacagctggctaagttttgtatttttagtagtgacggggtttctccttgttggccaggctgggctgatagggttttgatatgagtctgcaagcaattgatttattatggtctctttgcagtcaaacctctctgctaacgttaatctgtatttgcatccgctccccagtgctagtatcactgcctcagctccacctcagatcatcaggcattagattctcataaggagccgtcaacctagatcccttgcatgagcagttctcagtagggtttttgctcctatgagagtctaatgccaccactgatctgacagaaggcggcgctcaggcagtagtgcaagcagtgggggacaactgtaaatacagatgaagcttttctagcttacccattactcatctcctgctgtgcagcctggttcctaacaggccacaaaccgatacatggtgtttgggggcccctcctatagagcaataaggtgccatttagtattccaggccctgagcttccatttttctacaaaagtgtgagtgacatagattttttttgtttttgttttttgagatggagtcttgttctgtcacccaggctggagtgcagtggctcgatctcggcttactgcaacctctgcctcctgggttcaagcaattctcctagttcagccttctgagtagctgggattacaggtgcacaccaccacacccagctaagttttgtaattttaatagagacggggcttcaccatgttggccaggctggtcttgaactcctgacctcaggtgatccacctgccttggcctcccaaagtgctgggattacaggcatgagccactgtgcccagctgcaacataggtttttagtgcttattttgaattgtttcagttttttatactatattttttttctgagtattgtggtaatatatattttgcagaaaatttggaaagtagataaaagtatatgaaataaaaattatccataattcatcactcaaaatacctacctctgtattataatttggagtgttttcttctagtatttttttattatgtattcatttctattgtttcccttttataaaatcgaggttaccgtatcatgttctgttcacttaactctgcattgtgaacattttcctatgtttgtcatgataacatgtttaataattatgtaagccatttcatgtatttactgtaatttatttaatcattcacctgtgacatttgggttgcttgtttgctgtactgccatacctgccttataaagacttgaaaatatttaatgtttctgatatcctggagaaagttcacattttgtacatgttctcaagtaacatatatatatgtgacatatatatgtcacactggttgaaccttagatccgccaaataccaacttttagttcctattttctgtggaccaaattttatgggaaaatattaaaacctcactaatttggatgacaggggcatcagaagaaggccaatctgaattttagaaattattatcataactaggcttaagacaacttttcttactcattacttgttcttttctctatgtctttttacccatcactaccaaaatgtcatataatatacatattagtttgaaaattaatttttcacaatttctagattttccaaacattttcaaacattagagatgtagtagttgtgaatttttaggttagtgagtctggacatatttgacttttttttttttttaactattacaggcatacaaaaaatacagtgctggctgggcacggtggctttgcctgtaatcccaacactttgggaggctgaggcgggcagatcacctgaggtcaggagtttgaaaccagcctggccaacatggtgaaaccccgtctctactaaaaatacaaaaattagctgggcgctaatttttgggtggcgggtgcctgtaatcccagctacttgggaggctgaggcaggagaatcacttgaacccgggaggcagaggttgcagtgagccgagatcatgcaattgcactccagcctgggcgacagagagagactctgtctcaaaaaaaaaaaaaaaaaaaaaaaaaaaggaaactaagcaatatctctgatcccatcactctgctttttcaagtcttaacatttggctgcatttgcctaagcctcttttttttctttaaatttttgttatgaaacattttaaacacagaacaattgagagaataaaacaatactcatgtatatttaacacctagattcaacagttaacattttgccatatttgctttagtatgtgtgtatttttgctgaattatttgacagtaggtatctaaacatcatgacacttccctatagtatatctcctaatatatggacattcatatatatatatatatatatatgtatccataatagtgttatcacacttaagaaaattaatggtaattttttcaatactgcgtaatttctggtttccctagttgccatcaaaacactttaatagctttaaaaaaaattagtccaggcatggtggctcatgcctgtaattccagcactttgggaggctgaagtggaggatggcttgagcccagaaattggatacgagcctgggcaacaaagacccccatctgtacaaaaaatttaaaaaattagttgttcatggtgatttgcgcttgtagtctcagctactttaaaggctgaggcgggaagatcttttgagcccaggatttcaaggttgctgtgagctgtgattgtgccactgtattccagcctgggtgacaatgaaaccctgtctcaaaaaaaaaaaaaaatacttaaacaaggatccagtaagggattgtgcactgcatttagttgtaatgtttcttaaataatctcttttaatacagagcagtccctttccgtccacatgcaacttttcccctacatgacattgatttatttgggagagtaaagtcattgcacagataaatgtacattctggatttgtgtatttccttttgatattagtttaacttcctcctctatcctctgtatttcctgtgaattggaaggtaaaaagcttgattagatttaagataaaaatttttggtgagaaaacttcatgggtgatgcagcatacagttggtccttgaacaacacgacttgaactgtgtgggtccacttacacatggactttttttcctaccaaatgcagatagaaagtacagtgggacaccagacagaactacaggacttgagtatgatggattttggtacagtcaggggtcctagagccagtctcttgagtatactgagggatgactgtacttcatattgcattgaatcaggaggcacataatgttgttctgtcccacaatgaatgatgctaagttagatcatttggaaaggaggtgactaccagatctctacagtgaaaatataccttttcttctgtaaattagtaatatgctggtgatactttggcatgcagggagtgacctggtctgtgaggacagtgttagaaatttttcatctacagtttatcttcttttttccccctgagacggagtctcgctcggtcacccaggctggagcgcagtggcacaatctcagctcaatgcaacctcctcctcccaggttcaagcgattctcatgcctcagcctccagagtagttgggattatagggacctaccaccatgcctggctaatttttgtattttagtagagatggcatttcaccatattggttaggctggtcttgaactcctgacttcaagtgatctgcctgcctcagcctcccaaagtgctgggattacaggtgtgagccaccgcgcccagccctccaatttttctttacattcttcaattgcttaagaattttttaatgaataaaattttcttcctaagataaattttatcagggaactatctagtatttcagtactcacaacaaatacaaataaaaataataaaaggatacccattccatcttagattgatagaaattgaagtcgagggtacagagtatccttgagtacagcagagtgttctcaaggatgtagggagcaaaggagtctacaagctatgggtatataaactgcttgtgggtgtataaactgttacaatatttttatagggcactttagctagctagctagctatctataattttttttttttttttttttgagacagtctttgtcgcccaggctggagtgcagtggcatgatcttggctcactgcaacctctacctcctggatttaagcgattctcctgcctcagccctctaagtagctgggactacaggcatgcgccaccatggctagccaattatttatttatttatttatttttttgagagagagtctcgctctcttggccaggctgcagtgcagtggcacgatctcggctcactgcaacctccgcctcctgggctcaagtagttctcctgcctcagcctcccaagtagctgggattacaggttgtgtgccaccatgcccggctaatttttgtatttttagtagagatggggtttcaccatgttggccaggctggtcttgaactcctgacctcaggtaatctgcccacctcagcctcccagagtgttgggattacaggcatgagccactgtgcccagcctaatttttgaatttttagtagagatggtttcaccatgtcagccaggctgggcgtgaactcctgacctcagatgatccacctgccttggcctcccaaagtgctgggattacaggcatgagccactgcacctggccactttagcaatatttatacaaatatttcagtactctccccctagttttctgctgccaggaatttcccctgtgtatacttataaaagtacagcaggatgtatataaggatgtcattgcagtgttatttttaatagcaaaaaacaaacatgagaacaacataaatgtcatctagcagtcaaaaagaatgacttcatcaaactcaggttattgttattatcagaatgtttcttacagcattctgttttcatttgctgtaacttcttacctcaaagtgtctttttgtttttcctttactcattgcattgtgcataaacatggaaaaataaaaactaaatgaggtgcctctgtcatacttagccttctgattcttagaataagtagggttttgacgctgaagcactcaaagtaatattttaattttctttgttcactagtctcttgagaatacagtgtaaataaatcatataatggtgaaatgacacttttagtaagaaaaatgttggctgtatcctagttatactgaaactcatgaaataggaatacctgtcaccttcaatatctttagttatctttaatatctctatttttttgtcccttgaaacagttcgttttcctgaagatcttgaaaatgacattagaactttctttcctgagtatacccatcaactctttggggatgagtaagtaacttagtaaaatatttgtcaaattagtatggaaaaaaaaattttcattctttttcttttagatttagaaatcaaattttattttcttcttatttttaatgtggtttatcttaaaatatatgttataatggtgtttttttacattgagacaccagttattttaatacctaccatttagtgctgtaaatgcattatttaattctcacagcagtattaatgatggtattattatttgctgctttgtgcattgatagaattggataattgttcatgaacatacaaatggctggagtatagattttaggcaatctgactccagagcccataatcataactactacttttttctgctaccattttgctaaattacttctagtagcatgtattcccctaaagctgtaatagaaagcttaagttgttattctatgatcaaataagcagttgagagaagtttatttatttattatttatttatttatttttgagatagggtctcgctgtgtcacccaggctggagtgcagtagtgtgatcaaagctcactgcagcctgaacctcctgggcataagcagtcctcccacctgagcctccgagtagctgggactacaggcacacaccatcatgcctggctttttttaaaaaattttttgtagagattgggtctccctatgttgcccaggctggccttgaactcctggcctcaagtgatcctcccacctgcgcctcccaaagagctgggactacaggcatgaaccactgtacctgccctgaagtttattttttagaaggaactttaaatatatgtcccaggccaggcgcagtggctcatgcctgtaatcccaacactttgggaggctgaggcgggcagattgcctgaggtcaggagttccagaccggcctggctaatatggtgaaaccccgtctctattaaaaatactaaaattagccaggtgtagtggcacacgcctgtagtcctggctactcgggaggctgaggcaggagaatcacttcaacctgggaggcagaggttgcagtgagccgagatcatgccactgcactccagcctgtgcgacagagcgagactgtctcaaaaaaacaaaaacaaaataaagatatgtcccagtatatttagcactgttctttaatttcctatactttgattacatcattgaaatagttacttttttaaaaaaaacttttgattttgaaaacattgcacatttgcagaaagttgcaagaatagtacagtgatctctgtatatttttttacctggattcaccagttgccatttagctacatttgctttaatcattctctccttgttgttgaaccatttgagagtaggttgcagatctatcctgatcctttacacctcatttcttttcactatgtatttcctaaaaataagattaataaccatggaagagttgtaaaaattcaggaaatttaacattgatacagagtctcgcgttgttgcccaggctggaatgcagtggtgctatctcaactcactgcaacctccacttcctgggttcagatgattcttctgcctcagcctcccaactagctgagattacaggcgcccgccaccacacccagctaatttttgtatttttagtagagacggggtttcaccatcttggtcaggttggtctcaatctcctgacctcaagtgatcacccaccttggcctcctgaagtgctgggattgcaggcgtgagctaccatgcccggcctgatacagtactatcttctgatatacagctcatgtttcagattttgtcagttgatttctagtaattcctttatagcaattttctccaatcctggatccaatacagaatcatattgtatttcgttgccatatctcttcattcttctttaatctgaaacagatcctcagcatttgttttttcctaacagacatttttgtagggtataggctaattttgtagaactgttatattggattaatttgattggtttatttgtgattaaactcagataatgcatatttttgctgtgccattacagaaatggtattgtgtcctcagtgtatcacatcaggaagtccgtgatgtcagtttgtcccttgttggttaagttaacttgggtcacttggtttagaggtggctgctaggtttttccactataaagttagtgttttttcctttgtaatttataagtagtttgtagggagatactgtgagaccgaaaatatcctgttttcctcaagctttcacccagaagcatccattaatgattcttgcttgaatcagtattttactatgatgattgtaaaatggtaattttgtaactcttttgtacctttttcatttattagttgggcatgctactataagaaagagctcttcttcttcttcttatttatttctttatttatatcaaactcagggatgcttttttttgtttttgttttttgagacagggtcttgctctgtcacccaggctgaagtgcagtggtgcgatcacagctcactgcagccttgaattcccaggctcaagcagatcttcccacctcagcctcctgaggagctgggactataggcgtgtaccaccatacccagctaatttttaaaaattttttggccgggtgcagtggtttagacctgtaatcccaaaactttgggaggccgaggcgggaggtttgcctgagccaggagtttgcgaccagcctgggcaacatggtgaaaccacgtctctactaaaatacaaaattagccaggcttgctggcgtatcctgtagtcccagctacttgggaagctgaggcaggagaattgcctgaacctgggaggcagaggttgcagtgagctgagattgcgccactgcactccagcctgggcaacagagtgagactctgtctcaaaaaaaaaaaaaaatttttttttaagagatgggggtcttcctatgttgaccaggctggtcttgaactcctgggctcaagtgatcctccaagtgctgggattacaggcgtgaaccaccgcacctggctaaggagtcttttacaattcagtgggctatgtacaatctgttactgctactaattttgatgctcaaattatcccagatttggcaagtggccaccctttcagacacttttgagtctttctgatatgtccttataattttggtgatactttactttctcacacaacaagatgtttccagattcatctggtactttccctgttagttctggagtcagtcagtctcccatggaacccctggtttgttgtagtaggaaagggtatttagacatagtggacatttaaatatttcccttcatgtcttttttccccccatgcattattttaacatcattgacatatttctttaatgtgtgggggttttgggtttttttgtttgtttgttttttgagacggagtcttgctctgttgcccaggctggaatgcagtggcatgatcttcttggctcattgcatcctctgccgcctcccagttcaagcgattctcatgcctcagcctcccgagtagctgggactacaggtgtgtgccaccacacccagctaattttttttttttgtaattttagtagaggcggggttttggcatattggccaggctggtcccgaactctggagcttagacagtctgcctgcctcagcctcccaaagtcctagaattacaggcgtgagccactgtacccagccatatttaatgtgtggctttttttgttgtttgcttgttttttgagatggagtctcactctgttgcccaggctggaatgcagtggtgcaatcttggctcactgcaacctccgcctctcaggttcaagcgattctcctgcctcagcttctcgagtaggtgggactatagacacgtgctatcccacccagctaatttttgtatttttagtagagacggggtttcaccctgttggccaggctggtcttgaactcctgacctcaggtgatccacctgcctcagcctcccaaagtgctggcattacaggcgttagccactgtgcccagccttaatgtgtgttttgttttgagacgtagtttcgctcttgttgcccaggctggagtgcaatgaatggtgcgatctcggctcactgcaagctgcgcctcctgggttcaagtgatgctcctgcctcagcctcccgagtcgctggggttacaggcgcctgccaccatgcccagctaatttttgttatttttggtagagatggggttttgccgtgttggccaggctggtgtcgaactcctaacctcagatgatccacccacctcggcctcccaaagtgctgggattacaggcgtgagccactgcaccaggcccttattgtgtttttaagtcaacaaatgtctcttcctgcaacgaatttcctgtgaatttttcattattgatgtatcagattaggcattttatgtgctttcacatattaataattgtatcttattatacatagattaatgccaaaatttcagcctttcatattttaaataggttttactttattataaaaataagaatattttctctttggagttctatctctaaagagacattgttttattctctactttttactactttaaaaaatctgtgtaatatcttagtagataagatctagttttacagatagtgcttctttttaattttttgagacggagtcttgctctgttgcccaggctgaagtgcagtggcgcaatctcagctcactgcagtctccacctcctgggttcaatctattctcctgcctcagcctcttgagtagctgggattacaggcacccaccaccacacctgcctattttttttttttttttttggtagttttagtagaaacgtggtttcaccatgttggcaggcaggtcttgaactcctgacttccagtgatcccccccgcctcagcatcccaaagtgctgggattactggtgtgagccaccgtgcccagaccagttagtgcttcttaatggcattttgcacactgttttgcgtaatatcactgaaagtggggtgcttgtataccactcttctaagatgggtaggggacagtaacataatagtgatatccctgaactgtatgacccaagcatgataattggtcttgatcctagtatcattgccactcctttcttcttcacataactttcagagttgctggaatggacagtgctccgtattttcgtagcctagacagaaatttggaaatgacactgcttctttcaaacacttttctttcacaattcactttctaaaaaaatcagaatacagctttattgagatatatactgtgcaattcatttatttaaagtgtacaattcagtggtttttaatgtattcagagttgtgcaaacacagtcaattttggaacattgtcattacttccatcaaaaaccctaaaatgcattaatagtcactttaccctgacccctagtcttaggcagtcactaatttactttctgtctctatagatttacctattttggataatttagagttcactttttagaagactcttttaagctggaaaaaggaatattaaggcataaatgtgatagcagggagcaggggtggaagaattagcagcagttccatatctgccttttgagttcatagagcagtttacatgtagtaaggcaggtgctattgctgcagctctggattttggtgattcagtaagcagtaagttggagggactggtccaaggcttggtagctgcttgcctagccaggtcctaatttaacactacttctctcatttgaaatgccttctaatactggtaatggtagcagcagcagcaacagtagcaatagtattaaatgtctgacatttagtgagtacttatacaatgtgccagttttataagtagtttacatgtattaacttatttaacccaaacaacattcctgacttaggcaacattcctgagttattctattttatagatgaaaactgaagcacattttattgtagattttttttttaagtatagtttaaaatcttgaaactacccatgaagttaaacttgtttatatgtagggttaatactttttaatgactgcaaaaattcattccattattgctattttttccatttcagtgaaactgcttttggttacaagggtctaaagatcctgttatactatattgctggtagcctgtcaacaatgttccgtgttgaatatgcatctaaagttgatgagaactttgactgtgtagaggtaagaacagaaatactttttaaactgttttccaatttaatttattttaaaataggttttaggccaggtgcggtggctcacacctgtaaccccagcagtttgggggaccaaggggggcagatcttttgatcttaggagttcgagaccagcctggccaacatagtgagagcccatttctcaaaaaaaccacaaaaattagtggggcgtggtggcatgtgtctgtaattccagctactcaggaggctgaggtcagaggatggcttgagcccaggaggcagaggctacagtcagctgagatcatgccactgtactacagcctggatgacagagctagaccctgtctcaaaaacaaaacaaacaaacaataaacaaatagtttctaaaaattaaaggtttgggctgggtgcagtggcttgtgcctataatgccagtgcttttggaggctgaagtgggaggatctcaagcccaggagttggaaaccagcctggacaacatagtgagaccctcagctacttgggaggctgaggtgggaggattacttgagcccaggagcttgaggctgccagtgagccatgatggcaccactgcactccagcccgggcaacagaacaagaccctgtctcttaaaaaaaaaaaaaaaaaaaaaaaaaaaaaaaattaaggtttgagggaagagagaatctgttatatggtagttttaaaatcacattctcaggctgggtgtggtggctaacgcctataatcccagcactttgggaggccaaggtgggcggatcacctgaggccaggagttcaagaccagtctggccaacatggtgaaaccccgtctctactaaaaatacaaaaattagctgggcgtggtggtacacacctgtaatcccagctacttgggaggctgaggcaggagaattgcttgaacctgggaggcagaggttgcagtgagttgagatcgtgccactgcactgcagcctgggtgacagagtgaaactgtctcaaaaaaaaattaattaattaaataaaatcatatactcagtctttagttatggaggcatttgcctccctgtcattacagttaatcctgtgatcatgatcctgttctgtttcctgcatggaccttcttcataaaaatctttgcctttgtgatcagagttttatttttttgccaacttttgttttttattgtggttatttcctataagtcaaagaagatggagggaaatagctaaattttccacttttacctagtgtggaatctattgaagtttctcttgctgcatttctaatcccacaaattttgctaatatattcctttatggatggaatacatggatgatcaagctgatcacattataaaactatttaaagtgagtgtatcaaaaggggataaaggtaaagagagagatgaggccgggcacagtggctcatgcctgtaatcctatcactttgggaggctgaggtgggcggatcacctgaggtcaggagtttgagaccagcctggccaacatggcgaaaccccgtctctactaaaaatacaaaaattagctgggcgcagtggtgcatgcctgtaatcccagctactcgggaggctaaggcaggagaattgcttgaacccaggaggtggaggttgcggtgagccaagattgtgccattgcactccagcctgggtgacaaagcaagactccatctcaaaaaaagagagagagatgagtatgcatctgtggtagactgaataatggttccccccaaaagatatccatgtcctaatatctggaacctgtgaatggtgcctcatattgcaaaaagcacttcgctgatgtaattaaatatcttgatattatcctggaatatttgggtggacctaaatgtaatgacatgtatcctaatgagagggagacagaaggaaacttgatgacagaaaaggagaaggcagtgtgaccacagaggcagatgtgatatggccagaagccaaagaatgcttactcactagaagctggaagaagaaaggaacagattccctcctagagcttccagagggagtgtattaccttggttacagcccagtgatactgatttcagaacacctccagaccgtaagagaataaatattgttttaagccaccaagtttgtggtaatttattatagcagccacaggaaacg

SEQ ID NO: 677 - DNA, 32746 bp, Homo sapiens
  source 1..32746: mol_type = other DNA
agcaaccatttccgcttccgctggcggggtctcctccgtgagctccgggcctgtttgcctgctgaagtagagtcttagggtgaccccagggggacgtaatgtttccgagaagaaggacagaaagaagactgggagacaccggaactcgaaagaaaatcggtaacaaaatgtgggttcggccaacagtgccctgtaggcctgaaatttcggtctggccagagcaaggtgattgagagggcgggggttcgggcctagcctgggcttgagctgtcctttgtgtcttgagcggatggtggggccgtggaacatgaaggagtatctttgtgtacgttcacaacgttcacatcggtgtaggccaggttgctggactctgactcaaagtgttatagaggcattacgtattgtacccgcagctgcagcctaagcgagctgcttcagcttcctagtcacaggatcccacgcgagaatagagccataggttagcgtcgcaggacgttgttcgcccccggatacctcacatgcagcctaccctagagccagtcatttcctattgtgtgctgggggaggagggagtgccctggtgtaggcatttggaattggaaaattgagctcctccccaagctctgccactgattggttggtaatcttggccagtttacaactttgctttcctcagctgcaaacagctcagagtgcctctctgggctaactcagagggtaatttcaaagattataagataatgtaagtgaaagaaattgccagtttataaaggtgtttggggaaaaaaaaagacgaaaatgataggtaccttgatagaaaagcctgaaaagtctcaacatatttccttattccagtgccaggcacattcctgtatctaaaagcttaatgaatggctgcatggttattaaaacaatattaggagatttgacaacttaggtaatgtgattttgtggaatatctgataggatagtttcagctacaagtaacagaaaacccaccgaaaggatgttcaaagagcagttacaggttggttaattcggtggcccagtgacaacatcaaggtcccagtgcttctctgccaccctaagcatgttggtaacgttgacaatagaatccaggtaaaatatacagacatgtattgtgtcatgtacccatcctaaactagttattaccaagaataaataattgtttggggcccatcatgcttcagcccctgtcactaggggaaggacctagcctcccttgataatctacctgcacaaaattagggctttgttacaaatgaaaaaaagagatgtggaaaataagttagataagaaactagcagtatctgccacaaatgatatctcttgacagctaactaagagctagaccttgtggggatggatcacaaaagaggtagctgtgaagtcccagtaaaggtgcttccaggacaggtggaagaatggtaagaacaaacttgcctacaggctagaccagtccaaagcatatatgttgaagaagagctaatagcctgtatatgaaggtgtaagtaaaggagatgttcatggttgagtcactgtggtgttcacgtagtcatctttcccttcttggtttgtgcttatctcttttttttttttttttttgagacagtctcactctgtagccagactggggtgcagtggcacaatcctgactcactgcaacctctgcctccggggttcaaatgattctcctgcctaagcctcctgagtagctgggactacaggtgcccgccaccacgtccggctaattttttttttttgtatttttagtagagatggggtttcatcatgttggccaggatggtctcgatctcgtgacctcatgatccacctcggcttcccaaagtgctgggattacaagcgtgagccaccgcgccccgcctatttaatgctattcttacatcagcactgtctcattgtggtctgagattctccttatctggatttgtggctctttcaccaagaacaagagactcccgtggctctcttctttaaatcctgttgccataattacaaagaaataaacacagtttccaatgctttgaaatgaagcatgtggtattaactcagtggattaccagagagagagggatatacctgaaatgggagaggaaaaaatcttccctagactatctttcctaagagccatcaaaactataaacaagtggacaaagaaggaggaagcttgaaagctttatcttcctgaaaataaagagatgacatacaaagtccaagatagaccaagattgaaaaattagaccacattatatccctaactcaattttgtaaaaaatcacaaatgcttgactgtatacccactatatgttcaagtaacatgttttaatcatcaaaatttaaaaatccttccacgacaatcttttgcaagtttttccatttctgtctttaacatggtaccagtaataacaactacaacctgtttgtattgaaattatttctatagcccagcatctgctttctctgaaaattatctttttaaaaatagtaaaactaacatcattacaaaagtagtatatgtgcatttcagaaagttaggaaaggctgggtgcggtggctcacgcctgtaatcccagcattttgtgaggctgaggtgggcagatcacaaggtcaggagatcgagaccatcctggctaacacgatgaaaccccatctatactaaaaatacaaaaaattagccaggcgtggtagcgggcacctgtagtcccagctactcgggaggctgaggcaggagaatggcgtgaacctgggaggcggagcttgcagtgagccgagatcacaccactgcactccagcctgggtgacagagtgagactctgtctgaaaaaaaaaaaaaaaagaaaatacaggggaaaaaatggcaacacattcctgtcacccagagatcaccactatttactctttattatttgtttttttttttttgagacagtctcactgttgcccaggctggagagcagtggtgcgatctctgctcactgcaacttccgcctcctgggttcaagtgattcttgtgcctcagctaccagagtagatgagatgatgggcagatgccaccacaaccatttaatttttgtatttttagtagagatgcagttttgccatgttggccaggctggtctcaaactcctggcctcaagtgatccgcccatgtcagcctcccaaagtgctgggattacaggtatgagccaccgcacctggcctgctcactgcaacctccatctcccaggttcaagcaattcttctggctcagcctcccgagtagctgggactataggtgcgtaccaccacacctggcgaatttttgtatttttagtagaggacgggttttccccatattggccaggctggtctcgaactcctgaccttgtgatctgcccgccttggcctcccaaagtgctgggattacaggcgtgagcccctgcccccggcccctattcttaagtatatatcttttccctagtgatttttatgatgatgcagctgtatattgaaacggaaagatactcatttttgggagtaaaattggttatgaaacaaaaacaataacaaagttgcttttgaagactatgcgttaaaatggtagtggtagttatatttttaatttttatgggtacatagtaggtgtatatatttatgtggtacatgaaatattttgatgcaggcatgcaatgtgtaatcacttcaaggtaaatggggtatcttccctggcgatgtttaacatgatttccagaatgaattgctcactacgtttggtgtgttttccattcccagatggtactgccttttaaggtctattacttaaacataagtatggctctggttcttaccgcctttaccgtatccttcatgggaagttgatactgatcggaaactgacacagagccttctcacctacactaagggggcctaggtaagcaagattatctttctcccaacttcagcaagaggttttcttactggtgttcagaatgcttgattgagcagttagaaaactgttgctacctagtctccagtcttataaggggacaatggctgcaagtcatgcctgcaagaacaagaggctcacacagttttgaaattagcacaacttctagctggataggagtctttttagtttcatttagccttgagttgaaactaataggagtcttttaattagaaaaaagctcagggctctaaacgtaccttcaacatgttaattctgttaccaaaaactggcttggtctgtgttaactcccaacagaattctttttcagtcactgaggcagaggtgcttccagagaaagattcttgacctactcatactgaataattatcgttactagaagctgcaaccaaagactcctggagggtagtaagaggtacagagaatgcaggttagatacagtgaggacagagaagaaaggatgggttggaggctgggcgtggtcactcacacctataattccagctactttagaggctgaagcaagagaatcacttgagtccaggagttcgaggctgcagtgagctagcattgtgccactgcactccagcttggatgacagagcaagaccttgtctcaaaaaaaaaaaaaaaaaaaacatgggttgctttgtagtttagagaactacatgtttagatagttaatttttccccaaaagggcccatcagattgatactctgagatccagggtttgtctgacactcattagcctatgagttgtagagatgggatggccaggagtgaagtgatggccttgtgtctttctcccctgcagcatacagaaaggctgtacctggaggaaggaagtgcggagccagcctgagttgggagaagagctccagagagtgagtcaaagcgctctgtgtcctgctattaatgatgccctcatagtcagaggaagcctacttaagtgaaatccatttttgacctgtcaagtattaaatattctcttaatttttagtactgaatgatagaaggcgcctagtgaaacaaatgctttcacttttttgctaggagggtaaatgagtatattcttacgttaggtacacagggatacagtacaagtatgccagcctctttaaactataaagaagtaaacaagatttggtttaagcatcagtctcttgtgagtctgatgggtaagcccagtctcagggcacactgacaatgttagtggagaacgagactctcccagtgtgctgccctgaccctctgagattggtctgtgtagccacgtggtggtcatcctgtgccacctctggtttggttctaatcaaaggaagcagtatcatctgtggtgatccgtcttacacacttgcatcattttataccaaaggagaatttcttttgttaaaaatttatttttcattatctactcataaagaaggagccaaagggctgggcgcagtggctcacgcctgtaatcccagcactttaggaggtgaggcgggtagatctctggaggtcaggagttcgagaccagcctgcccaacatgttgaaaccccatctctactaaaaaatacaaaaatgtagccgggtgtgctgggcgtggtggctcacgtctgtaatcccagcactttgggaggccaaggcaggtggatcatgaggtcaggagatcgagaccatcctggctaacacggtgaaaccccatctttactaaaaatacaaaaaattagctgggcgtggtggtgggcacctgtagtcccagctacttgggaggctgaggcaggagaatggtgtgaacctgggaggtgacagttgcagtgagccgagatcacaccactgtactccagactgggcgacagagcaagactctgtctcagaaaaaaaaagaaaaatttagccaggcatggtggcgcccaactgtagtcccagctactcgggaggctaaggaagaagaattgcttgaactcaggaaatggaggttgcagtgagctgagatcgcaccactgcactccagcctgggtgacagagcgagaccccatctgatatggtttggctgtgtccccacccaaatctcatctgcaattcccatatattatgggagggacccagtaggaggtaattgaatcgtggggcaggtctttcccatgctgttctcatgatagtgaataagtctcacgagatctaatggtttttaaaaaggggagtttccctgcacaagccctcttttgtctgccaccatgtgagacatgccttttaccttccaccgtaattgtgaggcctccccagccacgtggaactgtaagtccattaaacctcttttttttgtaaattgcgcagtctcaggtatgtctttatcagcagtgtgaaaacagactaatacatcgtctcaaaaaaagagaaaagaagaagaaggaactaaagaagaatttctttggaagcaaaatatttggaagcaaaatatttggctcctgactgaaagggttttgatccatgcatacattaataaacccttcagaaccatgagttgggataattcactgtcccttgtgctagtctcatggagcttttctgctcttctgggagtgctcctggggtggtctggaggcctctcaggcagagcagaggctggtcagcaagccacagggcttgccatgaagtggtttgttcatgatttgtttctgggaccctgggaaaaatgttctcagggtctgcctaggaaggctggttttggaagcttgtggatttctttctgggtgagtcaggaaagttgtgctcctgctgggcgcagtggctcatgcctgtaatcccagcactttgggaggctgaggcaggcggatcacaaggtcaggagatcgagaccatcctggctaacatggtgaaaccccatctctactaaaaatacaaaaaattagccgagcgtggtggtgggcacctgtggtcccagctactcgggaggctgaggcaggagaatggtgtgaacccgggaggcggagtttgcagtgagccgagatcgtgccactgcactccagcctgggcgacagagtgagactccgtctcaaaaaaaaaaaaaaaaaaaaaaaaagaaagttgtgatccaagggaaagcatacaggttttaatgatgaactagtttgttcctttgtctcctggctttcattcttcatggcatgtgctcagggcagccagtggagagaggcatcattctgcatggtatagaagccttgggtgggtgtttcatcatctgtaaaatgaggacaacaatactgaactttcaaggccattgtaaattagaatgtacagtacaagcattgtaagttagaagtcaattagaacatgcaggagggattataactcagtgtttagcgtatagcagacacttagtaaataatgcatttactctgttccattctagaagctccattgttgtttgtacaacaaacacctctgttgcagtgcttatcagattgtcttgtaatcacgtaactcctcaaaggcaggatgtgtgtaataacacatttccttggtcaccatttgtacccagaatggggaaggaagaaatgaaaagaatccagtatctaagcccagcctccatttcacttgcacgccttttatttatgaaaatatagtacttgtccatgtaaataatatctctgaatggataccaggaaaatggtaagatgagttagctggagaacttgggtactgagttggagggagggtaacttatttttcaccaatgtatccttttgttttgctttaaaataatttaccacaggcatgcattacttctaaaaataaaaatgtttactgtcagaaaactcccccaagttaaaccaaaaccaaaatatgttagatacatctgtaacactcattataaaagatgacatataaatgcctcaaaaatagaaaaggtgatcaaacttactgagaaatgtgcattaaaacaatgagacctttttcagttagattgcagaaaggtaaagaataatacctggccaggtgtggtggctcacacctgtaatcctaacactttgggaggccaaggtgggtggatcacctaagctcaggagttggagaccagcctgggcaacatgacaaaacctcgtctctacaaaaaatgcaaaaactagtgaggcttggtggtaggcgcctgtactcccagctactcgggaggctaaggcagcggaatcacttgagcccaggaggcagaaattgcagtgagctgagaccacacgactgcattccagcctgggggacagagcaagaccctgtctcaaaaaaaaaaatgagcatggtggctcacaccagtaatcccagaatcccagcactttgggaggtaaggtggtcagatcacttgcaccaggagttcgagaccagcctgggcaatatagtgagactctgcctctacaaaaaataaaaaattagccaggtatggtggcgcatgcctgtactcccagctactggggagggtgaggtgggaggatcacttgagaccaggaggttgacgctgcagtaagccgtgatcacgccactttactccaacttggatgacagagtgagaccttgtctcaaaaaaattaaaaaagactaattccctatgttggtgaggctgcgggccatttgccctgctgtagtgggtgtagagtcttcacactcttggtatgagaataaattggtaaaactttctggcaggcaatctagggtttgtttccaaagttaaatgtggttaattaaaactaattttacttatgcctgtaatcctagcactttgggaggctgaggtgggcagattgcctgagctcaggcattcaagaccagcctgggcaacatggcgaaactctatctctactaaaaatacaaaaaattaaccgggcatggtggcaggtgcctgtagtcccagctactcaggaagctgaggcacgagaatcacttgagcccaggaggcagaagttgcagtgagccaaagattgtgtcacactccagccggaggggcagagcaagaccccgtctcaaaaaaaaaaaaagaatgcttggttgagcatggtggctcacaccagtaatcccagcactttgggaggtaaggtggtcagctcacttgcaccaggagttcgagaccagcctgggcaacatagtgagactctgtctctacaaaaaaatgaaaaattagccgggtgtggtggtacgtgcctgtagtcccagctactggggaggctgaggtgggaggatcacttgagaccaggaggtcgacactgcagtaagccgtgatcatgccactgcactccaacttgggtgacagagtgagaccttgtctcaaaaaaattaaaaaagactaatcccctatgttggtgaggctgcgggccgtttgccctgctatagtgggtgtagagtcttcacactcttggtatgagaataaattggtaaaactttctggcaggcaatctagggtttgtttccaaagttaaatgtggttaattaaaaataattttactcacgcctgtaatcctagcactttgggaggctgaggcaggcagattgcctgagctcaggagttcaggaccagcctgggcaacatggtgaaaccctgtctctactaaaaatacaaaaaattagctgggcatggtggcatgcacctgtagtcccatctactcaggaggctggggcaagagaatcgcttgaacctgggaggtgtaggctgcattgagccaagatccactgcactccagcctgggcaacagagtgagactctgtctccaataatgaaatcatgaaaaaaaatttttttttttgagacagagtttcgctctcgtccaggctggagtgcaatggcatgatctcagctcaccacaacctctgccttccaggttcaagcgattcttctgccttagcctctcaagtagctgggattacaggcacgcaccaccacgcctggctaattttgtatttttagtagagatggggtttctccatgttggtcaggctggtctcgaactcccaacctcaggtgatctgcctgcctcagcctccgaaagtgctgggattacaggtgtgagccactgcacccagctaataataataatttgaaccaacattctaggcattttccctaaggaaataatcagaacgtatgcagatttgtgtacaagattgtaagttgcaatattgtttttgacctgaatgtgtaggtttcagtggggaaacctgatccccagtccctgctctcctcccaccccaaccccatccatctactacctttcccaaatagagcttgcgtagggccattggtgtccaggatccagagcagggcatgggtttgtgggaggtggtggttggaatcacctggggttggatactggacttagttcctctatgggtaaatgagagcctggggattgtcggaaagaggcctagggtgaaaattaaaatgacttaatttcaggagcagtcttggccttggagattcatgggacttaagagaggaagggcagaggctgaccgtgtagatggtagcttgttgctctacctgggccagagaagcctgcttgcctccctatctccaaggctgaaagagggttgtgcagctgaagatacaggaatttaggatacaggcaagtgccatgacctggcagcttggtatgtcgctacactgcaggagcctgctggcttcccaccactgggagtgccgttaggtgtctgtgctagacccatggccagagggtgaaaggaggcatgagtaaataggcaagagaaaagcgataatatgctggaagaggccttagagccagagggagaaggagcagacagactctcataaataaggagttctggtgaaacagaatttctgcgagagattcaattatagcaaaactttatggaaccaaaaagcttaaaaaaaaatcagaagtttaatagataaactgaaggagagaatggtcagcacaaactgagtagcctgttagatcaagtggaagaaacactcaaacacagcaaaaaaagagagagagaaaggaaccatgaaagcaaagaggtggaggaccaatcagccctgaagtcgatggtgatcaacccattcctgaaccatccctgtgaccggcagatgtccctctgcttgacttgcttaggcaggggtcctctgaactcatcacagagccaagggagaatgggatgaccttaatgggttaaaccagttagggaacacactggaacaaggggtagagtctgtgccacaaacacaaagagaaagggtggaagtttttttagtgtacaaataaccttgaatatctcctgtagtgacacatggtgcctaaccgaatgaaccgttgtgaagataaatgagatcttgcataacatgtttaacacaatgcctcacacataagccgtggagaaatagttattttctcatttgtgttttaaaggagtatttttttcttttttgagactgtcactttgttgcccaggctggagtgcaatggtgcgatctcggctcgctgcaacctcggcctcccgggttcaagccattctcatgtctcagactcccgaatagctgggattacaggcatgtaccaccatgctcagcaaatttttttttgttgttgtatttttagtagagatggggtttcaccatgttggccaggctggtctgctggtctcgaacctcttgacctcaagtgatccacccgcgtcagcctcccaaagtgctgggattacaggcatgagccaccgggcatagccaaaaaagagtttttagttttttttttttttttttttttgagacggagtctcgctctgtctgtcacccaggctggagtgcagtggcgcgatctcagctcactgcaagctccacctcctgggttcacgccattctcctgcctcagcctcccaagtagctgggactacaggcacctgccaccacgcccggctaatttttctgtatttttagtagagacggggtttcaccgtgttagccaggatgctcttgatctcctgacctcgtgatccgcctgccttggcctcccaaagtgctgggattacaggcgtgagccactgcacccggcccaagttttgggtttttttgttttgttttgttttgagaaggagtcttgctctgtcccagactggagtacagtggcgcgatctcggctcactgcaacctccacgtcctgagttcaagcgattctcccacctcagccttttagtagctgggattacaggcacgcaccactatgcccagctaatttttgtatttttagtagcgacggggtttcaccatgttggccaggatggtctcgatatcttgacctcatggttcacccgacttgacctcccaaagtgctgggattacaggcatgagccaccgcgccctgcccaaaaaaagagtaaagtttgaagggatgtacatgctgttctgtttgccagttcatcttaacggtgctgtatttagaaccctggaaacagccgggcacggtctcaaaacaaacacacaccccgtggaaacaatagaatgttgttactctgttgttacttagggagtgttttttcaaactgtactgtgcttgttactcacatgggggtcttgttgaatgcagattctgaattaagtgcccattctgactcagtccaactgagtcctgaggttctgcatttttagcaagctcccaggtgatgccgctgctcctggaccgcagactgcactgagtagcaggcacctgagttttgcctgtttttatgattgattgggctccccacggcatccatcttctagccagtgggaaaggggagaggaagtacagagcgagcaatttcctttttttttttaaccccatcttttattttgaaaatttcaaacctcctcaatttttgaaagaataatgcgcttcaccagttgttaacaatttagcaatattcttttaagcacatgacacagaagttgccaacattgtgctctctcttgttcactggtgaaacttttggcacatagcctgatcctgctgcaggagaggctgagaaataaaagcctagcttgacagtgatctgcctgctgaagggggtgggattctgttactactagatgatgataaagcagttattttttaaaaggagaagatggcagagtaggacaatggatactaggggacagtttgacacgcagactcaaatctttttttttttagatggagttttgcttttgtcgcgcaggctggagtgcagtggcgcaatctcggctcactgcagcctccacctccagggttcaaacgattctcctgcctcagcctcccaggtaggtgggattatgggcacatgccaccacgcctggctaatttttttgtatttttagtagagacagggtttcatcatgttggccaggctggtctggaactcctgacctcaggtgatccacccacctcggcctccggaagtgctagaattataggcgtgagccaccacacccagccaagactcgaatcttataaccagttctcttcaaattggattctggaaagctcggagttgaaatatacagcccaggttggtcgtggtggctcacgtcagtaatcccagtattttaagaggcccaggcgggcagatcacttgaggccaggggttcaagaccagcctgggcaacataatgacattcccatccctacaaaaaaacaaaaaacccaaaaaacctgttttttaattagccaggcatggtggttcacacctgtagtctcggctacttgggagactgaggcggaggccaggagttggaggctgcagtgagccgagattgcgccccaggctgggagacagagaccctgtctcaacaacaaaaacttcgcgttagatcttgcattatagaacccctacaaccggagggcagcttaagttgcctgttttactcagggacagccctaaactgcctttcgccagaatcggacggctgagaatccagtgtcgtcgcggggtggtgctgccagctggctccgggtggtcggccaggagccagccttgtgcacctgctttcagttgttggccagccccggcgctgcaggccctcgcgagcttaggatgcgcctgccagggcctgtgcgggggggccactcggtagagccgcgggacctcggcccggaaaccgcgccaccggcgtccgcacacgctaggccggggagcccagaggtctggccggccatgtctcggcgacctcccggagcgagggacagggaaggagccggccctcaccagtgccccgcatacgggatcctgggcctggcttcgcacggagcctgcccgctcccaacctgcccgctcccaacatggcggcagcgccggcctcagggggcggggccacgtgggggcggcggccaatgggcttccgggctgcgctgccggcagggagcgggaggcggaagtgccgcgggctgccgcctccgtcccggctgcggcccctgccggttacataactcgttgcgggctccgcgcggtcccacttcccggctcccttcgcctccaggatgcgctgagccctacaacacccccagcggccgccggctcccccacgaggtgaggtggcggggggcggccgccggggctcggacctgcggcggggcgccgagggggcggggtaggcggggaggccgcgccggggtcaggggggccagcgcccaccgggtacgagcgcgctggtgaggcaggcccggccgcgcccgcgcccccggcgcacggtcctcccgggagccggtttcggggacggcggcggggagtgggcgctggccagggacgagggttgaggaggtcgcggctctcatgctgggtgggagtcgggccttctgcctgggggttgcgtcagtgtccgaccccgcgatgagtggtcgggacaatttgcaactagagggtggtcctcatgggtaccctgtggggtgtcgcgcgaggtgaagggccaggccatttccgtcgggtcagcgatttccgccttcgccccgctctcgcctggcctggtcagggcctgttttggtacttgttgcgccgattggagtcatctgcgacttgtttgccctcctctgaactcctgaaagccaggggctccgtctaggtctcctcctagtcttattctcccagctttcgttgttaagacaaattccttacgttcctggccctttacagaccggccctacagaacccacacccccagctccgactttcttctccagattgggtacttcccagggagtaaagggaatctgtagcttttgtggtttgtcctgctgggaaaatttgggggtaagtggtgggccttctctggacgaccacccacaaatctgtgtgcccaaacggagacaggacccagggtctggacatcaggcaaggggtactctgcagtaaacgtggacattggccgtttcgtgggtttgttttcactctgccaagtccttgaggcgtacacttttgtgtcactcatttatcttgaaagaaaaggttaacagcccaacagagtagttcgctttggtatctggagtggtaatcagagtgccagaactggagagaacattgccgtgtacagatgtttgccttttaccagggcactgaaggcataaaacccttagttaatgcttaactgagtgaaccatgaaagtcatgtgactccaaaggtcgactctagaaatgcggcagtccatgtagcactgtgatgtagaaattctatgatatatgggtcagtgttcacaggcagggagagggggagtcttcaacatctttgaattaaaaagcatctggggcaaaaacaaataaatacacacatatcagtgaactgctttaagttcagttagagaaggtgagattaaagaccagaagaaactcgagggagactgctgtataagtcccagttatctttccaaacagacaggttcatcacagcagtgaaggctagtcttcatctcccttcttgtgggattttctacattaatgtgcagatctgcccttggagaatggggcgtgcatgattgggctgtggtttgctggagtttcatcttactgaagttgcagacactgtgggtttctgtgacaatggtttacactgaaagtagcaaagtcaaggcatggtctggtatcagcatgccagaataaaacacacagacagctttttaaaaggtctgtgtccgtcctatctttagcctctcctggttgtaacttgaagtgactttgttgccgtgtttgttttgaccaggccgggacagtatggagagtatctttagatgtgacttatctgggttgcttagcaacagcatgcttcagattagaatggaagaaagttcctggatgtgaggagatttgaatgataaaagatacttacacctaaaaggagaccaggagggattgtgccctgttcttgctaactgggtgctcgtaactggagacggggtgtacctgttagcggtggttagacgaggtggatacagaatccagaatggtcacattgcagccatagggaacagatagatgcagagaagaggcttcagccctctgagttagggcagtgcatggccttgctctgctgaaatagcccagaggtcccatttgcttggtgacatctctcacttgaatagaaagctggctgtttatcagacactgttttcttaaatggcagctcctccacatctgcgtcatctccattatctcccctatccatctctttttggaaggaatccacgaagccctcatgactgtttgtttgtttttgtttttttgttgtcgttgttgttttttggagataggttctcactctgtcgcccaggctagaatgcagtggcgtaatctcggctcaccgcaacctccacctcccaaactcaagtgattctcctgcttcagcctcctgagtagctgggattacagtcatgtgccaccatgcctagctaatttttttgtatttttggtggagacggggttttgccatgttggccaggctggtcttgaactcctgacctcaagtgatccgccgcctcagcctcccaaagttctgggattacaggcgtgagccattgcatccagcccgccctcatggcttttacacctcttttcctggtttgcagaaagcaaggctggggtgtggaccctgcatcgaagctggttctgcttatgtccatgtgaagtgctttcaagtaaaatgctgatctgcaaaaagatgctgaaagtcctttgtctctttctggctaagttcaaatgccgaatttgattcagcaaatagttgtgagtgccttgaagtgcaaagaatgatccaggatcaggactccttccctacatatcattattttgatatgtatgtatgtatatatgtttagtgacggagtcttgctgtatcacccgggctggtctcaaattcctggcctcaagccatcctccaacctcagcctcctcagtcgttggggttacaggagtgagtttgccaggctctatatcattctttttagcatgacctctgataggaggctggcaggacagttcaggacttatcagaagcccaaatatcttacactgctgattaaagagagacctgtgtttgaaaaccaaacgggcatataataggattaacattctgctatgaacactaaggcatttgcgtagtgcttgtgggagtgataggaagggggtctgaaccgggggagccagggctttctgcaggaagtggtttggggtccttgtcaacagtgaatgctgcttaatggagccagagtgcccccctgcggaggtgggcagagaggtgccagtcaccccaaggtgccacagctctaagctgagatggtcagatagagggaagcaaacaagggccactccctagtcccaccttgtcagcagctcagacgggattccccatctctatctcagccagggagaagccatcgcgagaactggctatgagtgcgacagcttagagatgttgcaatgtctcttcaagttaggagtgaaattattatccattttgccccaaaatggactcttaaacccccatacacttggaatagcatgtattttgtgctttgaagccagaaataaacattctaaacaaagatttaaagttgcaatgaagaggaggtggttgtggacagacatgcagaacaaatgtttgagaaatgttccctttgcttccacagaaaaacaaaagaaaggcattttctcgtgtttgacaaaccatgttaaaaaaatattcttggccaggcacaggggcccagcactttgggaggccaagtgggcagatcgcttgagctcacaagttcgagagcggcctgggcaacatagcaaaactccatctctaaaaaaatacagaaattagccaggcatggtggtgcgcatctgtcatcccagctacttgggaaactgaggtgggaggatggcttgagcccaggaggtggaggttgcagtaagttgagatggtgccactgcattccagccggagtgatagagccagaccttatatcaaaaaaaaaaaaaaaaaaacctttcagtgctattttttgtggtatagttactgttattaaaaagcaaatggcatttctctttttttgtttactgtattcctgaaatagggtcgatttggccagcaaagtattgacactggggcccatcttgaaaacaactaactattgaagaaaataatttcattttataaaatagtagttgggtaattctcccttaggtaccaaaaagggctcttttctggaaaatgttaatgcaacaatatttccctcattcctttggtgttcatgggtgttctattgaatgctgttccattcttatttctttctagaagatagctcattctgactcctgctgtaaactgttcagagattattctttccagagtctgttacattcagaatgtcttgctagtctgtcacttgctgcccttctctttctacttagtttcagattactttgcatctcctctggcctcccgtttttaaccttttcattgatgtatacacacagaaaagtgcactgcttgatgagttgacatggcatgaacataacctgtacatccccaacgccagaagacccatgggcccccttaccaggcaagccctcttctattaagaaaagcgtttttcttgttgtaagcacaagaaaccactaatagtaattatactagggatggggcgcatacaggattcggaatttttgctttgtgttgcacatgaattcttactttactatgaacatgggttgctttgacaaatttaaaacaaaggcctgaaaggactccccttactcaagaaaaggaaaatgccttttttaaatgtttttttgaaatggttgtcttaaaatttctaaatattttttaaaattagattttatatagccacgcaaattgttctttaatggttatgtaggaatacaggctgcttggcctcccttgtccacagcctcctctttgtttctttgcgactttgactctgtgtttagaacatttatttccgggatgagtgcacaaaacaccatgctactccaaggcacagagtttcagagtcagcgctgagtctattttagagcaaaatgggtaacactactcataatttgaaaacacactattaaatacccaagctgttgctaactaaaagcagcctgtgaggttattttaatataaaaatgcaagctgaggccgggcccggtggctcatgcctataatcctagcactttgggaggccgaggtaggtggatcacttgagctctggagttagagaccagcctggccaacatggtgaaaccccgtctctacaaaaaaaaaacaaaaattacctgagtgtagtaacttaatgtctgtactgtcagctacttgcggaggctgaggcaggaggattacttgagcccaggaggtggaggttgcagtgagccaagatcgtgccactgcactccagcctgagtgacagagtgagaccctgtgttaaaaaaaaaaaaaaaaaaaaaatgcaagctggcgcggatgcagtggctgagacctgtaatcccagctacttgggaggctgaggtatgaggatcctttgagtccaggagttggagaccagcctggacaacatagggagacccagtctctacttaaaaaaaaaaaaaaaattcaacctagacttggtggcttgtgcctgtaatcctagctatttgggaggctgaggttgagggatcccttgaaccctaaagttcgagaccagcttgggcaacatagtgagatcctgtctcttagagaaagaaatctatgtgtgtgttcgtcattttgacatacaacatcttcacttttttctgacaatgaaaacaacccaaggttattgcaaaaaaaagatccagtaatacagaaacaagtgatacagaatggaaccgtctgctgcaattgctggggcagattcaggcagaaatttggattacttttattttattttattttattttattttgagacagagtctcactctgttgcccaggctggagtgtagtgatgaagtctcggctcactgcaccctccgcctcctgggttcaaacgattctcctgcctcagcctcccaagtagctgggattacagccaccatgcctggctaatttttgcatttttagtagagatggggtttccccatgttggaactcctgacctcaagtgatctgcctgcctcggcctcccaaagtgctgggattacaggtgtgagccaccacgcccagctagatttatatttgatagttatttgattccagaggatcttaagtgcaaacccagagaagcagagagtaaaaagcaaaaaggcaacaaaacccagcagatggtgagggaaagggaagaagccagggaggggcaagtggggacaggaagtgctctgaaacccgaccctctcttgctgggctttctccttttaaactgaggagctgctgtgtccatctcgcccgctgcttcctaggcggtacagagggtttcctgtagccttaagttttctctccgagaacagacagattcttggttgagccttaaacagggtccagtcttgggtgttagtcaagaatgctgttcaagtaaatacgttttactatcatttgactcccatgtgcccccaaacctggtattatttacaggtagttttgttgttgttttgtttttaaaccaaacaggttgacccattcactcaatctgagttaggaaatatattccaggcacaacctatcaggcggttgcctgcaagatcccagctgaaagcatcgctgggacaaaggtgatgctttggcagccaccctgttggctccgtccagcccacacctcagttgtctcaagctgctctttcagtgggaatgtgagatctggtagcagaggctcatttcaccccaattttctatttcagaaaaaggggccgggtgcagtggctcaagcctgtaatctcagtactttgggagtctgaggcgggtggatcatgaggtcaggagattgagaccatcctggctaacagggtgaaaccccgtctctactaaaaatacaaaaagttagccgaatgtggtggcgggcgcctgtagccccagctactcgggaggctgagacaggagaatggcgtgaacccgggaggcggagcttgcagtgagccgaaattttgccactgcactccagcctgggcgacagagcgagactctgtctcaaaaaaaaaaaaaaaaagaaaagaaaaaaggaaactcatccgaagcaagagaggcagccacggggtcccatcttggcagcacatcttctggtccccggtttagcgttctgtccttctcttgggtcatgttcttgtctctgttcttcctcatcccttcttcgtccttgtcatcgccacttctgacactgactgagtggggccacaaaaggtgagtcgtccttccggctgcccccaccacaatccagccctggctcaagagcagggaaggtgctgtcccccaggctgcagacgggggttagtacagcaacctcagacagcttcctctctggggggaccctgcgtgtcttgggtgcagtttcgaggaggatgcagagggatggatccctgccttcttctgtgtgacccctgcggtgggggagcatccctgctcagcccaggggatggcacttttcatgtttgccgtgagattcctctagcaaaagcagtgggttttgtgagtacttaggtaatggtgccagaaagcaccatgacaccctggtatgtccgccccatataatcagagaatctgactctgctcactgctgagaccccgatacccagggtagggcctgaattttcaatgcaattgcgataaattaatgactaaatggattctcagtttgaaatgtaaggcgtgacagaacgttcaacccagggaagattgagtcaggacccgggaccttgccggaacacctgtggccgttgctgctgttaactgaggtgtaattaacatgcagccaagtgcacagcttcacccagcagatccgtacgttttgacaactgtgaaacaagacgtagcacatcgccatcgcgcttctcagctccgccttcaccactctgggtgccagcaccggcaatttgtttggccagttccagagtgtcataaaaacagaatcctccattgtcactcctctgtccttgaagagatatgcatcgagttgtatgcggccactctgcgggctcccctcggcacatgatggtcttcagagagaggctgtttggaaatagagtggtgggtgtttgcttcttgtcacccggcaaatgattcatttttctgctgctctgacactttggaagaagccagggatgctgaggagatggcttgctctcacgtgggcagctgctcctttgagaaacaagccatgcgcagtgttagctgctgacatcctccacttttagcccttgagcccatttcactgatgagcaagacagtggcctgtatctgtcactaacgtgcttttctttttctcccctgttccccaaagacaggagtgtggagttcatgagtgttggatttttcaagctagtaaaccttgcagctgcaagtggtgtttaattcttgtggtatggatgagcacatgctaatctcccttgagcttctcttgagcagaagcctggtgtgctaacgggcaggactggggtggtgctttgagaggaagagggggaaggtggcccgagagggagatctactgagatgtgagctgcctggagtttggggtggggattcctggaggggctctggattttgcagagggacagctgttggtgcaccttcaccagtgtgctgggacagaaagtggggtgagtgggtgagtgaggaataagtgtttgaagggcaggagtaaagcagaaaggtggcagcaggtgttgagctgcaagtggttccattgcctggaaaggaggtggcagggaggcctgcccaagatgggtgcctgcagggtgcggacagcctgtcagaggtgcggaaagcctgacattgaaaatgtcagacagtgggtgcttgggccagagagaaagagcctgaggagctggaccaggggttggggggcggcctttagaagcagcgtctcatgcagccttcccagcgatcctgaggtaggtgggagaatcttcaggccacggctgagaagctgaagcgtgtggcgggagatccgtctcagaacacctgagatccctgcagggtctgggagcatgttaggggctcagagtgcaggtagggactggcagggaggagctgtgggcgggaagagagagaagggagggcagggcagtgtggccatggccagctgaacactgggagtctgctcctgaggtcatggatggaggccaggacacctctcaagccattaagagggtggcctttccaagcgcagcatgacttgttggtcttgaagcagtgccttcgaaggaggaggagtcccccgtggacttggggcattaggacagggactgccaaggagagagggcactaggaaacagggttgtttttggcttttttacctggggtgcaagtggagcaccctgtgggcatcatgagggtgtcaggaaacccttctggtaactgaaacgcagtccattctgtgtcccccagattctgagttttcagcacctgacagtggcgggggatggcagacacacctgtgggtgctggagacatcttggcggcccttcctccagtttggcatcatagtcccctgtgggctgagcacatggggctcctggacagttgttaccgatggagggtatccaggttcttgacatcttgaacaaagaattggacaaaacggcacaaacaaagcaagaaaaagatgaagcaacaaaagcagatttattgaaaacgaaagtacactccatagggtgggagcaggccctggttacagaattttctggggtttaaataccctctagaggtttcccattggttatttggtgcatgccctatgtaaatgaaagtgacctgcgatcagtctgattggttgaggaaagcagccaaccagaggctgaagtgaagttacaaagttacatcctatgcaaatatctgattcattgtggaaagcaaccaatcagaggctgaagtgaaattacaaagttgcactcctatataaatgaagacttggccggagaccagcttgattggttgcaggaggggaccaatcagaggtactttcagttcttgatctgcttggtagaaaagcaggtcggtgtgaagggagtagcctctggttcttttgttacttggggatggaaagttggggttttcctttggatttagttctaagaagtcagcatgaattggccttaggttccctgcctccagaccctattctcctgcctcacagtgatgttgatcagggggctcagcttggctctgccagttcagacaccagccccttccagctactgccagtccttggaggaaagcagtcttggtaccgtgtccggagaggtcatttccatgtaaaagaaatatgaggtctacaggcagctcaggagcacggagttgggggaagcagagaaggtgtgagtgccgaggcgcaagcacggcttttgtttgggtcaagcaggatcagtgcctccctccttgcatcgctccacctccggaaggcggagaactgcgatgcagacccaggaggccagccaggagagatttctcaccccaggctcgagcctttgaagctccaggttctaacttaaaaattcaagggagtggccgggctcggtagctcatgcctgtaatcccagcactttgggaggccaaggcaggtggatcacgaggttagggatcgagaccatcctggccaacattggcctgacaaggccaacaaccttgtctctactacaaatacaaaaattacctggttgtggtggcacatgcctgtaatcccagctacttaggaggctgcggcgtgagaatcgcttgaactcgggaggcagaagttgcagtgagccaagatcttgccactgcactccagcctgggcaacagagccagacaacatctcaaaaaaaaaaaaaaaaattcaagagagtttcgcattctcccgtgcaatacttccctgcttgttgtagtagagatgcgtcctgtgcctttttaggaacatgttctgaaagatggcttgggcaactgtgactttagtgctctatccccccagcactgccctggtacccatcctgtttagagggctcagagcagagagcacctgcctggcagggcccgtctctgactttgccttgctgctcctcccagcactgccctggtacccgtcctgtttagagggctcagagcagagagcacctgcctggcagggcctgtctctgactttgccttgctgctccccccagcactgccctggtacccatcctgtttggagggctcagagcagagagcacctgcctggcggggcctgtctctgactttgccttgctgctccgcacagcactgccctggtacccatcctgtttggagggctcagagcagagagcacctgcctggtggggcctgtctctgactttgccttgctgctccgcactgcactgccctggtacccgtcctgtttggagggctcagagcagagagcacctgcctggcggggcctgtctctgactttgccttgctgctccctgttatcagcactcttgtccctgtgtcctccgggtggcctgcagggcaatggaagatgagtacttagtagaaggttctaggtgggcacatgagggttccttgccagcaccagggctttgttcacacaggtgttgcatgaagccatccagccaagagccagggctccatgcctctgagccctcaggcactgcatcatgctgggcctcagctccatacctgccgcgtgtctgtctcaccatcactgtgctcaaggaaggtcgccaccagatgctcctctgtgcgccgggcctgctggggctgccctggggcctggaaagtgctttaagcaggtcctttgtctcgtgtcaggggatgggctccaaagttagtggttggaactaactttgccatctgctggagggctttgcccctgccatgccttgagcccacacatactccaggggtgactgacacagttggttttgcatcagaattggccattgccacctctgaggggctgggaaatgggtgaccctgccccacagtgcctgcactgcccccagcagacaatgctgggggagcagcttcccaccaggcctggcttggggcttctccagggaagcccaggtacacctcccagcctgtaggtgaaggtgcctggaatggaactcgctattcccagaggcacagagctcccgtcacagcggctgggtgacagcagtaattctcgcagatgttcaggccctgggaccccagaagtgaaatgacccagggcgtcagcaggaaaggaggccccactttttcaggacctctccctccaaccagctccacgtccttcccaaagctgggcccagcgtggccctcatagccagctccgtctctctctccttgggcctgctgtgactgcaggcacggatacactggggagacgggatgtagaaagctgtgggaagagggagcaacggcagggcaggggccagtggggttggggggggccgctggccctgcctttggatcatctccgacttgatcagcatgaacccctgactctagagggaggctgatgggccagggcacatgtgggtccccctcactgcctccgcagcagtggacctacagccatgctctttgaccccatctcttcctttcatgggcacacaggtgacccgagtctctgtttcgtgcaccttcctgcctcttctctgcccctcagttgggctgagacacatgaggtgctgtgatgcatgctgcatttggccctgacttaggtgtgacgcgtttccatttttaaatcgagtgtaaagaactggcctccagaaacacggaagcacttttagtagggatttgaaaatccgcagatcgttgtgtatctcagagcccagtgtttttcttgaaattcacactggaaacaaatgaggatactgggggaaatgtgcagtcccaggacatgagagatgcgagcttattacgaatctgtctttggtaccaagccacaatatagagatttgtgaaaatctttaaaaatcaacttgactgggccgggcgcggtgctcacacctgtaatcccagcgctttgggagggcaaggcaggcggatcatgaggtcaggagatcgagaccatcctggctaacaaggtgaaaccccatctctactaaaaataccaaaaaaattagccaggtgtggtagcaggcccctgtggtctcagctactcgggaggctgaggcaggagaatggcgtgaacccgggaggcggagcttgcagtgaaccgagatcgcgccagtgcactccagccttggggggcagagcaagactccatctcaaaaaataataataataaaaagatctggaacgttttcgtcccctcaggaagtcatccctgccccaggcatccacggaggtcaaggccttgccaaccccacttcctgggtccagctctcaggtggttctccctgtggcctccagacccgggctgtaccggctggtttcgcaggttgcctgtgctcatcctgccctctccggtgagagctgagccggtggtgtttttttcagagccagctggccctgcaggagctcagaaacctgggcggctgggcctatgggctctggagttctgcccagggtggccaggtgggcagcctttcccccgtgctggttcctgtagcaaggaggaggccgtgtgctggggcccttgtgtcaggagctgtctctggaaaggctgaatcgaggaaccagcctctgccttgtccgtcgatgttgtggggttagtggctttgtcccagagtttcaaagtgtgggtaagtggtttctgggtttgccagttttcttagcccttaggggaaagggggtgggagcctgccctcagctggcttcgtaaaaacacagtatctgtgcttgagttacacgcccggcgtccttttgcgttttgagacctcagtggagtgtgcgggccctgagtagtatgcacccactgacagtgaaccagatgctgcccccctgcggttccagtgtatgtcagtgccagccacgtgcccaggacccaccgttcccagggatacaagatcccgtggcccatggtggcagctgcggcacacagcgctgctttccagagctctcagtgcggacaacagaggccttgcattcagtcacctggaaaacccaccatccacattggaaacccagtctctccggaatgagaaatttggttggttttctttagctttttgtttttttgtttgttttgtttattttttgagacagaatctcactctatcgcccacgctggagtgcagtggcacaatcttggctcactgcaaccttggctcactgcaacctctgccgcccaagttcaagcaattctgttgcctcagcctcctaagtaactgggattacaggtgcctgccactgcgcccagctaatttttttgtatttttagtagagacagggtttcaccatcttggccaggctggtcttgaactcctgacctcatgatcggcctgccttggcctcccaaagtgctgggattacaggcatgagccaccgctcctggccctggttggttttaattaagaacattttcaaacatccacgtggcatacccgttatccagatctaacgcccattaatattttgccacttttttgctccaactaaattaaactaaattctggaacattctgtcattttgcccctgcatattccactgtgcatctgttaatataaaatatggactttttgtacataaccacaagactcttctcacacctgacaagattaacaccttcatctgttcttttagaggttttgttcctttgtgtgttctttgtcatctgttttgttttgttttgttttgtttcgtttcatttcgtttttgagtcagaatctcaccacgtcacccaggctggaatgcaatgacaccatctcagctcactgcaacctctgccacccgggttcaagcgattcttgaacctcagcctcctgagtggctgggatgacaggcacaccaccacgcctggctaatgtttgtatttttagtagagatggggtgtgttagtccattttcatgctgctgataaagacacaccagagactgggtaatttataaaggaaccaggtttaatggactcacggttgtacatggctggggaggcctcacaatcatggcagaaggcaaaagtcacgtcttacatggtggcaggcaagagagaatgagagccaagcaaaaagggaaaccccttataaaaccatcaggtctcgtgggacttattcactaccacaagaacagtatgggcgaaactgctcccatgactcagttatctcccaccaggtccctcccagaacatgtgggaattttgggagctacaattcaagatgagatttggggagggacagagccaaaccatatcatagtgtttcaccatgttggtcaggctggtctcaaactcctgacctcaagcagtccacctgcctggacctcccaaagtgctaggattacaggtgcgagccaccatgcttggccccagctttttgttgttgttgttgttgttgttgttgttgttgttgttgttttttgagatggagtcttgcactgttgcccagcctggagtgcagtggtgcgatcttggctcactgcaacctctgcttcttgggttcaagtgattcttccacctcagcctcctgagtagccgggattataggcacctgccatcatgcctggctaatttttatatttttgtagagacagggttttatcatgttggccaggctggtcttgaactactgacctcaggtgatccaccagccttggccttccaaagtgctcatattacaggcatgagccaccattcccggcctatttttaaagggtctggagtcaacagtgcatggatccagaaccgtgggaacaaaggggtgggcacaagggcggggtggggggtgtgagtttagagaggcttctccctataaagctgagcatgaactacttggcacacctgacgttgaaccaggagctgagaaccacacaagttaggagtcagagcagagctgctcaggacgtcagtgctggccctgtcccaggtcaaggggataccccgggaagtggctggactgagccaagtatcagctagtagtgggtgctcaaggctggtgtagaggggcaccgcctccctgccagcactgtcctgacacttggaccccatcagctcgttccagcagagaaccaccctggggaggggcctagctatctccactccgcagagaaggctccaggaatctgattaactaaggctgagccagcagagagaccagattcagcgtctaaattcctccccttgtcaggaaagggaaggttgtgcagaaacctggacagtggacgccgcgggcacttcccacccatggcagcaggagggcgggagctcagagaggctgggctcgccctgccagtggagtggggactgccagataaaagacgaggtctttcctgggcagtgagtgagtcctgggggcccaggggcttgcctccacaccttgcacctgcccccagcagctttcagctgcggatttcacggcctttcctgattgttgtttgactccgtcatttctgttggtgattccaaaatggtgactttctaattcagtcattatttctacttttattagctggcattcttctgtaaagaactttcctcaacgctgagatgaactacgcagttcctcctaaaaaaggaggatgaatgcagcatcttttcccatttatttatgggtttgtttatttatttatttttagagacagggtcttgctatgttgcccaggctgatctcaaactcctgggttcaggcgatcctcccacctcagccttccaaagtgctgggattacaggcatgagccaccacacccagccttccatcctttccttttttttttttttgagatggagtctcactctgttgcccaggctggagtgcagtggcgcagtcttggctcactgcagcctccacctcccgggttcaagcgattctcctgcctcagcctccacagtaactgggattacagttgcccgccaccaagcctggttaatttttgtattttttgtagagacagggttttgccatgttggccaggctggtcctgaactcctgacctcaggcagtccacccaccttggcctcgcaaagtgctgggattacaggcgtgagccatcacaccaggccccatcctttccttttaacgactaatttccaacttaaagaaccaaggcttctgttttccccttctcggtgcccagcacttggccggccagccttcctccctccattcctctcttcctttctatacaaacttccttgttaaataaaacaggggggctgctcctcccgcccctggattggatgcactttcctgatttaaaggagtccttggccactcgtgaccccgacttgaactgtggtgtcccccaaagtctctttctttccgcccaggagtgttcacttgctgggcggggaggagaaattggggtgtgacccactcagcacaaacccacgccctggtcataaagccgcaccatttcccctgcaaatccagccgttcactgccccggccaccgggctgctttgaagggggatgaggcatgggggctgctgaacccacaactgtcactggcagccactggctggagttgagagaagtcaggctggctggggccgttgaccctcggaaggaccactgtcataagatgtgagaccagtcaggggcagctcagatggggagagaggctggccagggcttccttcagctggggctgagcagtggagggcctggttccccatcctgcctgccctcctgggcctgggtcttcccagcgatgggggcgactgcagcgcctcttgggagggcgatcgtgagaggcagaggcctctgagtgctggctgaggggtgtccacccgtgggacatgctccgtgctcttctgtctcgcctgcctcacaagctgagcatgaggaagaccaggctgtgaggtgacgcgtcccccccacccttccccacaggtgtgaatgacagaggtggtgccatccagcgcgctcagcgaggtcagcctgcgcctcctctgccacgatgacatagacactgtgaagcacctgtgtggcgactggttccccatcgagtaagtggagcggattgcagggttggggagagcccgtgagcctcaggtgcagaagctgggcggcgggggtgggggcc

SEQ ID NO: 678 - DNA, 32744 bp, Homo sapiens
  source 1..32744: mol_type = other DNA
acttgggcagaggtcaggggtcacgcgaggtcagtccgtcgggagggctagggagatggtcacgaaacctgaagtcaagagttaaggcttgttggcttctggtgagctcgggtcttgggaacgtgtggcggagtagggagtgaatcaaagccggcactgtggtttaggaatttccttaaacactggggaagcatttccgggcctcctgcgggttcacactgcctgtttccggcgcgtggttcttggcagtgcggcctctcgcttttgactgctcctgagtctccttttgctgtggttcttgtatttggggaagtgtctcaaggcgcaggtatgggatatacagcgccctgccctgaatcctgggcggattttcctgtgaccagcctgtttgttgactcttcccgggagttccactctcacttctgcgttcagccctcactggaaaggcccgcaggcaggtagcacctttctgaggttctggatgtgacagcttttttttgctgtattttttttttgtcttccattctgtggttggagcctttacacttaaaatttttgaactttctttcttcactcctttcctgctcctgcccccaggcaggatcgtatgtccctccggaattcacaaaacatgatttgcatttccctgaaatgtgagattttcctactactgtagtttttctgtttctagtcttttaactgatttgggtatatttaaacgtctcaaaaaactggagtaaataatacgctttgatggatgtttcaggtgtgattcccttcagtacggcggcaccgtggaagtgcagactttcacagggggtgtggtctcagctcacacaggtgagggatctgctaccattttgtgtgctgatgctaatgggagaaatgtttgagataaagcaattataggtccgtattggggattttcactctagagaagcatgggaatgtttgcatgtgatttttctgtagagggtttgattatagtacaacaacagaactgaggctgtgggttgaggaaaacgtggtcaacctggctctaccaggaagagtagcaggttttccttggttttggcatcagactgtggattgaagccctcctatcacttttttactgtgtaaccttccgcaaatcataaggtcttaacttcgtaacttacaaaacagattatattagaatgtaagctacatttaggtcgggaatcctttctgcatggctatatccgttgtgtgtaggaggaagtcaatatttgttatgctgtgaaaagcacttggtttttaaggtaggtgtgaggattatagaacacatcaaacaggtactaaaagtatcttatacatagtaagtgctcaagaaatgtaacctgtaatttctgtgtttctctttattcagtgttatttctggttttttaaaaatactttttcatcccctttaactgcatttctgtctttttttttttttttaaccctactttaggtgctccagaggctggtggacctgagcggaggctgggacgccctggtgggccccgggccctggaaggcgggtcccggtggccggtggcccagaatgaggccagctcccagcatgccctgcagccggacgccagcccctcggccagcagtactggtgataacaacccagtcattcttcaggcatccaagggggagcctgggagtgggaccatgcagagcagcccctcccctgctcaccctcagctcccagtcctacagacacaggtttgaaagtgggaagagttccttctctgcttctgctttgtggattgttgagtgtgaggcagaagaaatgtggcaggggaatatttgtggagagttttggagaatctttggtgctcgggggctgggctgtagtatatcaggtctgttggatactcacattccatttaacattagtgtaatattatctccaagagtgtaaaagcgcctcgttacctgaaaaaggttgaattaggctaggctggaaatggaggtcgtggcaccatgcttctaataccatacgctttaagaatagtttaacttctatcagtactggagtaggataagcctatggatggtgtgtagtgttcattcctttctcataccaaggaagggtgtggggtaggaaaaaaagcatgacttttaaacacatctaggtgtgtgtacagtcagctttctattttaattttttaaatttttctataaaaagggtttctttattgtgtcatccttgcacaggggccatgctaatcttttctgtatcctcccagttttagtatatgtgttgccaaagtgagcagtacagtaagcttttcatgtttgtaaagttggtatttatagttttcctgagaaactggggaaatttgtgacatacagtcttgtcatttagccgaggtaggaatttgagtggcgcagtgtaaggcttatgtcctggagtgaatttgtgaattccctgagtatccacctttcagtaggactttgttttccatttttttcttttctttttttttttttttgaaatggagtgtctttcagccaggctggaatgcaatggcgcgatctcggctcactgcaacctccgcctcctgatttcaaacagttctcctgcctcagccttgcgagtagctgggattataggcacccaccatcatgcctggctagtttttatatttttgtagagatggggtttcaccatcatgttggccaggctggtcttgaactcctgacctcaggtgatccacccaccttggcctcccaaagtattaggattacaggtgtgagcccccaggcctggcctattttccatttctttctttcttttttttttttttatttttaagatggagtctcgctctgtcaccaggctgaaatgcagtggtgtgatcttggctcactgcaacctccgcctcccgggttcaaacaattcttctgcctcagcctcctgagtagctgggactacaggtgcgcgccaccacgcctggctaatttttgtgtttttagtagagatggggtttcaccatgtttgccaggatggtcttcatctttgacctcgtgatccccgccttactcagcctctcaaaagtgctggaatgacaggtgtgaaccaccgcgcctggcccagagtttcgcttttgttgcccaggctggagtgcagtggtgtggtgttggctcactgcaacctccacctcctgggttcaagtgattctcctgcctcagcctcttgagtagctaggattacaggcgtccgccaccacgcccagctaattttctgtgtttttagtagagatggggtttcaccatgtaggttaggctggtctcaaactcctgacctctggtaatccacccgcctcagcctccaaaagtgctaggattacaggtgtgagccaccgtgcccagccctgttttccaccctccttccctccctccctcccttccctccctccctccctcccttccctgccttccctccctccctccctccctccttccttccttccttccttctctccctccttccttctgagtgcaatggcacaatcttggcttactacaacctctgcctcctggttcaagcaattctctgcctcagactcctgagtagctgggattacaggctcacgccaccacacgtggctaatttctgtatttttagtagagatggggtttcaccatgttggtcaggctggtctggaactcctgaccatgtgatccgcccgcctcggcctcccaaagtccaccgagcccagcttccatttcttaatgcttttgcagtaccttgtaaagtgacgtgttgggtgtttgagaacattggctatgcctgcagcccatgcctgtccagtgaagaggttaaggtggcctgggatttattggtggctgttgaatttagtggtagctcacatttattgcataagtgagtttgccacacttgttctgaaaatggagggtaaatagggagttgtttatgtgcatgaaatcactgaggctctgaaacgatcagaatttgaaatcatatgctatatatatatatatatatgtatgtatataaattttttttttccttttcctttccgagacagagtcaccctgtcatccaagctggaatgcagtggcgcgatctcggctcactgcaacctccgcctcccacgcctcccaggttcaagcgattctcgtgcctcaacctcctgagtagctgggattacaggctcccgccaccacgcccagctaatttttgtattttcagtagagacggggtttcaccatgttggccaggttggtctcaaactcctgacctcaggtgatccacccaccttagcctcccaaagtgctgggatcacaagcatgagccaccacccccggcctatatatatatatatttttaagtttgggaactgtgtaaatgtcaggacataattcttgcatgtcaagcatctataaacttggctctgccatcttgagtcccttattaaaactttatcccaaggccgggcgtggtggctcacgcctgtaatcccagcactttgggaggctgaggtgggcggatcatgaggtcaggagatcgagaccatcctggctaacgtggtgaaaccctgtctctactaaaaatacaaaaaaattagctgggcatagtggcgggcgcctgtagtcccagctgctcaggaggctgaggcaggagaatggcatgaacccgggaggcggagcttgcggtgagccgagatcgcgccactgcactccagcctgggcgacagagcgagactccatctcaaaaaaataaaataaaaactttatcccgaacgtttgtgtttatgaaaataaggtttataccttactctacacagttttttcttgtgaagatcggatgaaataatgtatctaaaacactcagcacagtgcgaagcatttattttctccatcattttcctcttttctagatggtgtcggacggcatgacaggcagcaatcctgtgtcccctgcctcatccagttccccagcctctagtggggcaggcggcatctccccgcagcacatagctcaagattcctcactggatggacctccaggccccccagatggtgccacagtgcccctggaggggttcagcttatcccaggctgctgacctggctaacaagggcccgaagtgggagaagagccatgccgaaattgcagaacaggccaagcatgtacgtattagaaaggcttatgaagattcttgggagttatcttccgtaaactcccacgtcctcttgagtattttatgtttcttttcttttttgtcatggatttagggtataggttctgccttaatgtatatgatcgtgagcaaactgcttgaatattgagtctcattttccttgctgtaaataaaataggaatgatataatagtttataggctattaagaggtttaagttataggagcaaggccaggcgcagtggctcacacctgtaatcctggcactttgggaggctgagacaggcagatctcttgagcccaggagttcaagaccagactgggcaatgtggtaaaaccccatctctgtaaaaagtacaaaaaattagctgggtatagtcgcacatgcctgtagcagtcgcagccacccaggagcctgagttgagaggatcacctgagcccaggaggtcagggctgcagtgagccacgattatgccactgcactccagcctgagcaaccgagtaagatcctgtctcaaaaaaaaaggagaaaatagacacaaaagcactttgtaaactgtgatgctcttaagatttactggtttctatttatttctatcgtgcagtctgtattacatttatccagtggtaagtgtggtctctgggccagcagcatcagcatcacctgggaacttagtagaaacacaaattctttgccgggcgtggtggctcatgcctgtaatcccagcactttgggaggccgaggcgggtggatcacctgaggtcaggagttcgagaccagcctggccaacgtggcaaaatcccatctctgctaaaaatacaaaaattagcctggcgtggtggcgcaggcctgtagtcctagctactcaggaagctgaggcagggaaattgcttgaactgggaaccggaggttgcagtgacctgagatgatgccactgcacaccagcctgggtaacagtgagactctgtctcaaaaaaaaatgcaaattcttggtacctctcacccaccgacccatttgaaactatgagggtagggcccagcaatgtttttattttttatttttatttttattttatttatttattttgttgagacggagtctcgctctgtcgcccaggctggagtgcagtggcagaattttggctcactgcaagctccgcctcccgggttcacagccattctctggcctcagcctcctgagtagctaggactacaggcgcccgccatcacacccggctaaattttttgtatttttagtagagatggggtttcaccatgttggcgggatggtcttgatctcttgaccttgtgatctgccagcctcggcctctgaaagtgctgggattacaggcatgagccactgcgcccggccacaattgggtttttttttttttccttgagacggagtctcagtctttcgctgaggctggagtgcagtggcatgatctcggctcactgcaagctccgcctcctgggttcacgccattctcctgcctcagcctcccgagtagctgggactaagcgctcgccactatgcctggctaattttttgtgtttttagtagacacggggtttcaccgttttagccaagatggtctcgatctcctgaccttgtgatccacccgccttggcctcccaaagtgctgggattacaggtgtgagcacaacctgtttctaaaagtcctccagatgattccggtgcctcctcaagtttgagagcagctggtctaatatccacgtctttcttgatgtttccttcactgtcaggccatttagtcctgtctggtctctggctgtcattttctctgatttagtttttatcaggagaggacagaaataacaaagacagaggctgggtgcggtggttttcgcctataatctgagcattttgggaatcccaggcaggcggattgcttaaacccaggagttccagaccagccttgacattgtgaaacctcgcccctacgaaaaatacaaaaaaattagctgggcatggttgcatgtgcctatagtcagtctcagctacctgggaggctgagttgggaggctgagttgggaagataacctgagcctaggcagcagagtgagacccagaaaaatctcactcagatttctgagtgagattcagaaaaagaaataaggcagttgtcctgaattttttgagtcgtctctgtcaaaaaaattttaaatgctttttaaataaaagacaatcagtgtagaagctttagtaaaaatgaccactcttttttacacctaatcagtgttaaacatttcacgtataacgtttcagtattttttacataaacatatgcatttttacaaaagtagtatttttaaaaacaacagtgtgtcagttgggcattatagcatatttctaagcttaatgcatcatgaaaatactctgagtaagtagaattctacaatgatgatgaccccttgtatctagaatcaagagggaagtatgtgttccctactcctctgggaagctcctcttgggatatgatttcccaagtctctcctatgtctatggggtgtggagattgtgttaaataatggaaagagcatgaaatttgctgtctggagtcctcagacctatttttgattcacattttctattactttctagctgtgtgatcttgggcaaatcacttaatctccctgatcttttttccttcttcatctccctgatcttttttcccttctctgaagagagtatgatacctgcctgtaagtttggtatgtggactaaacataagcataacacactcagcccacttagtgctcaggaattcagccgtggcagtgagatggagtgtgtgtttagaactgttgattgatctggctctccctgattaggaggccgagatcgagactcggattgctgagctgcggaaggagggtttctggtcactgaagaggctgcctaaggtgccagagccccctcgccccaaaggtcactgggactatttgtgcgaagagatgcagtggctctctgctgactttgctcaggagcgccgttggaaacggggtgtggcccggaaggtaggtcttccgctgggacttccttccttttccttttcaggtctgttccttcccggtttgttggaaggggaccagacagaatggtgtaggcattaagagcaaactcttgattttccagatttcttggccttgattattttctttgcctttgggtggggaagtctggctttgagtgttttcaccctgggtcttcattcccacaggtggtgcgcatggtgatccggcaccacgaggagcagcggcagaaagaggaacgggcccggagggaggagcaggccaagctgcgtcgaattgcttccaccatggccaaggatgtcaggcagttctggagcaatgtggagaaggtagacagtggggatcaggaaaggaaaatggccttggattagattggtagatggcgtggtagtaggaatgatcaaaacttcttgagggagtaaatataatttcaggcaactctaatgacgtttatgttgtatggataaaaaagtatagtggcaaaatatgggtcctgcctttggggattgttaatagttctccttgacacctctaggccatctgtcccttgcagggcatttagcatgtgtttactgaaatgtatttgtgccacttagcacatgcttaaattccgtcaaagttcccactgcctgtatagtaagttgtaattatttcttaagtactacccagtttccgtctgtattttcggtcttgcctcctgccatgttcattccttctcccttccactccacacccacctttcttttgtatatctctgtccatttacacatagactttatgctgctgggaatgcttttttcctcatgtgtacttagggaacagccacctattttttaattgtcttggacagagtcttgctgtgtctcctaggctggagtgcagtggtacgatcacagctcactgcatcctcaacctcctgggctcacgcgatcttcctgcctcgatctcccaagtatctgggactacaggcgcgtgctaccacatcttgctaattaaaaaaattctttttaatttctttttttttaatttttttgtgaaacagagtctcaccccgtcacctagggcagtggcgcaatcttggctcactgcaacctctgcctcccaggctcaagtgattctcctgcctcaggctctggagtagctgggattacaggcatgtgccactatgtctggctaatttttgtatttttagtagagacagggttttgctgtgttggccaggctggtcttgaactcctgacctcaggttatccactcgccccagcctctcaaagtgctgggattatagacgtgagccaccgcacctggcctaaaaatatttttttgtggagacaaggtctcgctgttacataccaagctgatcttgaattcctaggctcaagcgatcctctcactttggcctcccaaagtgtgagccactatgcctggcttcacctacctgtttttttgtttttgagacggagtctcgctttgttcccaggctggagtgcagtggtgcaatctgggcttactgcaacctctgcctcccaggttcaagcgattctcctgcctctgcctccggagtagctgagtttacaggtgcccgccaccacgcctggctaattttttatttttagtagagatgggggtttcaccatgtcggtcaggctggtctcgaactcctgacctcacgtgatcctcccacttcagccttccaaagtgctgagaatacaggcatgagccactgtgcctggcccacctacctattttttgagacccagttccagctgggtgtggtgatgcatgcctgtagttccacctacgtgggagggtgaggcaggaggatcatttgagcccaggagtttgacactagtctggccaacatagtgagatctcatctctttaaaaaaaaaaaaaaatccagcttcagattgcaaaccttccctccacctgaggcgaagctggctcttcttcctgcatgctccctttgtgcttcctttagaccatagtgagcccctaaggttatttagttttactttcctaagaggccagcccaggatctggttaaagaaggtctccctaaacatcgggtaaaagtacataaataaaatggttatcttggtgagcagtccctttcacatctgtggcaggtggtgcaattcaagcaacagtcccggcttgaggaaaagcgcaaaaaagccctggacctgcatttggacttcattgtggggcaaactgaaaagtactcggaccttctgtctcagagcctcaaccagccattaacctccagcaaagcaggctcttccccttgcctcggctcttcctcagctgcctccagtcctccaccccctgcttctcgcctggatgatgaaggtgtgtgttctctttggtcctgttactcttcctcatgtaccctttccagagctgaaaaacccaccctgtggcttgcagggcccgtggactttgtgaccttgttctcctgctatagatggggactttcaaccccaagaggatgaggaagaggatgatgaggaaacgattgaagttgaagaacaacaggaaggcaatgatgcagaggcccagaggcgtgagattgagctgcttcgccgtgagggagaattgccactggaagagctgctccgttcccttccccctcagctgttggaagggccttccagcccctctcaaaccccctcatctcatgatagtgacacccgagatgggcctgaagaaggtgctgaagaagagccccctcaggtgttggaggtataggcagaaggagcagagggagggttcagagggggaacagagggagaggttcagggtctgagttccgggctgtgaggttggttatgagttttaggagttctgctagtaatggacatttgggctctttggggatgactggggaagaatctgtttggggcaagttgcattttgtgattggcaggttttggcgctatagtggaagagcgtattgcactttcctctttaaattgctgtgtggtcttgaaaaagtacttcctctgaccgttacttgccacttctctgaacatgccctaatgttcccttattggcttacaggttggaagctggcatggtacccttaagtcttttctgtttctccatatgtctcaagtgcatggggaagtgttgggtgcctttatttgttacctggcactttcacagttccttccccaggcagtggggccaggatttggtagctggtgctgagagaaaacccttgattgtattcttgccctgggattataccagtggcaactgtcactcaatgggacagtgattctcctgtgacacctttttcaagtttgtgccattcttctgctactgtaaccttagacccttcccttttttatcttttgccatacagataaagcccccaccctctgctgtcacacagcgcaacaaacagccttggcatccagatgaagatgatgaagagtttactgccaacgaagaggaaggtcagggctgttcggtttgtcctattgccccttaccccttgaatgaattgtctggacctaacctttcaggctttctcatctgtttcatttggactgtgtcctgtgcctctagcctctatccctattaatcttgcttctgtctctttcctagcggaggatgaagaggatactatagcagctgaggaacagttggaaggggaggtggatcatgccatggagctgagcgagttggctcgagaaggtgacatttaccagacattttactaagcatccacttggtgtctgcggtgtgcagtaccaaggataaagagatgaataaggcactttgtatccaccctggaggaattccatgtctaatgactaagacagacttgtaaaccagtaatgataagtagaaagtgatgagtgcttatgatagaagtttaaatggtgatgtgggagtgaaatggagggaagagctaatgtaggaagatactgacagcatttgacctggaccttgagaggctcaccaggttgataatgttcttcccaattcccatggtacttcccccaggttgtggggcttggctttgctagctgatgctgaaagtaagctcttttgcctcccctcagacctgggcctagcagtatctacagagacctaggtaaaattaactggtactactcagacctccccttctccctcccctcagagcaaccaaaagctttttgtttctcttccaggtgagctttccatggaggagctattgcagcagtatgcaggagcctatgccccaggctctgggagcagtgaagatgaggatgaagatgaggttgatgctaatagctctgactgtgaaccagaggggcccgtggaagcggaagagcctcctcaggaggatagtagcagtcagtcaggtgaatatgtggtcatgaagcaggagctggggagggtggccattggaagagcaggtatgatgagcagtaagccttggtcttaccctttagactctgtggaggaccggagtgaggatgaggaagatgaacattcagaggaggaagaaacaagtggaagttcagcatcagaggaatctgagtctgaagagtctgaggatgcccaatcacagagccaagcagatgaagaggaggaagatgatgattttggggtggagtacttgcttgccagggatgaagagcagagtgaggcagatgcaggcagtgggcctcctactccagggcccactactctaggtccaaagaaagaaattactgacattgctgcagcagctgaaagtctccagcccaagggttacacgctggccacgacccaggtatccccaggttctggcctctcctttctcatgtcttgactttctcatgtccccacaacaaatgcctcatttccattgtgttacctatatttcctctctgacaggtaaagacgcccattcccctgcttctgcggggccagctccgggagtaccagcacattgggctagactggctggttaccatgtatgagaagaagcttaatggcattcttgctgatgagatggggcttgggaagaccatccagaccatctctctgcttgcccacttggcttgtgagaaaggtaagtaggcaaggccccttcttttgttccccctagtctagctccctgggagcttgttcagtgatgactccagcttcattgacttttgctttattgactccggtcattaactgtatagagaggacagtgtaggtgctaggattcctaggaagggccaaagggtggccagggttataactgagaaatcagaaccacagaatttacatttccttaccatctctgatttttttgcctaacaggtaactggggtccccatttaatcattgttcccaccagcgtgatgttgaactgggagatggagttgaaacggtggtgccccagctttaaaatcctcacttactatggagcccagaaagagaggaagctcaagcggcaggttcgatgtttcatgtggtcactttcctcccattgatgcctcctttatttttaagccctttcctcaggtgaattcctttctctcctctttcttttttaaaaaaaattttttaattttttgtaaaaataaagatggggtctcactatgttacccaagctgaccttgaacacctgggctcaagagatcctcccacctcaacctcccaaagtactgagactatagctgtgagccaccgcacccaggcccctcctctttctgtcgctccattcttttgctgggactttctcttttcttccaacctgattactgtcctttgaggagtttagcatgtcttccctttgctctcttcttttcatcccactatctgctactttctgtctttgatccctcagggctggaccaagcccaatgcctttcatgtgtgtatcacatcttacaagctggtgctgcaggaccaccaggccttccgtcgcaagaactggcgctatctcattctggatgaggcgcagaacatcaagaacttcaagtcacagcgctggcagtcactcctcaacttcaacaggtggagatggagatggggattcatgggagggttgacttggctagaagggagggctgcctgggttgaggaatgtatcagaatgctcagaaggttgggagcttgctgaccatactctctctgattctctctgtctctttgcagccagagacgcctgctcctgacaggaactcccttgcagaacagcctcatggagctgtggtccttgatgcactttttgatgccccatgtcttccagtctcatcgcgagttcaaggagtggttctctaatcccctaactggcatgattgagggcagccaagagtataatgaaggtctagtcaaacgcctccacaaggtagggcctgcaacagtttgtcagggtattgggaatggtaaggaaccattcctgagcacctgggcagtgcccaggaaacccttggggagagggaagtcagtgccaggctaaactcctttgtcaagctgcagtgttctagtgactaacccattgccagattgagtgacctcatcttagtcatcaattctgtttttttttttttttgagactgagtcttgctttgtcgcccaggctggagtgcagtgttgcaatatccattcactgcaaactccgccttctgggttcacaccattctcctgcctcagcctcccgagtagccaggactacaggcacccgccacaaagcctggctaatttttttttttttttttttgagacagagttcactctgtcgcccaggctggagtgcagtggcgcggtcttggctcactgcaagctttgcctcccaggttcatgccattctcctgcttcagcctcccgagtagctgggactaaaggcgcccaccaccacgccgggctaattttttgtatttttagtagagacggggtttcaccgtattagccaggatggtctccatctcctgacctcatgatccgcctgcctcggcctcccaaagtgctgggattataggcatgagccaccgcgcccggcctacgcccggctaattttttgtatttttagtagagtcggagtttcaccgtgttagccaggatggtctcgatctcctgacctcgtgatctgcctgcctcggcctccgaaaatcctggaattaaaggtgtgagccaccgtgccgggcttttttttttttgagacagagtctctctctgtcacccaggctggagtgcagtggcgtgatctggctcattgcaacctccacctcccaggttcaagcgattctcctgcctcagcctcctgagtagctggggttacaggtctgcactacgatgcctagctaatgtttgttatttttagtagaggcggatttcgccatgttggccaggctggtctcgaactcctgaccttaagtgatccgccctgcccccgcttggcctcccaaagtgttgggattacaggtgtgagccaccgttcccagcctgtttgttttttgtttttttttaaatggtgatgtttttgtccttactgtctttgagtagaatggtactgctgattgatccctgcttggatttcttcaacttcatattgttggtgttttctctctctggtcttctttggctcttcctttttcgcccaacttttaaatcacaacatctttcagcattctgatctttactttttttgtcttctcagtctgcatatctcacaggcctactcattcctaaggctttgactatttcttatgtgataaagactctccagtctgtactaaaattccttgactttctagatcacttgacctgtatttaaatttctgatttgctatcattaattgagagttcctcttgaactcaacactgttctaagctagacatctctggccttatagcctgttatttctacttcatcttggtcaatcactatcattcggtaaactaagctagaaaacaggaagtcggccgggcgcggtggctcacgcctgtaatcccagcactttgggaggctgaggcaggcggatcacgaggtcaggacatcaacaccatcctggctaaaatggtgaaaccccgtctctactaaaaatacaaaaaattagccgggcgcggtggcgggtgcctgtagtcccagctactcaggaggctgaggcaggagaatggcatgaacccgggaggcagagcttgcagtgagccaggattgcgccactgcactccagcctgggtgacagagcgcaactttgtatcaaaaaaaaaaaaaaaagaaaacaggaagtcttccttaactattacttttccttcatttatctctgttcctttacttcttccgtgtcactgtagacattgatgactgtgtcctattagattttatcttctgagattacagatttgccttttgttttatctcctgtcaaggccacagtttttattctcctcatcttctagatttatttgcatcatcttgtaaacttaacaattactcctcaaaatctagtttgagttttctattctgcgtagttggtctgcccacagtgcttccttatatcacttcctgtgtcatggtatcattttgtgtctgtctccttcagcagacagcagatcccttgagggcttgcagttgactcatctttgtgtggttggtgtctgatatggtgtgccgtatgactccattagtgtttgctgaggggcttaggctggggctcggtgcctgagttctcctgtttagcctccagcttaatttgcttttaggttttgaggccttttttactgcgccgagttaaggtggatgttgagaagcagatgcccaaaaagtacgagcatgttatccgctgcaggctctccaagcgtcaacgctgtctctatgatgacttcatggcacagaccacgtaagggaggaaggagggtgggccctgggactcgagattggagtgtaggtggctgttaggacgtctcatttatttttcctctttccccagaactaaggagacactagccacaggccatttcatgagcgtcatcaacattttgatgcagctgagaaaagtttgcaatcatccaaatctgttcgaccctcgaccggttacctcccctttcatcaccccaggcatctgcttcagcaccgcctctctggtgctaagggccacggatgtccatcccctccaggtaagtatgattccattaatatgaaatgtaaaggttatcggcattactccaaccatgtacctcttttcgttagactggggtctgacttttgcatcctcatgactcccctatcattcccttagttttattgtactctagccatgtgacttaacgatggttcaacttaatatttttttgacttcactgtgaatttatcaggatgtaaccccatcgtaaattgaggagcatctggacttagaatgattcagcttacaattttttactttttgatgggcttatcaagggtattaaagggtattaaattctttacttgctgagggtttgttggaatgtaacctcattgtaagtccaggagcgtctgcatcacattttgtttatccacttatctgtcagtgggcacttggattctttccaccttttgtctcttgtgaataaggctatgaacataggtgtacaaatatctctgctttttattttgggtatttacttaacagtgaaattgctgtaacatggtaattctatttctgcatgttgggaaaacctccactgttttccatagtagctgcatgttttacatttccaccctagcagggcacaagtgttctaatttctccacatccttgccattacctgttatttctttttttttaattacacccatattaatgagtgtgaattggtatttcattgtggttttggtttgcatttccttatttccttagtgatgagtgctgtcaaggatcttttcatgtgctcattggccacttgtctatatttttgaagaaatgtcttttgaagatttgttaattttgggtgtttgtgtggtggttgttgagctgtaggacttcattatatgctttggaaattaacccattatcagatgtatgacttgcaaatattttgtcacattccataagttgccttttcgctatgttgatagtgttttttgatgcacaaacacttgtttttggtggttttttttttcgagacaaggtctatctctgtcacccaggctagagttcagtggtatgatcatagcttactgcagccttgaactcctgggctcaaatagtcctcccgcctcagccttccaactagctgggaccacgggtatgcgctaccaagcctggctttttttttttttttttttttgaggcggagtctcgctctgtcctcaggctggagtgcagtggtgccatcttggcttactgcaacctccgcctcccaagttcaagcaattttccacagcctcccgagtagctggggatacaggcacgcaccaccacacccagctaacttttgtgtttttagtagagatggggtttcaccatgtttgccaggatggtcttcatctcttgaccttgtgatctgcccaccttggcctcccaaagtgctgggattacagatgtgagccactgcacccggccctgctgatttttttttttttttttagttttctggaagagatggtgtcttgccatgtcgctcaggctggtttcaaactcctggacgagtagctggaactatatgcgtgcaccactatgcctgactgatttttttattttaatttttttgtagagatgggatgttgatatgttgcctagactagtcttgaactcctggcctcaagtgatccttccgccttggcctcccaaagccctgggattataggcgtgagctaccacacctagttttaatttttttttgggtggggggggcagagttctgctcttgttgcccaggctagagtgcaatggcacaatctcagctcattgcaacctctgcctcccgggttcaagtgattctcctgcctcagcctcccgagtagctgggattacgggcatgcgccaccacgcccagctaatttttgtatttttagtagagatggggtttcgccatgttggccaggctggtcttgaaatcctgacctcaggtgatctgtccacctcggcctcccaaagtgctgggattacaggtgtgagccactgtgcctggcttttttttttttttttaagatggagtcttactctgtcgctcaggctggagtgcagtggtgcgatgtcagctcactgtaacctccacctcctgggttcaagtgattctcctgcctcactcccaagtaactgggactacaggtgtgtgccaccactcccagctaatttttgtatttttagtagagatgaggtttcaccacgttgcccagctggtctcgaacgcctgacctcagataatctgcctgccttggcctcctaatgtgctgggattacaggtgtgagccactgcacctggcccccagttttaaattttgatgtagttcaatttatcaatttttttcttttgttggctgtgcttttggcatcatgtccaataaatcattgtaaaattggcatctttgacactgcattgtgttgttattactacttttttttttttttgatacagagtcttactctgtcacccaggctggagtacaatggtgcagtctcagcgcattgcaacctctgcgtcttgggttcaagcgattctcgattcttgtgcctcagcttcctgagcagctgggactacaggtgtgcacaaccatgctggttgtatttttagtagagatggggtttcaccatgttggccaggctggtctcgaactcctggcctcaagtgatctgcccaccttggcctcccaaggtagtaggattacaggcataagccatggtgccccgcctattatttatttatttatttatttttatttttttttttgagatggagtctcactctgtcacccaggctggagtgcagtggcacgatcttggctcactgcaagctccgcccctccaggtttaagcaattctccatttcagcctcctgagtagctgggattacaggcacgtgccaccacgcctggctaatgttttgtatttttagtagagatggggtttcaccatcttggccaggctggtcttgaactcctgacctcgtgatccacccgcctcggcctccagaagtgctgggattacaggcgtgagccaccgcacccggcctttttttttttaattttgaggcagggtcttgttctgtggcccaggctggggtgcattggcatgatcatagctgactgcagcctcagctccctgggctcaagcagtcctcccgcctgagcctcctgagtagctgggactacaggtacatgctaacatgcctggctaatttttgtattttctgtagagacggggtcttactatgttgcctagggtgatctcaaattcctggggtcacacagttccccaatcttggcctcccagagagctgggattacaggtttgagccaccgtgcctagccttttattttggagtaagggtgtacatgtgcaggtttcttaaatggggtatattgcatgatgctgaggtttggcgtacgattgatcctgttactcaggttgtgagcatggtactcaactggtagtttttcagccccttgcccgccacagtcgtttctggcgtatattgttctcatcttcatgtccatgcgtacccaatgtttagctcccacttgtgagtgagtacatgtggtatttggttttctgtttctgtgttaattcacttaaggataatggcctccagctacatctgcgttgcaaaggatgtgattttgttcttctttatgactgtgctttctttcttgtggcagcggatagacatgggtcgatttgaccttattggcctggaaggtcgtgtctctcgatatgaggcagacacatttctgccccggcaccgcctctctcgccgggtactgttagaagtggctactgctcctgaccccccaccccggcccaagccagtcaagatgaaggtcaacaggtacaaggactaaggaatgaggggatggttcctagaataagtggctgaaagctgcccagaggggcctggggtgggaagaaaagagttggatgcaaggctggaatatttatatgggatgggtgcaaacgtggagggaatcagggagagaataactagaagagggtactgggatgggcttctgtgttagtcactttttctccctttctctctgttcggtgctttctgattgtcttaaattcctattccttgttctcctttgggtctctttccttttctttgcttttataatctgtctctctgtttcattttcttcttttctttgatattgctaccccttattctccttctgtccctacccactctcttaattttttctcacaggatgctgcagccagtacctaagcaagaaggccggacagtggtggtggtgaacaacccacgggcgcccctgggccctgtcccagttcgacctcctccaggtcctgagctctcagcccagcccacccctggcccagtcccccaagtgctgccagcatcactgatggtttcagcctcacctgccgggcccccgcttattcctgcatctcggcctcctggccctgtcctcttgcctccactgcagcccaacagtggttctctcccccagggtgagttgaaagggagccaaggatgatgcgtggtgcttcagaaaggttgttcagactgaggaggaagtagtgaaattaaagggtttgaggagctgggctggggacacgggtctagtatttgatgggttggaagggagtatggaggcttctggcaccaggctaaggctttagtcagggtatatctgacaggtgtttgctttgtgtctgcagtgttgccatcccccctgggggtcctgagtgggacctcacggcctcccacgccaaccttgtccctaaagccaacaccacctgccccagttcgcctgagcccagccccacctccaggctcctctagcctgttgaagcccctgacagtgccaccaggctacaccttccctcctgctgctgccaccaccacttctaccaccacggcaactgctaccaccacagcagtgccagctccgactcctgcaccacagcgcctcattctatctcccgatatgcaggctcgcctgccctgtaagttcccagggctctgtggtgagggacttgagatgggaggaaagctcaggaccatgagagcatcaaattttaggcagctgggtcaggcatgatggctcatgcctataatcccggtgctttgggaggccaaggtgggaggtttgcttcagccaggagtttggagctgcagtgagccatggttacgccactgcaatcatgagcaagaccctgtgtcaaaaaaaattgaggcagctaacatatgttaggcattatgccagacattgtcagatcataattaagagcccttaagaaattgacatagggagatgacacatagatgaataaatagtggtaagcctagcagtagaaaagtattggggtaaaaggacagtgtagagcagatggtggtgattagctcagtctggtggcaggccatgttagaggatataaaagagattgctaagcaaatgggattggaaggagtagcacatgaaaagctcaaaggctgtaggtggaggctgagtttattgggacatggtaaattgtgggaagggcttagttgtttgaactggacactcgggggagaggtgtgcttcatggggtctgtgaagtggtgttgagcaggatgagccttgtgtacaataaggccttctctgtttttagcaggcgaagtggtcagcatcgggcagttagcctcactggcacaacgtccagtggctaatgcagggggaagcaaacctctcaccttccaaatccagggcaacaagctgactttgactggtgcccaggtgcgccagcttgctgtggggcagccccgcccgctgcaaagtaggtaaaacccaccccctgtcctgcctttttcctcctcttccctgtctctttgtttttgtgacttttttgaatgtcagcctttatgtttcttacccaagcttttggtgggtggggccaacgggcatggttggagggatcttggataaagatagggaagaggtcattctagagaatgtattccctctctgttcttttcttctcttcttgccttgcctctgccctcctcaggctgatagctgcttctctctctctttctctcttcccttaacccagggaatgtggtgcacctcgtgtcagcaggggggcagcaccatctcatcagccagcctgcccatgtggccctcatccaggccgtggccccgacccctggccctacccctgtctctgtgctgccttcttcgacccccagcaccacccctgcccctactggcctcagccttccgcttgctgctaaccagggtgaggctcctggccttcctacttagcccttgctggccttggtccttccaggcatgcgctgggctactgtctgtccagccttccctcagtgttgttttcccttgcgaatatctatgatacctgtctgccaccttctcctgcccctggacttcttccattctttgggtcttttgtttcttttctaccttcctctcagtgtagcttcctcttgcagtgccaccaaccatggtgaataatacaggcgtggtgaagattgtagtgagacaagcccctcgggatggactgactcctgttcctccattggccccagcaccccggcctccgagctctgggcttccagctgtgttgaatccacgccccacgttaacccctggccggctacccacacctactctgggtactgctcgagcccccatgcccacacccactctggtgaggcctcttctcaagctggtccacagtccttcacctgaagtcagtggtgagtccaggtggctgaggccagaaatccttgccaggaatggagacgagatggggtcgcctcaaggtttcttagttttagtacaggttttttcatatcagcgtactgccttgatttgtagtgggccccagaactgggctgcctgagccctgacctaatttcaagatctatttgctggaatcttggaggggaagaaaatctaaagttgtcagattacttggatgtttgacttcatgttgtgggagtgaatgccttctgggaaatgggaagcttgggggtatgggaaagatgggacagggagtagaaaggctcaggaaaagaattctggggctaactcatcctctctctccacagcttcagcccccggagctgcccccttgaccatctcttctcctctccacgtgccatcctccctccctgggccagcctcttctccaatgccaattcccaactcctctccccttgctagtcctgtgtcctctacagtctcagttccattgtcatcttcactccccatctctgtccccaccacacttcctgccccagcctcggctccactcaccatccccatctcagcccccttgactgtttctgcttcgggcccagctctgttgaccagtgtgactccaccattggcacctgttgtcccagcggctcctggacctccctccttggcaccatctggtgcttccccgtcagcatcagccttgactctaggtttggccacagctccatccctgtcttcatctcagacacctggtcaccctctgttgttggctcccacctcttcacatgttccagggttgaactcaaccgtggccccagcatgctcacctgtcctggtgccagcttcggctctggccagtccttttccgtcagcaccaaatccagctccagctcaggcttcccttctggctccagcatcttctgcatctcaggctctagccacccctctggctcctatggcggctccacagacagcaattctggctccttctccagctcctcctctggctcctcttccggtcctggcaccatcgccaggtgctgctcctgtcctggcttcatcacagactccggttccagttatggctccatcgtctactccaggaacctctttagcctcagcttcaccggtaccagctccaacccctgtgttggctccatcatcaactcaaactatgctaccagccccggttccgtcacctctcccgagcccggcttctacgcagacactggccctagccccagctttagcacccactcttggaggctcatctccatctcagacactctctttgggaacggggaacccccagggaccctttccaactcagacattgtcattaactccagcatcatccctggtaccaactccagcccagacactgtctttggcaccaggaccaccactgggtccaactcagacgctgtctctggctccagcaccccctctggctccagcttctccagtgggcccagccccagctcacacgctgactttggctccagcatcgtcatctgcttcactcctggccccagcttcagtgcagacactgaccttgagccctgccccagttcctaccctgggcccggccgcagctcagaccttggcgctggccccagcctccacacagtccccagcttcccaggcatcttcccttgtggtttcggcatctggtgccgctcccttgcctgtcaccatggtatcccggctgcctgtttccaaggatgagcctgacacactgacattgcgctctggtccccccagccctccctccactgctacctcgtttggtggcccccggcctcgacgccagccccccccaccacctcgttcccctttttatctggtaagttttacttcctcaagagggaacaggaagttgagtttctttggagtgttggtagggtggatggaacagtgatgtcacatttaacctggtgaattacaaagcttaatgttatggaccaagtacttgagtgacatttggacaagtcccttctcttccctgggcgtgtacctcatgatccgcctgcctcagcctcctgaagtgttaggattacaggggtgagccaccacgcccggcctcttttcccgttttttaacccgcacggtaataaatgggcagtaaaaggaactcttctctgtcccttttatgatttccggtagctgtttctttcctgtactatgtatataggcccatgtctgtgtagtacttgagttaaactcacagttcagcttaagtaaaccagaactaaggagaaggaaggtccagtgggtccctccacgccctctggcttttccccactgtaatcagagctgctgcttagtctttgcttcatgcctactcccccaccttccaccagtgccattgactccacctttggtttttacctgaccagccgctaggttggtcctggctggttggaagtagagagtagagggattgctctgcaagtagataatagcctcttgccacttggttttttttggtaacagtttgtgctataaatcatataccattcgatttacccatttaaactgtacaatagtttttggttttttttttaaatacagatgggggtctcccactcttgaccaggctggtctcgaattcctggcctcaagtgatcctcccatctcggcctcccaaaatgctgggattataggtgtgagccaccatgcctggccctaaactgtacaataggtttttaatatatttatagggttgtacaatcatcaacacaatcaacttagaacctttccgtggccccaaaaagaaacgctgcacctgttagccagcattccccaatccctccgtccctcctagtcttgaatgactaccatcctacttttttatttctctagttttgcctatggagtcataatgtataatgtgtggtccattgtgactggcatcttctacttagattaatgttctttgaattttattgtgttatagcgtatatcagtacttcatttgtttttatgttgaataataatgtatgaataccacattttatccttgagttgatggaaacgtgtgttacttctgctttatggttgttatgaacaatgctgctgtgaacatttcatgtacaagtttttgtatggacaggtgttctcagtttctgttagatacatactgaggagaagaattgctgggttatattgtaactaggttttaactgtttaaggaactgccagacttttccaaagtggctgcagcatttgacattaccaccagcagtctgtgaggattccagtttctccacatttgagccaatacttttttttttttttttgagaaggagtcttgctctgttacccaggctggagtgctttggcacggtcttggctcactgcaacctctgtctcctgggtttaagtgaccccacctcaacctccctcgtagctgggattacaggcatgtggcaccatgcctacctaatttttttgtattcttattattttattttatttttgagacagaatcttgctctgttgcccaggctggagtaaagtggcaccatcccggctcactgcaacctccacttcccaggctcaaacgattttcctgtgtcatcttcccgagtggctgggactacaggcatggcgtcaccacgcctggctaatttttttatttttagtagagatggggtttcaccatgttggccgggctggtctcgaactcctgacctcaggtgatccgcctgccttggcctcccaaagtgctgggattatagacatgagccactgcacctggccagatttttttgtatttttagtagagatggggtttaccatgtttgccacgctggtttcgaattccacacctcaagtgatctgcccgcctcagcctcccaaagtgctaggattacaggtgtgagccaccatgcctggcacatcatcactttgattatagccatcctgctgggtgtgaagtagtagttcattgtgattttgatttgaatttccctgttggctaatgttgagctttatttcatgtggttgaaataccatgctggccatttgtgtatctttgaagaactatctgttcagatcctctgcccttttaaaatgggttgtctttttattattgagttgtaagagttctttatatattctgattacagatcctttttcagacgtatggtttacaaatagtcttttttttgagacagtgtctcactttgtcaatcaggctagagtgcagtggcacagtctccgctcattgcagcctcctgggcttaagtgaacctcccatctcagccctccaagtagctgggactgtaggcttgtgccaccatgccaggctacttgtttgtttctttttttgagatggagactcactctgtcaccaggctgcagtgcagtggtgcgatctcagctcactgcaacctccgcctcccaggttcaagcgattctcctgctcagcctcccaagtagctgggactacaggcttgcaccaccacgcccagctaacttttttgtaattttagtagagatagggtttcatcatgttggccaggatggtcttgatatcttgagctcatgatctgcccgcctcggcctcccaaagtgctgggattacaggtgtgagccaccgcgcctggcccttgtttgtattttttgtagagatgcggttttgccatgttgcccaaactggtcttgaataggaggctcaaaccatccacctaggcctcccaaagtgctgggattataggcttgagccactgctcctggccagattttctctttttgctactattgggagctagcctcaaaaggaactagctctttgagtttattggtttttccgtctgctaggacaccttttttccctcacatagagcacttcaagccaagaggtgaaacttggtagcagtcaggaaggagatttggaacactcctcttttcacaactatctcttggggtctagtctccctcatttgttcattttgttaacagataaatgtattgagagcttaattgtgctagttactgagtgattatagtgagcaaggcacagttcatgttgtatggggcctaccgtgtagtggatagatattagttaaataatcatacagatgtgtaactacaagcataataagtgatacaaagaagtttttcagactgtgaaactggaagcacaaagatgggaaaggattgggtcaaagtcatccaggtgtcctcactgccgggttgcccattttctgtctcagagtgatgagactcggatgtccggttagctgttcccattccaccccattccagtctggcccttggcaaaaacctggtctggatttgattggcgcctctgtatcctggtcagtgatttgaagaaggctatagtcctggagttgagtgttacgtaggaaaatacccacaaatcgtccattctataaacttgttggaattgtagatcttaattttgaatattcagtcattctgctttggtagcatacaaggaaagatcagttttctctaggagagaagttacttaacataacttctgagaaagaatagttatttaacataaaaaagaaagttatttaacataacttctgagaaagaatagttctcattgataacttggaaaactacaaaaagcatagtgtatttttggatcccatggtttctatatatttatttccatctgggaagaacagtcaggttttgatgtggactctgagggtgctgattacttcctctttttctctcacccccaggactccctggaggaaaagcggaagcggcagcggtctgaacgcctggaacggattttccaacttagtgaggctcatggggccctggcacctgtgtatgggactgaagtcctggatttctgtaccctgccccaacctgttgccagccccatcggccctcgttctcctggccccagccaccccaccttttggacttataccgaggctgcccaccgggctgtactgtttccccagcagcgactagaccagctgtcagaaatcattgagaggttggcagggctaagtgctaatggggagtgggtcttggggcctcagagtggatgtagtgcttagggctggtgaaggtgttaacttctggggcatttcagagtcccatcttttacactgcctgcttcttcctttcacaggttcatctttgtcatgcctcctgtggaggcacctcccccttccctgcatgcctgccacccacctccttggctggccccacgtcaggcagccttccaggagcaattggcctctgagctctggccccgggctcgtcctttgcaccgtattgtgtgtaacatgcgcacccagttccctgacttaagactcatccagtatgattgcggtgagtttgttggccagtgtaggacccttgacttctcttcttttcttagtattaagactgttgtatcagagggatgctgcacttaagttctcttgcgatttctgtaaagctttagatggttttttaggttatgcttatgggcaagatagagaaatgtaagccttgttagattcttgacattcataaatatgactttcttctttttttttattttgagacaaagtctcgctcagtcgcccaggctggagtgcagtgcagtggtgcagtctcagctcactgcagcctcccaggttcaagtggttgtcccacctcagcctccagaatagctgtgattacagacatacgccaccatgcctggctaatttttgtatttttagtagagatgggatttcgccatgttggccaggttggtctcgaactactgacctcaagcgatcctcccgcctcagcctccaaagtgctgggatcacaggcatgagccaccatgcccggccatgaatttgactttcatgaaagttgaaaatgtgctgctaactccttcattcagtgatcattttgtgaacatgttacattttgctaatcatttgggatacaatagcaagtaagacagtgcagcatagagtttttatttagctgtatgggaaaagatgtctggtggtacaagactgcacagtaagtaaacagtaaattttggtcttggaaaagacaaggacctttttgtgttgactagaattatttggcggtaacagaaaaccaactaacagtcattgttttcttaatgagccaatctgagaatagtggtgtgtagctgtttcagtagcttaacgatattttcagggaccaggaccttttcttccttctttctttctttttttttcagatagagtctcactctgtcgcccaggctggagtgcagtggctcgatctcggctcactgcaacttccgcctcctgggttcaagcgattctcctgcttcagcctcctgagtagctgggattacaggtgcacaccaccacacccggctaatttttgtatttttagtagacacggggtttcaccatgttggtcaggctggtctcgatctcctgacctcgtgatctgcccaccttggcctcccaaagtgctgggattacaggtgtgaaccactgcgcccagccttttttttttttttgagatggagtttcgctgtgtttcaaggtattctcctgcctcagcctcccgagtagctgggattacaggtgcccaccacaacgcctgggtgatttttttgtatttttagtagagacagggtttcaccatgttggccaggctggtctcgaactcctgacctcgtgatccccttgcctcggccttccaaagtgctgggattacacacgtgagccattgcacccagccttaagggaccaggactttatctttctaccctgctgtaccatctttagctttttatctttttattctcatgcttttgtttcttcatgatgttaggatggctgccataactccagggtatacaccaatcctctaaacaagaaacaaggggttgagacaaaacactctgagaaggttttctgggaacaaaagacctccaagctgactttgcttcataactcattggctcaaactgagctatatgcccatacttagagcaatcactgacaaaggggaatagcaaaaaagacctctggcttatttagatcaacttgatttattttctgggtttgggttggggccttcttcacctgggagcaaagaacctctgccagctgtccagggttaatcaggttcttttacccaagaatggctattgggtaagtgactagttccacagccctgcacagacatttgtatagtaacatgtttcgagattttttaaatttcctagaatataagaaaatcaaaatttttattaatatgtgttcaataaatgttttagtaaaaaaaagtgtttttgttacatttgaaactattcagagtagatgaactgaaagtcttggttaaaagtgttcaaggccgggtgtggtgactcatacttgtaatcccagcacttgggtaggctgaggtgggcagctcacttgaggcaagtaaagaccagcccaggcaacatggcgaaaccctgtctcctcaaaaactgaaaaattagtggatatagtggtgcacacctatagtcccagctactcagatggctggattgcaggagcctgggaggttgaggtgcagtcagctgtgatcatgccactgcactctagcctgggtgacagggtgagaccttgtctcaaaaataaaataaggctgggcctggtggctcatgtc

SEQ ID NO: 679 - DNA, 6215 bp, Homo sapiens
  source 1..6215: mol_type = other DNA
ccccgcctttattcagcttccggtagacgctggtagggtaagggagctaagtagatcacttccgggcgactgttgttttatttccggtttatgcgacccggctgcgatttgctgctgagggcagcagctaccgtcactgccgccatcatgtcagactcggacagcgaggaagattcatctggaggtggcccatttactttagcgggtatccttttcggcaacatcagtggagcggggcagctggagggggaaagcgtcttggatgatgagtgtaagaagcacttggcaggcttgggggctttggggctgggcagcctaatcactgaactcacggcaaatgaagaattgactgggactggcggtgccttggtaaatgatgaagggtggattaggagtacagaagatgctgtagactattcagacatcaatgaggtggcagaagatgaaagccaaagacaccagcagacgatggggagcttgcagcccctttaccactcggattatgatgaagatgactatgatgctgattgtgaagacattgattgcaagttgatgcctcctccacctccacccccgggaccaatgaagaaggataaggaccaagatgctattacctgtgtgtctgaaagtggagaagacatcatcttgccctccatcattgccccttcctttttggcctcagagaaagtggatttcagtagttactctgattcagaatctgagatgggacctcaggaagcaacacaggcagaatctgaggatggaaagctgacccttccattggctgggattatgcagcatgatgccaccaagctgttgccaagtgtcaccgaactttttccagaatttcgacctggaaaagtgttacgcttcctacatctttttggaccagggaagaatgtcccatctgtttggcggagtgctcggagaaagaggaagaagcatcgtgagctgatacaggaagagcagatccaggaggtggaatgctcagtagaatcagaagtcagccagaagtctttgtggaactatgactatgctccaccaccacccccagagcagtgtctcgctgatgatgaaatcacgatgatggttcctgtggagtccaaattttcccaatcaactggagatgtagataaagtgacagataccaaaccaagagtggctgagtggcgttatgggcctgcccgactgtggtatgatatgctgggtgtctccgaagatggcagtgggtttgactatggcttcaaactgagaaagacacaacatgaacctgtgataaaatctagaatgatggaggaatttaggaaacttgaggaaagcaatggcactgatcttctggctgacgaaaacttcctgatggtgacacagctgcattgggaggattctatcatctgggatggggaggatatcaaacacaaagggacaaaacctcagggtgcaagcctggcaggctggcttccttctattaagactaggaatgtaatggcttacaatgttcagcaaggttttgcacccactctggatgatgacaaaccttggtactccatttttcccattgacaatgaggatctggtgtatggacgctgggaggacaatatcatttgggatgctcaggccatgccccggctgttggaacctcctgttttggcacttgatcccaatgatgagaacctcattttggaaattcctgatgagaaggaagaggccacctctaactccccctccaaggagagtaagaaggaatcatctctgaagaagagtcgaattctcttgggcaaaacaggtgtcatcagggaggaaccacagcagaacatgtctcagccagaagtgaaagatccatggaatctctccaatgatgagtattatttccccaagcaacagggtcttcggggcacctttggagggaatattatccagcattcaattcctgctatggaattatggcagcccttctttcccacccacatggggcccatcaaaatccggcagttccatcgcccacctctgaaaaagtactcatttggtgcactctctcagccaggtccccattcagtccaacctttgctaaagcacatcaaaaaaaaggccaagatgagagaacaagagaggcaagcctcaggtggtggagagttgttttttatgcgcacacctcaggatctcacaggcaaagatggagatcttattcttgcagaatatagtgaggaaaatggacccttaatgatgcaggttggcatggcaaccaagataaagaactattataaacggaaacctggcaaagatcctggagcaccagattgtaaatatggggaaactgtttactgccatacatctcctttcttgggctctctccatcctggccaattactgcaggcacttgagaacaacctttttcgtgctccagtgtatcttcataagatgccagaaactgattttctgatcattcggacaagacagggttactatattcgggaattagtggatatttttgtggttggccagcagtgtcccttgtttgaagttcctgggcctaactccagaagggccaatatgcatattcgagactttctacaggtttttatttaccgccttttctggaagagtaaagatcggccacggaggatacgaatggaagatataaaaaaagcctttccttcccattcagaaagcagcatccggaagaggctaaagctctgcgctgacttcaaacgcacagggatggattcaaactggtgggtgcttaagtctgattttcgtttaccaacggaagaagagatcagagctaaggtgtcaccagagcagtgctgtgcttattatagcatgatagctgcaaagcaacgactgaaggatgctggctatggtgagaaatccttttttgccccagaagaagaaaatgaggaagatttccagatgaagattgatgatgaagttcacgctgctccttggaacaccacaagggccttcattgctgccatgaagggcaagtgtctcctagaggtgactggggtggcagatcccacagggtgtggtgaaggattctcctatgtgaagattccaaataaaccaacacagcagaaggatgataaagagccacaggcagtgaagaagacagtgacaggaacagatgcagaccttcgtcgcctttccctgaaaaatgccaagcaacttctacgtaaatttggtgtgcctgaggaagagattaaaaagttgtcccgctgggaagtgattgatgtggtgcgcacaatgtcaacagaacaggctcattctggagaggggcccatgagtaaatttgcccgtggatcaaggttttctgtggctgagcatcaagagcgttacaaagaggaatgtcagcgtatctttgacctacagaacaaggttctgtcatcaactgaggtcttatcaactgacacagacagcatctcagctgaagatagtgactttgaagaaatgggaaagaacattgagaacatgttgcagaacaagaaaaccagctctcagctgtcacgtgaatgggaggagcaggagcggaaggaactacggcgaatgctactggtagcaggctcagcagcatcaggaaacaatcacagagatgatgtcacagcttccatgactagccttaagtcttctgccactggacactgtctcaagatttatcgcacatttcgagatgaagaggggaaagagtatgttcgctgtgagacagtccgaaaaccagctgtcattgatgcctatgtgcgcatacggactacaaaagatgagaaattcattcaaaaatttgccctttttgatgaaaaacatcgggaagagatgcggaaagaacggcggaggattcaagagcaactgaggcggcttaagcggaaccaggaaaaggagaagcttaagggtcctcctgagaagaagcccaagaaaatgaaagagcgtcctgacctaaaactgaaatgtggggcatgtggtgccattggacatatgaggactaacaaattctgccccctctattatcaaacaaatgtgccaccttcgaaacctgttgccatgacagaagagcaggaggaggagttggaaaagacagtcattcataatgataatgaagaacttatcaaggttgaagggaccaaaattgtcttcgggaaacagctaattgagaatgtgcatgaggttcgcagaaaatctctggttctcaagtttcctaaacagcagcttcctccaaagaagaaacggcgagttggaaccactgttcattgtgactatttgaatatacctcataagtccatccaccgacgccgcacagaccctatggtgacgctgtcatccatcctggagtctatcatcaatgacatgagagatcttccaaatacacaccctttccacactccagtcaatgcaaaggttgtaaaggactactacaaaatcatcactcggccaatggacctacaaacactccgtgaaaatgtgcgtaaatgcctctacccatctcgggaagagttcagagagcatctggagctaattgtgaaaaacagtgcgacctacaatgggccaaaacattcattgactcagatctctcaatccatgctggatctctgtgatgaaaaacttaaagagaaagaagacaaattagctcgcttagagaaagctatcaaccccttgctggatgatgatgaccaagtggcattttctttcattctggacaacattgtcacccagaaaatgatggcagttccagattcttggccatttcatcacccagttaataagaagtttgttccagattattacaaaatgattgtcaatccagtggatttagagaccatacgtaagaacatctccaagcacaagtatcagagtcgggagagttttctagatgatgtaaaccttattcttgccaacagtgttaagtataatggacctgagagtcagtacactaagactgctcaggagattgtgaacatctgttaccagacaattactgagtatgatgagcatttgactcaacttgagaaggatatttgtacagctaaagaagcagctttggaggaagcagaattagaaagcctggacccaatgaccccagggccctacacatctcagcctcctgatatgtatgataccaacacatccctcagtacgtctcgagatgcctctgtatttcaagatgagagcaatttgtctgtcttggatatttccactgccactccagaaaaacagatgtgccagggccaaggtaggctgggtgaggaagactctgatgtggatgttgaagggtatgatgatgaggaggaggatgggaaacctaagcctccagccccagaagggggagatggtgatcttgcagatgaagaggaaggaactgtacaacaacctgaagccagtgtcctgtatgaggatttgcttatatctgaaggagaagatgatgaggaagatgctgggagtgacgaagaaggagacaatcctttctctgctatccagctgagtgaaagtggaagtgactctgatgtgggatatggtggaataagacccaaacaacccttcatgcttcagcatgcttcaggagaacacaaggatgggcacggaaaatgaagaaagcatgatgtcccatgagggagacggtggggaggcttcccatgatttggaggatagcaacatcagttatgggagctgtgaggagcctgatcccaagttgaacacccaagacacaagcttcagcagcatcggaaatttccagctgggcatggtggctcacacctgtaatctcagcactctgggaggccgaggcgggtggatcacctgaggtcagttcgagaccagcttggccaacatgtcgaaacttcatctctactaaaaatacaaaaattagccaggtgtggtggtgcacgcctgtaatccccagatactcgggaggctgaagcaggagaattgcttgaacccgggaggcagaggttgcagtgagtggagatcacgccactgcgctccagcctgggcgaaagagtgagactccatctcaaaaaaaaagaaaatttccaagcatggtatcatctcacttttctaatttacaggctggaacagatgagagccctcctgctgggacagagaattgggttctagtggactctgctacacttaaacctatgtgacaaaccgcccattattttattgtttatttaattatacaatgcctcgttcctatatggatttgaggcaaattaccataaattttgaaacag

SEQ ID NO: 680 - DNA, 32744 bp, Homo sapiens
  source 1..32744: mol_type = other DNA
tatcagagacattgagaggcaaattcggaaaaaagaaaacattcgtcttttgggagaacagattattttgactgagcaacttgaagcagaaagagagaagatgttattggcaaaaggatctcaaaaatcatgacttgaatgtgaaatatctgttggacagacaacacgagtttgtgtgtgtgtgttgatggagagtagcttagtagtatcttcatctttttttttggtcactgtccttttaaacttgatcaaataaaggacagtgggtcatataagttactgctttcagggtcccttatatctgaataaaggagtgtgggcagacactttttggaagagtctgtctgggtgatcctggtagaagccccattagggtcactgtccagtgcttagggttgttactgagaagcactgccgagcttgtgagaaggaagggatggatagtagcatccacctgagtagtctgatcagtcggcatgatgacgaagccacgagaacatcgacctcagaaggactggaggaaggtgaagtggagggagagacgctcctgatcgtcgaatccgaggatcaggcatcagtggacttatcgcacgaccagagtggggattccctcaacagtgatgaaggagacgtgtcttggatggaggagcagctgtcctacttctgtgacaagtgccaaaaatggataccagccagtaaggagcttctcaattcctttgatttgtcaattcctgtgtgaaggtttgtttttccaacctgtgaaagaaacgtgaatgtaaaagagacctaaataaaaggataattatatttattctctagttgatcagctataaatttatataaaacataggcatgtttgtactaatgaaacgtactgtcaacctctatcacattgttaaattaacacttttggtggtaactcaataaaattgagaaaattggaaatcctgtgttacttaaagaattagccatatttttctaacaaggtcacagagatttagggccaaattccagtcccagtgttgaattcatgttcaagtttataaaaattactttgttaatatttaacttacgtggagaactcctgctattgtatactgaaaagaggttagaattagcagattgaaggtgttttttgccctttttctaggaccagtctttttttccattttcctttttttctgctggcaagagatacctcatacacactccctgattgcctcaatcttgagattttcttttctttcttttttttttttgagatggagttttgcttttgttgcccaggctagagtgcaatggcatgatctcggctcctgggttcaagcgattctcctgcctcagcctcccaagtagctgggattatagtgtttgccagcacacctggctaatttttttttttattttattttttttttttgagacggagttttcctcttattgcccaggctggagtgcaatggcatgatcttggctcactgcaacctccgtctcccaggttcaagtgattctcctgcctcggcctcccgagtagctgggattacaggcatgcgccaccatgcccggccaattttgtatttttagtagagatgaggtttcttctccatgttggtcaggctggtctcaaactcccaacctcaggtgatccatccgcctcggcctcccaaagtgctgggattacaggcatgtgctactgtgctcggccctgatcttgagattttcaatggccagcttcctggcacctgaggagtatggcttgccagccatcatatggtttataccgaaacaggattttcccattaggcaagagactagtaaagatataggtacttgaggaatgcctttgtgtaatataatttgtaaccaagtcagagaaatacatatataactgtgaagagggtcattttctggcatgtggaaatgtttttcttaaaatgggttcaacttcaaatttagtcactgttaacaaattaatagtaacattttcacaggaaatgcagaatttactagttagctggtttttgcttctgagcggtctctgttattgatttcaggttctgcctgaattctcagtggctttccctttgtcctgttgaggacaaattttaagctaccctttgtggtcaggaccctgctaactgtagtttctttgattcccacacaactttgcagttagggtgaacttattcttcacaaacaattcttatccttagggctttgcacagtttttttcttctggaatatgcatctccacagcctccattctccctatacacaaagagaccccttttcacctggccaatttctaatcctaagcctccccctaatataggttgggcctccttttatttaccctcacactgccctgtggtacacagcacattccattccttatgtgtcacagagcatcagcatcacctgagggactaagaaatgtaactcctaggctctgcttcagaaattgatgcattttatctgggctagaatcaagcatatttagaaaaccaagaacaacttgggtgattccaatgcactgtgagcatggagaaccactgtgttgttgtgatcacctgttttctatgcagccctcagggaagtgcaaacctgtgagatcaggcaccattatctgtcttggactttgtattcccagttcctagcccagtgcctggtatgcagagggagctcatattttttgaaagaatgtgtgaagagacctgcctctgggagtcaggaatgtgacaattgggaaatccagcaacaatacctgcttttccagtacctttctcctaaaagttactggatcctacagatcttagtgggcgtatacttggtgttagaagaatagaaatctttctaattcccttccttttccccattttgcaattgtgggttggctgaagaaaagaagacaacatgggaaaggaaaatctgggtgataaacggattaaacctttaggttaccgctgctctagataaacccatgatgtgactttttgtttttctcctaggtcagctgagggaacagctcagttaccttaagggtgataatttttttaggtttacttgttcggattgctcagcagatggcaaggagcagtatgaaaggctgaagctgacatggcagcaagtgagtaaaaagcccttccccaaatccatgagggtggttcccccaggagtttgttggaacgaatatctagaaacttagggatgagcttttgagttgtttggaggggcactttttatttcgcaatgaaattagataccgaatatgtggagaagggagtgaaaaatactcgctgtaatcccagcactctgggaggccaaggcgggcagatcacctgaggtcaggacttcgagaccagcctggccaacatggtgaaaccccatttccattgaaaatacaaaaattagctggctatggtggtgggcccctgtaatcccaactacctgggagactgaggcaggagaatcgcttgaacctgggaggcggaggctgcagtgagcccacaccgtgccactgtactccagcttgggcgacaaagtgtgactccttttcaaaaaaaaaaaaatatattcactgctgacttggtgaattgggcttgagaggcttgagaatctcatgatttcttttatatgtgataccaagctctgattataattgaaaatgaaattctcattttcctggcagccattttaagaacaataaaactatttttttaaagtggaaagatggctatgttgaaaatagatttggaagaaggaaggtgactgattgcaaaaaccaacataacccagcttttctgcatttgaactcggagatgtttgaatttttgtttgctgaaatacttgttcctttttaactgtctctaatatcagcaccctaatctaagtcagctgtatcctaaacaatagctttttgctgatctccaggttgtattaaattgttttagttttgtttctatgtcaatatgttaatgtataatatgaataataaggcatcagtgtatactttttagttcaaaaaccagatgaaaccagacatggtggctcacatctgtaatcccagcactttgggaggcggaggcggccagatcacctgagctcaggagacaagcctgggcaacgtggtgaaaccccgactctataaaaaacaggccaggcgcggtggctcatgcctgtaatcccagcactttgggaggctgagggaggcagatcacctgaggtcgggagttcgagaccagcctgaccaacatggagaaacaccgtctctactaaaaatacaaaattagctgggtgcggtggcacatgcctgtaatcccagctacttgggaggctgaggcaggagaattgcttgaacccaggaggcggaggttgcagtgagccgagatcgcgccactgcactacagcctaggcaacaagagtgaaagtccatctcaaaaaaaaccaaaaaaacaaaacaatacaaaaattagctgaatgtggtggtggtgcactcctgtggtcccagcttctcaggagactgatgtgggagggttgcttgagcctgggaggttgaggctgcaatgagctgtgatcgagccactgtactccagcctgggtggtgacagagtgagaccccatctcaaaaaaaaaaaaattatatattacttagtttttatgttcattcattcattcaacagatactgagtacctgttatgaaccaggtgctgttctaggcctgagactactgtggtgaacgagacagctaaggcctctgccccaagacagctgacattctatacttaattttgataataaacagatcaacaagataattacccacagcactttttactttgaaggaaatagagtaatgagaaagattttaaattacaccattttagccacttatggtgttccttgtaaattgtagttgccttagcagccttcgtctattatcttaattatcagtgctttattaggacagctgatgaaatctgtcagtgttgaattaggaagccttttctttgacttgcctgaaaaaaatgtaagtagaaaatgaagagaagtttgtattgaggatagagccttatgaatattataactgggacatttttctcaagtgtacatgggatactgtgtgtaggcaagatcttattaatagattattgtgatatgtgcacacaggtagatttgtatttgtcctgcaagttgtttctcataaaagctgtaaaatggaagaagagcaaatatatgtaaattttcaaaaatgtgagttttctgtagtggttctttttaaaagaaaagctggcttttgcttattttgctcagagtatgtaatattggctcactttgcatatttatttattctttttaaaaaaaaattttaaatctttttgaggcacagtctcactctgttgctcaggctggagtgcagtggcacaatctcggctcactgcaacctccgcctcccaggttcaagcaatcctcctgcctcagcccctctagtagctgggattacaggcatgtgccaccatgcctggctaattttttgtatttttagtagagatggggttttgccatgttggccaggctggtctcgaactcctgacctcaggtgatccacccacctcggcatcccaaagtgctgggattacaggcgtgagccaccgtgcccggccactttgcatatttaattagactaacataacttgcagattattttttcacttccaaaatacgtattgatggtggatactaacctggtagggtgaagtgataacttaggttgcacatatgtggttcttagcaaacaactgaccagtatttctagttgcatctgaaaaagcccatctctcactgaagacctgaaagagaatcagttggtcttgaatggactccattgatgtagccacattcttagtatattgaaatgtgggttttccgtctttaaattttaaactttgaaagatttaccaaagaaatatgtagaaatgcttgtaacacaaatagcattttgtttgtattataaaatacttacagtaaagaggtctgatctcctgattaaaaagccccttcttgccacactccctttctgtgtcctctcctcttccttggtgactcctgtgaatagcagttccatacgtaggagaaactttatcaaacatttgggaaggatagggaagtttttgcattcttttcctggagactcattcttatggcacaagtaaagatactatgatcgatctttgcttgttatttttctagtgttcttcagcatatactgagtacctgccagctctgagctaggccctgtggatacattggtccacaagatcagcctcattactgatgagcttggtctggtaacatgagagcagaaaactaaactggggttcatttttttttgtttttttttttttgagatggagtttcactcttgttgcccaggctggagtgcaatggcgcgatcttggctcactgcaacctctgcctcctgcattcaaacgattctcctgcttcagcctcccgagtagctggaactacaggcgtgcgccaccatgcctggctaatttttgtatttttagtagagacggggtttcaccatgttggccaggctggtcttgaactcctgacctcacgtgattcacccacctcagcctcccaaagtgctgggattacaggcgtgagccaccatgcccggcctgggattcattcttttagatcataaattccaggagagaaggaaaaacaggtcctttatatattagtttatagtttgcctagtaaagattaagtgataatagaaaaagttattttcaagtaaatatgtaagctttttagggtcataaaatgtctcaattatacaaaaaagtcatagaaatactttatcactgagattatcagcaaatacatatttctgagatactcttctgagagtgggcaaagctcgttctatgattttcttaaattatttattgagcaataattattttttaaaattgtgatgaaatatgcataacatatagtttaccattttttagtgtacagtgcagtggaattaagtacattcacattgctgtgtaatcaccaccaccatccacctccagaatttttttatctttacaaaatgaaactccgtgcccattaaacactaacttcccatgaatattgattgtttaaaggaaggtgtttgttggctgatgtagaccagatgcagatataactggaagacattttttaaaatctgttcatggggttaattgtttttagactgtctgcaagtattgcaagtttaagaatgggggaaattgaaacttggttagtgaagggtcagaattactgggcccctttgagtggtgtagatattgctctttccgtaagactgctggggatttaatgctgtgaatacagatgttgggggcattaactgcaatttactacactccttacagctacaggatgctctttatagaaataaggattaggctgggcgcagtggctcacatctgtaatcccagcacttttggaggctgaggcgggcaggtcacttgaggtcaggagtttgaaaccctgtctctactgaaaatacaaaaattagccaggagtggtggtgcgcatctgagatcccagctacttgggaggctgaggcaggaaaattgcttgaacccaggaatcagaggttgcagtgagccgagatcgcaccatcacattccagcttgggcatcacagtgggactcttgtctcaaaaaaaccaaacaaacaaatacaaaaaaacatctatatgagtatctgagtatagatgcaaagaaaaatgtctgaaaggatgggattatttcttgatggtggatttcaagtgatttttacttccttcccatttggggccatgaattcctcatctgtaaaataagagtagattagattaggagtttgcatcctgagctctggggttgtcttggagcgctctgaaaatgggctgagtggctaggcctttcagttccctgtttcttctctaatgctgatttcatttgaaggaggggtttgacaggtaaaaatggctaagtcaccgagtagatagatggcatgtagcattatttttagttctgaaattctgagtcttgtttttgccatctaagagcttagagaaatatatacaagggtaattttcaagatatttgataaagggtagtgccgttggtcagaaaatgctggctggagtaggcacctggaggcctcctgctggccagaaggtaccccttgatttaggactacactgtgtagggtgcgggatccttgggacaatgcctgtttatcagctgattcaggggcatctctgttgtagccatcagttcagccacacattagccctgcatgtgtggcacctaaggattagatgcttagttctgcacataattaagtggattagtgataatctaacgaaagtaaaaaaggaagtaaattctaccctgggaatattccaagataccgtccgtcctttgttcgctctgttccccaccattcctactcagaatataaaacagaagaagcttttcccccctcaagattaacatccctaaccgtgctgttctcccacctcttgtttcaattgtgtttcaggtcgtcatgttggcaatgtacaacttgtctctggaaggaagtggacgtcaaggttatttcaggtggaaagaagatatctgtgcttttattgagaaacattggacttttttactagggaataggtaatgtgtttttaaaaaatcttatacttcaaggaatatgtaaagaatgaagtatacaggatttgagacagcctaatgtagacttgttagagatttattttaatttttttgagatagagtctcccaggctggagtgcagtggcatgaccatagctcactgcatcctcaacctcctgggctcaagtagtcctcctgcatcagcctcctgagtagctgggattacaggtgtgcaccaacatgcctggcttatttatttatttatttattttttggaggcagagtcttgctctctcccccaggctagagtgcagtggcgtgatctcggcacactgcaaccgccacctcccgggttcaagcgattctcctgccttagcctcctgagtagctgggattacaggcacctgccactatgcccagctaatttttgtatttttagtagagacggggtttcaccatgttggccaggctggtcttgaactcctgaccacaagtgatctgtctgcctcggcttcccaaagtgcttggattacaggcgtgagccactgcgcctggccttatatttttgtagagacaggggtctcgtgttgtctcaggctggttttgaactcctgggctcaaacagctctcctgccttagccttccaaagtgctgggattatggtgggtgtgaatcaccgttccttaccttgttagagatttagagtgtttacttgtggcaattacgaaaatttttgaattccagagaatatttttacttttttaagattaaaaaaaaaacttggctgggcgcagtggctcatgcctgtaatcccagcactttgggaggccgaggtgggtggatcacctgaggtcaggagttcaagaccagcctcgccaacatggtgaaaccccatctctactaaaatacaaaaattagctgggcgtggtggcaggcaactataatcccagctactgaggaggctgaggcaggagaattgcttgaacccaggaggtggaggttgcagtgagccaagattgcgccattgcactccagcctgggcaacagagtgagactccatctcaaaaaaaaaaaaaaaaagatgtttgtttcaactgaacatgacgttttttgaagaaattcttagaatgttaaaaaataagagttgtattacatgagactgttcaagagttggataagtcaatatttcacttgaggagatagggttattatattcttttaagctgtgtgtggtggggcatgcctgttgtcccagctactcaggagaccaaggttggaggatcactcgagcccaggagtttgaagccagcctggacagtatagtgagacccccatctcttagaaaacaccaaccaggctgggcccggtagctcaggcctgtaatcccagcattttgggaggccgaggcgagcagatcacctgaggtctggagttcgagaccagcctggccaacatggtgaaaccccatctctactaaaaatacagaaattagctgggcttggtggcgggtgcccgtaatcccagctactcgggaggctgaagcaggagaatcgcttgaacctgggaggcggaggttacagtgagctgagatggggccacttcactccagcctgggtgactcagcgagactccatctcaaacaaacaaacaaccaaccaaaaaaagaaccaaaacagagcagtgccttctaggaggacaagacaggaaaaataatggcagttactgactgcatctatttaggttgcccttagttaatagagttttgtattactagtatttgtttttaactctgtaaagtagacactcttttttatttttaactatttttcatagtgcttagcaaagtctgggcacatctgcatgtggcttgttcattggtcactgtgtttatcattgcgctttgagtttgctgctgtgtgctctccccagtggctgctttggtgcattagactcggggatgccgatgcacagaccttgcgaccatatattttcactaaatgtccacgtggatctatcaagacttttattgctcttgggtacttgtgagtttgctaccacactggtgaatttttgtttgagattctgattgttagttgctgtctgaagtcctgtgtgagattcatgaatcttacataatgaggttagtttagacatgacaaagtctttgatcacttcaggtcagggcagggagttcatgcctttcctcacttggggttcactgcagcctctgtttcttcagaagctgaggaatcacagctttgctcatgttactgagagtacgggagggtagtcagaaggagggtgacctgcaggctgctgtgagaaaatggaatagactccctacatttttgcaaaaggggttattttagttcttgagctatttattggtgctaagaaaagaatcgacactataactggttctttctcataaggaaaagaaatctgttgtttagtttaatgatttagcactatttatggaccttaatgtaccccatttataagggataagaaagggaaaaaactgataaaattggatcttggaatgttttcatgatcttcgagtgctgtcctatttagtgggttatctcctggaaaaaattagatttagattgcctgtttttaaaaatattgctggattttaacagaagttgtttaaatgcttcatttgttcatttctagagcatgttctgagaggaatcagctgagccttatttctttttaacatgccaatgaaaggcattaattactctccagtttctgtgtagtttatttagtgtgttggccatattggtatatcaccggaattattatttatttgatcttcctatttaaatcaagtcacctgaaaaatacattaattttaaaaagaaacttaacatcaccatggtaagtgggaaacctatataaattgtcataagtagaatgtaacaataaaaataaaacaatgctgttaaattgtagctggatcccatggcatataatggcaagccatggctttcttttccagtcaaaaagggaggctgctacaagtgttaatgagaatttaaagcagtaaactttcttttgatctaaccagaagaagcaaaagagaattagaaatcactttatgattcttgccacccggtttcatgctacagtgctgctcttcactttgggaactccacttgaaatatcagtgattggagaagtcccctgaaaccactacccctgggtagttaccacttgctcagacatttctgtgtatgaatgttaacaagattaccgtaccccagagaagctgtctgtaaagagcatttatatttaaggtacacttttttcatagctactaaagattttcattctgctatccataggacgtactttatttatttacttacttacttatttttttgagacggagtcctgctctgtcgtccaggctggagtgcagcggcgtgatctcggctcactgcaacctccgcctcccaggttcaagcaattctccggtctcagcctccggagtagctgctactgcattaagaactaaaattgaccagtattaaccgcagtctactgtctatgccttcccttggaaaccacaagcctttattagactccagagtcccaaaatagttccatcagtcagattctgccagtgcaactgctgtccaggcaggaaggcaaatgcttcctatctgccaccttcccagaatcctcgtaaagttgattgaagtgtagatactatgaatgtgtactatcatatttcatcaattctaagatccattaactttaagatacaccattttgtgtacaaataagagctaactaccaattaaattatgacatatcagtaactataagatgtatctagctgtcagagatgtcaaaatttgcaaaattacgtatcttaaaatcagtaaaatatggtagtagaagaaaatattcaagctattcttcactaatcaaaactataccttctggaagaattcaaggccaggactgtaaaagcagattaaatgaacaaatactaggcaattattcagtaataactaagttttcatatactttttaacttgtttctacaatggtacataaaattatttaggttagcacaccccaccatgcacgactaatttttgtatttttcgtagggacagggtttcaccttattggtcaggctggtcttgaactcctgacctcaggtgatccacccgcctggcctcccaaaatgctgagattataggcgtgaaccactgcacctggccaggacatactttaaattcttaaaaattgtaaccatttctcatttgtcacaagatctaagagaatgctatacagtgtaatgaagttctgaattttctttcagatgtttacaggtttttcttttatgcctttaatatgttattaaagtttaaatgtaaaaaggtgggggtttttttggtgctacccatcccccttctccagccactaggaagaaagctgtgtgtgtgttcctggagtggcttacacacagcttgtagcatccagggtgggcaaaaataagcctgttttccaaatactgggtatttgtgctctgatcactgattgctgcttctaatcatagaggtgaaaagagatggcagccattgttgttatagctcccctcattgcaaaaatgggtaaaggcatttaatagacacttcttcaaagatattaaaatggccaataagcacatcaaaagatgctcagcatcactaatcattagggaaatgcaaatcaaatctataacacgataccacctcatgcctcttaggatgacaattatcaaagaaacaaaacaacaactgtgggcgagaatgtggagaaatgggaacccttttgcagtgttggtgggaatgtaaaattgtacaatcgttgtggaaaatggtgtggtgtttcctcaaatagttaaaaatataatgatcatatgatctggcaatttcacttctgggtatatactcaaaaggactgaaagcagggtctcagagatacttgtatatccatgtttttagcagcattattcacaataactgagatgtggaagcaaccaaagtgtccatcagtagatgaatggataagcaaaatgtggcatatacatacagtggatatcattcagtcttaaaaaggaaggacattctggcacatgctgcagtgtagatgaaccttgaggacattatgctgtgtgaaacaaaccaatcacaagaaaacaaacactgtgtgattccacttatctgagatacttagggtagtgaaaatcacagatacagaacgtagaatggtggttgtcagcacttggcggggagggtggaattgggagttgtttaacggatatagagtttcggttttgccctgtgaaaagtgttctgaaagtggatggtggtggtgattgtaccatataaatgtacttaataccactgaactatactgttaaaaattgttcagatagtaaatgttatgtatattttaccacaataataattttgggggaaaactattgaggccattcataaatactgtgtttgtatatgtcctggcaacaaatttattccattccatacaaatgtctcattatgtgttgtgctgtgatttagctggctatattagtttgctaatgatgctgtaacacaaactggatggcttaaacaacagaaatgtattctagttctagaggctggaaatctgaaatccaggtgttgataggattggttccttttgaaggctgtgagggagagagtattttatgcctctcccctagcttctgttagccacaggccttccttggcttgtagatgacgttctccctgtgtcttcatgcatcttccctctctacacgtctgtctctgtgtccaagtttcccctttgtgtaaggacaccagtcatattggattagtgttcaacttaatgacctcatgatcactgtttgcacataaggtcacattcacaagtactgggacttccaacatcttttgggaggatacgatgaaatctgtaacactggccgataattttataaacatttatgttatttccagtttttctgtgtttaagttagccttgtggggcatattcttgtatatatatcctttgtgtttttgtgattagaagtagatttgcgaggtcagaggatacacacaattttgctgtacattatgaaagtaacctccagaaagtatatgcccatttatagtcccactgtcaatgtacaagtacgcacccgttttcgacacagtaaataacacattggtttttaaaatcttttgagtctttgtcagtcttttttattgtttttgtttgtttgagatagggtttcaccctgtcacccaggctggagtgcaatggcacagtaatggctcactgcagccactacctcccaggcacaagtgatcctcccacctcaacctcccaagtagctgggaccacaggcacgtgccatcacacccagctaatttttttatttttatttttttgtaaaaatgaggtctcactatgttgcccagacttctgtttgtttattgcagtaaaaacagtgaaaatttaccatcttaaccagttccaagtgtacagttcagtggtgttaagtatgttcacgtatttgaatatagattcacagatggccagaactcttctcagcttgcagatctgaaactctatccctattaaataactctccattctcccctccccacagctctaggcagtcaccattctactttctgtgtctatgaatttgactactctaaatacttcatatatgtagaaccatacagtatttgtctttttgggactggcttatttcacttagcataagtgtcctcaagggttatccacattgcagtatgtgataggatttcctttatttttaagactgaataatattctattgtatgtgtttatgctacattttgtatttattagagaggatttggaaagattagaaaaagataagaatgtaggagaggtactttggaaccaaaagcttgggggtttcattctctccatctcagatagtgctttttttgagacccagtttcattcttgttgcccgggctggagtgcaatggtgcagtcttggctcactgcagcctccgcctctcgggttcaaagattctcctgcctcaccctcccgagtagctgggattacaggcatgtgccaccacacccagctaattttgtatttttagtagagacggggtttcaccctgtcagccaaactggtctcgaactcctgacctcaggtgatccacccgcctcggcctcccaaagtgctggaattacaggcgtgagccaccgcacccagcctcagatagtgcttatgcctactatagctgagcttatttgttttgtttattttctgagttttctattaatattacgtctctgttcctcagaatggttttcctttgccttcccagcaataccttccaactgttagactggtcttcttgtgaaagactgtcttctaggatttccggggattgatgtatcttttcaaggtggaaatagaacagtcgccttgaaagaatttccgttagggaacccggatagttggcattttgcatgttttgttattttgttgtgcagtaggtgctctctgtgtttgtggagtataccacatagttttgttaccactctagtgcatcgaggcagataggatcagattgagagatgtgtgctactcctcgggtaaaatgaggtatttactggagccagttaacttctatcacaaaatgcccagccttggagttacactttttgtatgctttattcttgggagctgtgcttaattcacataacaaagcaacttaattaaaattagcctgtagaattccataatcgtgatgattgtgatgagaagtatttcacgtgctttgtttgaattattgcatttaatcctcacagcaaccctgtgaggtaagttctattatcctgattttacagatgaacaaaccgaggctgctagaagttggtagcgccagggtttgaagcaggcgaactccagagcctctctcctgcctctcgtgctctgctccttcagtagctggaggtgccattgcatgttgcaggccaggagtcacagtatacacagactgtcttttctgtataatgagcaaaagtgccaatcatttttaaattcttggactctttaggaaaaagacgtctacctggtggagcaccgtggcaggttgcctcagcgtgggaagtcccatgtacttccgttcaggtgctcaggaatttggagagccaggatggtggaaacttgttcataacaagcccccaacgatgaaacctgaaggagagaagttgtctgcctctactttgaaaataaaaggtactgttgtgagaacagtacaaaagttgctagtcagaccagagccaagcaggtgtgagcccaggagacgctcctgcttccactgggcatggctcgcaggcctctctggagctactctgtttaacacttctgtgatgacacttgtgtgtgtgctagaaataaatgccacataaaaacattttatcacttcctaatcaagctatcagttttataaatttcccagggtatctgaaaggttcaatgttttccatctggtttttgtttttaaacttctcacaaaggtgaagagatattttaaaattcccgtaataaataacatgatgaattcccatgtaccttccacctcactttgacattaactcctgacagtctcattttatctaaatcctcagtacttttccccaaccttccccattcttacaattggattatttagaaacaaatcccaggaatcaacatttcattcctaaatatcttagtatgtatctctaagagatcaggattctttcctttttgcagcctgaccataatgccattttcatatttaaaaagatgttaacagtgacttcttactatcacatattgatctggttttataatctaaaaagcttttaatgagcttttaaatttttatatttatttgtttgcttgtttgtttatttatttgaggtacagtctcgctttgttgcccaggctggagtgcagtggtgcaatctttgctcactgcaacctctgcctcctaggttcaaatgattctcgtgcctcagcctcccaaataacatgccaccatgcccagctaatatttttgtatttttattacagacggggttttgccatgttggccaggctgatctcgaactcctgacctcaggcgatccacctgccttggcctcacaaagtgctgggattacagggtgagccaccggatcaggctgatgagcttttaaaattttaaaaatatgattgggaagaaaatcaaatagtacttaagggtgtaaagtatgaaagttcccccacctgcctatggcctgcaatttcacttcccagagtaaccactgttgtcttttgtgaatactttcagaaagatctctgcagatttaagcattttcttagttttttaaaaaagtaaaatggactcgtactattatgagttttccatttttgccacacttaccagtatgtcttggacatctttccatgacagtacatgtagatttaccctattttatttcattacatccattatataattatgtgataatttgttaaaccattctcctgttgatggacattttggttgtttctacctttttgttgctattttatttatttattttttaattaaaacatttttaaaaagtaatagagatagggtctcgccatgtttcctgggctggtcttgaactgttgggctcaagtgatcctccagcctctccttccaaaagtgctgggattacaggcatgagccatcatgcctgaccttttgttactttaaacagtgctacaattctacaaatttgtgtacatgtgaaaatgtgataaattcctggagtttctacatcaaagggcatattcattcaaaattttaatcaggattgccaaattatcctccaagaaactgtaataaggccgggcatggtggctcatgcctgtaatcccagtactttgggaggccgagacaggtggatcatctgaggtcaggagttcgagaccagcctggccaacatgatgaaaccccatctgtacaaaaatacaaaaatcagccgggcgtgatggcgcatgcctgtaatcccagcttctctggaggctgaggcaggagaattgcttgaacccgggaggcggaggttgcagtgagccgagatcacaccactaacattccagcctgggtgacagagcaagaccctgtctcaaaaaaaaaaaaaagtacccattgaaatgcccatgaaaatgcccatttccccatacatttactgagctttatcaaactttttttttggctcactgcagccaccacctcccaggctcaaaatccacccacctcagcctcccaaagttctgggattaagaggcgtgcaccaccacgcctggctaaacttttaatgtttgccagttccagtaggtgaaagatagtatttatttgtttaaatttgcagtataacttcttttttctcaagagatatctaagtcttttttagtttagggcattcattgaacatttctctttattgaacatgatattactcataataataaattagcaaaagaaactaaagttgagtagttattttaaaatttagatatgggttgagcaatccaaatctgaaaatccaaaatcaaaaacactccaaaatctgaaactttttcagcactgacataacgctcaaaggaaatgctcatttgcagcatttcggattttgtatttctgggtttgggatactcagccaataagtaaaatgcaaatattccaaaagccgaaaacatctgaaatccaaaacatgcttgtgcccaagcatttcagatgagggatactcagcctgtatttattctttcttagcagcctcaaaaccaactttagatcccatcattactgttgagggacttagaaaacgagcaagtcggaatcctgtggaatctgccatggaattaaaagagaaaaggtctcgaactcaggaagcaaaagacattagaagagcccagaaggaggccgctggctttcttgacaggagcacatcttctacccctgtaaaattcataagccgaggccgcaggccagatgtgattctggaaaaaggcgaagtgattgacttttcctccttgagctcctctgaccgcaccccgctgacaagcccatctccttctccttctctggatttctctgcccctggtacacctgcctctcattctgccacacctagcttgctttcagaagcagatctgattccagatgtgatgcccccacaagccttgtttcatggtaagagtttgtttgctttgctcttttattttgggtatgggccatggtataaatgtacaagttttcaccccgtgggctgtgtgctctgcatttcttccttcctatgtcttgatgacactgttttgtactctgcacagatgacgatgagatggaaggcgatggagtcatagacccagggatggagtacgtcccaccccctgctgggtcagtagcttctgggccagtggttggggtcagaaagaaggtcagaggccctgaacagataaagcaggaggtagagagtgaggaggaaaaacccgacaggatggatattgacagtgaagacacagattcaaacacatctttgcaaacaagggctagagaaaagaggaagcctcagctggagaaggacacaaagccgaaagagcccaggtatactcccgtgagcatctacgaggaaaagctgctgctcaagaggctggaagcttgtcccggtgctgttgccatgactccggaagctcggagactgaaacgcaaactgattgtcagacaagcgaaaagggataggggattaccactttttgacttggatcaagttgttaatgctgctcttttgttagttgacgggatttatggagccaaagaaggaggaatttccagacttccagctggacaagccacgtacagaaccacctgtcaggacttcagaatccttgaccgataccaggtgaatgcaagcacttgctgtaaagcccttgggggcaggagtggaggtggggcaggcagcactaggcattggacatggttatgctgtgaccttttaaatcctgagtaatttgggaagagaaaagtaaagtgcaagggaaaaaaatacaaaaatcgctgggctttatttttcagaattgttcattgtaagtacacctgaatacatctgagtttttcttttcctttaggcattcaaacataacctataagttttcttcatctgtctctcttgtctctctctctctgaggatagatatgcatggtttgtgtcgtagctttgacaaatttgttgaggccatgacggtgtctctgacactgtgttgcagaggatctgaaggtgtgtagacatctgcgaaggacaacatgaagaaatagcagccaagggatcagtgtggtatcagtgttgctcaaaggatggtcggtggaacccaaattttgtggatgcttctgggaacaattaattccacttagaactacctgtatatactctcccactgggaggaacaagaggccttattccctttatctttgctagcacttgacactaaccagcctttaagttttgctaattggctggctgtaaagtgaaatcttgttttttatttatatttctttggttacaggtgaggttaaatttcctggttgtttctttgtgaattgcctgtttggagtctgcatgtttttctctcttctctggaagctagtgggatctgctcttcattgctggtgttctggtattattcagtgatgtgccgtatgtagggcttatgtctttccttgtgctggacatgtggtgtgtgggccctttcaatttgaaactttctttcctgagtatggaaaagtcttgatttcctatcttctattttttctgttctctcattttagaactccccattatttggatattggaccctgtagattaaaagttggcaaactttatctgtaaagaaataagtatttctgccagatagtaattattttaggctttgccggccacaaaatctcattcggaactcttcaactctgctgttgtgattggagagccgtagtgaatgagtgtggctgtgttccagtaaaactttatctactaaaatgggcagtggactggatttagcctgggggctatagtttaccaagatccctactccagatagatcctcttttcttttttttcctaattcccatctttcctgggaagcacagtattaactggcctgcctaccaggagccaagtcgggagggcccaggagcccatcgtttaggaggtaaactgactctccctgtcttcagtacagtactcccacccttggcttcctgtgtccagaatctccctcttgagcctctccagtcttctgcccgtggagggaaagatcatttcctagatgtgggcagtataattactataggggtataattggagcctttaacctcttaaagagcctcacaatccatagtcataccccccaggctctaagcctgatgccttaggtgactacacttccctgaggctgtgttttgtaaatcaccctgcttagcttcaccactggcttaggtattggctttctttggtctgttaagtcatttgctgcttgttcatatgcttttgttagtcatctattcacttgttcttgttctttttttttttttttttgagacatggtctctctctgtcacgcaggttggaatgtagtggcacaaccacagctcattgcagccccgaactctcaggctcaagcaattctcccacctcagcttcccaagtagctggtactataggcacacactaccacactcagctaattttttttttaatttttatttttagtagagacagggtcctactatcttgcccagactgatctcaaactcctgggctcgagtgatcgcctcagcctcccaaagtgctgggattacaggcatgagccattgcgcctggccaatattcacctgttctttgttcttattcttgtgggcctgtctgtttactgcctatacttaattttttaaattgtaagatgtgtcatacagatagaaggcagcatagaaatatggtataatttagatattagtaaaataaatgcccatgtattcatctcctggataaagagtgttgtaaacaccttagaagtctcctgtgtactttctgttcccctcagaggaagccactttgacttacagtgttaattattcttttgctttttaaatgtgtatgtctctaaatgatatacttttcgtttaaaaaaatactgagtagcaagcataaatctagctgtgtaagtaaattgccactattagatgaagtttcctggagaagataagctaaatagtcattctgggtcattgttgtggactgaattgtgtcccccttaagcatatgttgaagtcccaaccctggtacctatgaatgcagccttatctggaaataggccctttgcaaatataattagccaagaccaccaaggattgccggcagcaccaggagctaagagaagggcacagaacaaattctcccctagtgcgtaccccagagagcatagccctgcccacactgtgacttctgacatttggcctctagaactgtgagacaataaattcctgttgttttaagccacccagtttgtggtgctttgttcctacagccctgggaaactaatacttacagtgatgttctggcttcggcttccatgaaccccttctgaggtagtcactggccaaggtcactagggagtcctgggaaacatgaggctcaccatagcgtatgcatcagccagggctgtgatgtataccagagatgcggcagaaatctgggcagaggaagtgggatcctctgtatttcctgcctgagctgacagcttccttccagcttgcagaaggtcaaagcagttatttgtggagtgagcatcatcagctggtctttggggtgggcatgggtggtgtacaggaggctcacctgtacatggtgaagacaagctgagcgtagataagattctgggccacgacgccataggtttaaaagatggtcagtggcagcaaggacttaaggatgatagcctcaatatgtgttagaaataccaaaattgttagaaatagataatcggtgctgcgaagaaaagtcagcacagagacaaaaggtatctcagcaaggccatcttttctttctgtagaaagggtgctcagttgcagatggaacaaaggtgagagcacacttgaacacaggaaaagcagacatatttatcccttacgcacttgggtcgtccttactgctgtgtcctgcatccactggctggagcgggacctcacaatcttaaactgatacccgatttgctaatagcctaaaactttcctaaataggtaagtgcagggaagaacaaagaagttgcttacaaaaggtttaaggaagcaataacatttccaaataaggaaggggcgtagactgtgggctggaacgtgcctgtgagcatgtccaacggttacagaggatagggcttaacaaagagttattagcacaaggcaaggagacttgaagaaagttagtctttaaaagaaactgttatttctaacacttatgatttattctttaacaagaaggaaaactttgaagaggaaactttttactttctacactatgtctgccccttgggtcacacttgttcaccctttgttgtgaaactcagcaggggtgttgggatctcccctctctggagattcttttgccctcctctgtatttgatctcctgtttcctgtggcccatctttaccttgttataggtttattcccttgttcttaatgacttcctgagaaaagctgcatgggaagtaaaatttgagaccaacatactgaaaagaccctcattaagtgaggttgaacctggaattccatacacagccacattgtctaggtgagacctctgttgaggaccactgcacttcctttaggttttttctttgaatctagtcagagtccctggggaataatcttctgggctcaggatgctggttgccaagttggggaagagggaccttagcattcagcttgtcaggtactcacacctcagccctccagctggatcccctgttagttctctagagatcagacctcctggcttctgggggagggcagccacccagcaacagggagtggaaggatctggggatcatactgctttccacatggtgtttgcctgctccttattttattgtcccatttggtcccagttccagaggaatctgctggctgctgcctggattttagcgggttctgtagtatagattgggttagttctcatttagcttacccaaagccactttgggattttggtgttaaatcagttactatttgtccatctgtttaccagttactgttctaattaagtcagcttctatagttttagtgggattttgggaagtagtaaagctttatatgcttgtgttttaacccagtcttaacttggaattttagtataaattttaatgtatttacacagggagtggctgtaaatgcatttattcaatccatactcttgttttatatttattctttgaatgtattcgtagctataagtttctcaataagtgctgctttagctgtgattcttgacttttgaaatgatgtgattttatttccaatcagtacttggcattttgttatttttctcattatttcctctttaatccaaaggttatttagttgttttttggttttcagatatatgagaattttaagctatgttttggtaattgatgtgatttctaatgttgtattatgatcagagaaaatagtttatgtgatgttcattctgtaccataaagaaagttatacattctatttttattctttttataggtcctaacttaagatacatttatttttccttattctttttttaatatcatgtggttgtccccccaaacaaaaaagtacattttcatgcacttatctctttttttcttttgtattgcttatttaaatgacataaatctttactaaattattcactcgtcctattgtttctttctagattaatttcttgctggactgctttctctaacagttctttaaaaatatgggctttttgaggttaattttgaaaacttatacgactaagaatatcttcatttcactttttcatttaaatgatagcagtcatataaaattgttattttagttttttccattgatattttgaaattatgacttcattatcatcttacatacagtgtcactcctgagaaccccggtactgataagaaatagaaatttttgactgggctcagtggctcatgcctgtaatcccagcactttgggaggtcgaggcaggcagatcacttgaggccaggaatttgagaccagcctggacaatatggtgaaaccccgtctctactaaaaataaaaaaattagccaggcctggtggcgcatgcctataatcccagctgcttgggaggctgaggcttgagaatcacttgaaccagagaggcagaggttacagtgagctgagatcatgccactgcactccagcgtgggtgattgggtgagactctctctcaaaaaaaaaaaattttttttgtttcttatcaattaagtggcctccttgttttattctcccatctcctaaaactttcagaattttctctttgttttttatctttaattagtgcatgttaagtgtcttttattttctctttttaaagctttgttttcttttttctattattttattttccagcacatccaaaacacagaaattgtgtttgttctcatttgtcttacttgacaactctgttcttttggtcagaggtattttatatgcttcttggcatttattctgcttggtgttcgctgaccttcctgaatgtgtggtttggtgtctgacattaaattggggatattctcagtcattattgcttcaaatttttcttctattcctttctgtcttctggtattcccattgtgtgtttattacaccttttgtagttttccgcagttctcggatagtctgttttgttcttttttttcatcttttttgtctttgcttttcagttttggaagtttttactgacagatcctcaagttcagagattctttactcagccgtgtccagtctacaaataagcccatcatcaaaggcaacctttatattggttacagtgttttttatctccagcatttctttttgattcattttcagagttttcatctctttaattgcccatctgttcttgcatattgtgtattttgtccattaagcccttaacatattaaacatattataggcatatcttgttttattcacattgctgtattgcacttcacagatactgcattttgtacaaatggaaggtttgtgacaatcttatgtcgagcaagtctgttggcaccatttttctagtagtgtgtgcttactttctgtctctgtgtctcacgttttggcagtttttgcattacttccaactttttcattattattatatcttttatggtggtctgtgatcagtgatctttgatgttagtattgtaattgttttggagcaccatgaaccacacccatatgagacaatgaacttaattggtaaatgtgtgttttctgactgttgcactaaccagctgttccccatgtttctccctctccttggggctccctgttccctgagacaacaatattggaattaggtcagttaaccctacaatggcttttaagtgttcaagtaaaaggaagagttatacttctctcactttaaataaaaaactagaaatgattaagtttagtgaggaaagcatttcaaaagcagagataggctgaaagcgaggcctcttgtgccaaacaattagccaaggtgtgaatgcaaaggaaaagttcttgaaggtcattaaaggtgctactccagtgagtgcacaactgataaaaaatcgaagtagccttattgctgatatggagaaagtttgagtggtctggatagaagatcaaaccagccacagtattcccttaagccaaagcctaatccagagtaaggccttaactcttgaattctgtaaaggcttggagaagggaggaagctacagaagaaaagttggaagctatcagaggttggttcatgaggtttaggaaagaaggcagctctataacacaaaagagtgcaagttaaagcagcatttgctaatgtagaagcagcaacacgttatctagaagacctagctaagatcattgatggaagtggctacactaagcaagatgttcactgtagatgaaacagccttctatttgaagaagatgccacctaggactttcatagttagagagaagtcagtgcctagcttcagagcttcaaaggacaagccaactgtcttgttagggattaatgcaactggtgactttcagttggagccagtgatcatttactcttccaaaaatcttagggcccttataaattatcctgaatctaccctggctgtgctctataaatatagcagcaaagcttggatgacagcatatctgtttacagcatggtttactgaatattctaagcccactattgaaagctactactcagagaaaaagattattttcttttttgagacggagtcttgctctgtcgcccaggctggagtgcagtggcgcaatctcggctcactgcaagctccacctcccaggttcatgccattctcctgcctcagcctcctgagtagctgggactacaggcgtccgccaccatgcccagcttattttttgtattttttttagtagagacgggatttcaccgtgttagccaggagggcctcgatctcctgacctcgtggtccgcccgcctcggcctcccaaagtgctgggattacaggcatgagccaccgtgcccggcctgaaaaagattattttcaaacaattactgctcattgacaatgtacctggtcacccaagagttctgattgagaggtttaagattagtattattttcatgcctgctaaaacaacatctattctgtaacccatggatcaaggagtaattttgactttcaagtcttaccatttaagactctttttaaggctattgctatcatagatagtgattcctctgatagatctgggcaaagacattgaaaaccttctggaaaaggagtcatcattctagatgccattaagaacatttgtgattcatgggaggaatcaaaatttcaacatttacaggagtttggaagaagttgattccaagcctcatggatgacttttgaggggttcaagacttcagtggaagaagtcactgtggatgtggaaagagcaagagaactagaattagaagtggagcctgaagatgtgaccgataaatgtcatgataaaacttgaatgaataagtgttgcttcttatggatgagcaaagaaagtggttttttgagatgctatctactcctgctaaagatgctatgaacattgttgaaatctcacaacaaaagatttagaatattgcataaacttagttgataagttagtggcacagtttgactcagattttgaaagaagttatgttgtgggtgaaatgctgtcaaacagcatcacatggccaggcacagtggctcacgcctgtaatcccagcactttgggaggccgaggcgggcggatcacgtgaggtcaggagtttgagaccagcctggccaacatagtgaaaccctgtctttactgaaaatacaaaaattagccaggcgtggtggtgtacacctgtagtcccagctacttgggaggctgaggcaggagaatcgcttgaacctgggaggtggaggtctcagttagctgagatcatacccctgcactgtagcctaggcaacagggcaagactctgtctcaaaaaaaccaatatcttttgtgaaaggaagagcaggtcaatgtggcatgcttcagtgttgtcttattttaagaaattgccccagccatcccaaccttcagcagccaccaccaccctgatcagttggcaaccatcaatattgaggcaagagcctctaccaataaaatgattgactcactgaaggctcagatgatcattggcattttttaacaataaagtgtttaaaattaagtcacacatttttttcttagacataatgctgttattgcacacaacaacaatatagtgtcaacttttttttttttatttgagacagagtctcactctgtcacccaggctggagtgcagtggtgcgatctcggcttactgcagcctccacctcctgggttcaagcgattcttctgcctcagcctcccgagtagctgggactaaaggtgcgtgccaccacgcccagctaatttttgtatttttagtagagatgggatttcaccatattggccaggctggtcttgaactcctgacctcgtgatccgcccgcctcggcctcccaaagtgctggaattacaggtttgagccactacgcctggccactttttttttttttttgagacagtgtctcgctgtcacccaggctggagtgtagtggcacaatcatggctcactgtagctgtcagttgacttcctgggctcatgcagtcctcccacttcagcctcccaatgtgctggtattacaggcatgagccaccacacccagccttaaacataatttttatatgcactgggacaccaaaaacttgtgcagcttgctttattatgacattcactttattgcagtggtctggcactgatcctgcaatgtctctgaggtgtgcctatattttaaattcccagtccagtagctgtaacatctttgccatatctcagtctggttctgatgtttgttctgtgtcttcaagctgtgtttttttgcctttataccttgtaattttttgttgaaagccaaagatgatgttctgggtaagaggagctgtgataagtaggctgttggaaatgggggaggtgtgggcagggaaagccctctatagctctgtgagtagttctcagtcttttttgagcctgtgctctgggctgtggactaaaagtgcttctcagttttctctccggtcagctgggacaggatggctagagggtgtgaagttaggtatttctcttcccccaggtgagttaggctctgattaaatcccaataggttaggctctgataaaaataacttctcctgagggcaggtgttactaagaacacaatgctgtgttttattttaagatggttccttttcccctcctccatctggaatcaagaggggagttttctttgatattcactgtgagaacctggtccaacttctggaggtgaaccttgtggagtggagtttttatccttagacttgtccgcattgagccttcagcaattttcagttcttcagggctttcccgccttgatgctggttcccacagaggctctgctcccgtgtgctgtgattctctttctctccaaatttgagggcagtggtttgccttgttatctcatgtcttttacggatctacaagagttcttgatttttcactttgttcagtggtttacttgttaggctggaggaatgacttctaagcttcttgcctgccagagtggaaatcagaagtccttggatatgctgctgtgatctaggaaattccccattattgcttctttaaatatgttcctcctttatcttttcctcttctgcactctgaatatggatgttaacaccattacttcttttttttttttttgtcttttcttttgctttttaaacaaaatccttaaccagtccctgacatcatttgttgagtgctttatttcagtgatcatgtgtttaatatctggtaatgaataagagatgcttcataattactcattcctgcttccaggctcctccattaccttggaggctatttcttatgctttttcttccttaacagctttattaacatacagttcatataccttacaattcacctatttaaagtgtacagttgacgggttcctaatatattcacaaagttgaaccataatcaattttagaacattttgttaacccacaaagaatccctgaaccctttagctgttactacccaaaactccctattcctactgcccatgaattgactttctgcctctgtagatttatgtactctggacatttcacataaatggagtcatataatatgtggcctttggtgaacactttctttcacttagcataatgttttcaagattcatccatattgtaacatatattagtattcctaaatatggcttaatattccattgtatggatagaccacatttggtttatccattcatcagttgatggacttttgggttgtttctaccttttgactatgaacataaatactgctttgaacatatgtatacaagtttttgtgtggacacacatttttatttctctgagtgtagatctaggagtggaattgctttgtcaaatgtaactctgtgtttaactttttgaaggattgctagactgtcttccaaagtggctgtgccgttttacattcccaccaagcagggtatgaagattctgatttctccacacatccttgccatattgttgttgtctgtcttttttattatagccatcctactgagtatgaagtgtagtatctcattgcagttttgatttgcatttctttgatgactattatactttaaaattcttgtctgtttggtaaattaagtgtgccttttcctgtaatagcttgtttagtttgttatccttttgttttcttgcttttttttttatttttttttttgaggtggatttttactgttgtcgcccaggctggagtatagtgatgcgatctcggctcactgcaacctctgcctcctgggttcaagcagttctcctgcctcagccaccgaagtagctgggattacaggtgcccgccaccacacccagctaatttttgtatttttattagagatgtgggtttcatcatgttggccaggctggtctcgaactcctgacctcaggtgatccacccacctcggcctcccagagtgttgggattacaggcatgagccaccgcgcccggcgattt

SEQ ID NO: 681 - DNA, 21098 bp, Homo sapiens
  source 1..21098: mol_type = other DNA
cgcgaggtggctcagccgcaagatggcggcgctggcggaggagcagacggaggtggcggtcaagctagagcctgagggaccgccaacgctgctacctccgcaggcgggggacggcgcaggcgagggtagcggcggcactaccaacaacggccccaacggcggcggcgggaacgttgcggcgtcgtcgtccactggcggggatggcgggacccccaagcccacggtggctgtctccgccgctgccccggcgggggcggccccggtgcccgccgctgctccggacgccggcgctccgcatgaccgacagactctactggccgtgctgcagttcctacggcagagcaaactccgcgaggccgaagaggcgctgcgccgtgaggccgggctgctggaggaggcagtggcgggctccggagccccgggagaggtggacagcgccggcgctgaggtgaccagcgcgcttctcagccgggtgaccgcctcggcccctggccctgcggcccccgaccctccgggcactggcgcttcgggggccacggtcgtctcaggttcagcctcaggtcctgcggctccgggtaaaggtgagccgtggggtcccgggtaggtacggccgccgcgaaggggagcaagccggtaaggcaggggctggcaggcctgcacctctgcgggcttgttttgaatttcctgggcccgcctctagggccacatgcccgcccctttctctagtgcgcgggctgcgcagtcaaacccccttccgagctgtcagttccagtgagaagctgaggagagctgttgagcagagggatgtatggggaaggtgagcgcggagaggcgggatcttcacgctcttggtccctttcctttcatttgggcttttgagccttgggcaggtccgcatgacactaacagtgtttgtacagtttcgtactagcgtactttaagtactgtaagtactttattttctctttatttctttagttcctcttaaaagatgtgttgataaatactttatagattttttttttttttgagacggaaacttgctctgttgcccaggttggagtgcagtggcgcaatcttggctcactgcaacctccgcctcccgggttcaagcaattctcctgcctcagcctcccgcgtaggtgggactacaggctcctactgccacggccggctaatttttgtatttttagtagaggcgggctttcaccatgttggtcaggctggtctcgaaatcctgacctcagatgatccacctgcctcggcctcctacagtgctgggattacaggcgtgagacaccgcgcccggccgccatacaatatacccttgtaacagtcctgcacatcatgtaccccctgaatctcagctaaaagttgaattttttttctttttctttttttctttttttgagacggagtcttgctctgtcgcccaggctggagtacagtggcgtgatcttagctcactgcaacctctgcctcccagatttaagcgattctcctgcctcagcctcccgaataggtgggactactggcacgcgccaccacgcccggctaatttttaaaaatatatttttagtagagatggggtttcgccatattggtcaggctggtcttgaattcctgacctcgtgatgcacccacctctgcgtcccaaagtgctgggattacaggcatgagccaccgcacccggctgaaattttaaaaatatatatgggctgagtaccaccagtgttaagtctttggaggatgcaggttcctgggcatcacttcagacttagtgaatcaggtcctctagaggtggaatctgggaatcttcacttttgaataagtgcttctaaggagtattgacatatggcagcttgagagccatgtgtttaggcatgggcattggacagacctttttgtctttgctgcatttacttgtgtgatgctgattgtcattatttttttagtttttaattttttttaccttcgtattggccgggcgtcgtggctcatgcctgtgaatctcagcactttgggaggctgaggcgggtggatcacctgaggtcaggagtttgagaccaggctggccgacatggcgaaaccccctttctactagaaatacaaaaattagccgggcgtggtggcgcatgcctgtaatcccagctacttggggggctgaggcaggagaatcacttgaccccgggaggctgaggttgcagtgagccaagattgcgccactgcactccaacctgggtgatagaacgagactctgtctcaaaaaaaaaattttttttttacattaatattgtcaggaggcaggtcattctcatgttgaattttctctctctattaaatgagtggttatgaggcttttttttttttttttttttgactgagtctcgctctgtcggccaggctggagtgcagtggtgtgatcttggctcactgcaacctccgcctcccaggttcaagcgattctcctgcctcagcctcccgagtaggtgggaccacaggcacgtgccaccatgcctggctaattttttttgtatttttattagagacggggtttcaccgtggtagccaggatggtctcgatctcctgaccttgtgatccacccgccttggtctcccaaagtgctgggattacaggcgtgagccaccgtgcccggccacttgaggcacttataatatctatatgtaaaatgtttggtatggataagtttatgcctctgtgtatgtacctgaaacctgagcccctcctttctcccagcaactgttgtcacaaatccatgcagtaaaactcatataccgtataaggtatcaaaggtgatcctgagctaacaataaatgtttattgaattacccagtgcagagcttttagccaaattagtctgtatgaggcctaatttttgcagcattgccagaaatgaagtattcatacatagcattgtattcatacctcattgtaatccgtaaatagaaatgtgtgcagatgtgattgaaggccgggctcggtggctcacgcctgtagtcccagcactttgggaggccaaggcgggtgggtcacttgaggtcaggagatcaagaccagcttggccaacatggtgaaaccccatctctactaaaaatacaaaaaaattagctgggcgtggtggcatgtgcctgttgccccagctactcaggaggctgaggcaggtgaaccactttaacccaggcggcagaagttgcagtgagctgagatcaagccattgtgctctggcacgggtgacagagcaaaactccgtctttacaaaaaaaaaaaaaaagagagaggaatcttttttgaatgttgaattttgtgaatgaactataagatgaattatattgttggttattttgctgtaatctcagatctcttcagaaacttgacctaattatagatcataactgagaaatcagtaaggaggaaaagaggccatcagagtaaccaaagaaattatcacatttctgcagtaaagagcaaagtgtactataatggcaacttacagaaatttccaacaaccaaattctgatttaattgacagattaattgactgatttaattgacagatgtattgttaggtggtgctgtattaccaataaatacttacgttttctgttttgaagtggtggttatggaaattgtcttaagcatataactatcttttgaagatataaataaggcatggtccttcccacccttaagtacttacattttgtaaggggtaagagatgtatataatgtgaagggaacacaggataggatatgttacaagaatgttacacagtgcttgggtggcccagagagctgggaatgttactgcagtgcatggcttggtcgtggtgggtgccatttgcacagagcattgagagaaagttaatgtagttgtttgatttgcacatatcttttatacaatttgtctttaacatcaggtagttccaggagaaatactgactccttgttattgttttttttttttttgagacggagtcttgctctgtcaccaggctggagtgcagtggagcgatcttggctcactacaacctctgcctcctgggttcaagtgattctcatgcctttgcctcccgagtagctgggattacaggcacgtctcatcacacccagctaatttttgtatttttagtagagacggggtttcactatgttggccaggctggtcttgaacttctgaccttgtgatctgcccgcctcagcctctcaaagtgctgggattacaggtgtgagccaccgtgttggcctgttattgttatcttaagatatgggtgtgctgatgggtttcggtttgggtgatgaaacaagtgaaaaaaattccattaaaagattatggctgggcgcggtggctcgtacttttttttttgagatggagtcttgctctgtcgcccaggctggagtgcagtggcgcgatctcggctcactgcatcctccacctcccgagttcatgccattctcctgcctcagcctcccgagtagctgggactacaggcgcccactaccacgcctggctaattttttgtgtttttagtagagacggggtttcactgtgttagccaggatggcctcgatctcctgacctcgtgatccacctgtctcagcctcccaaagtgctgggattacaggcgggagccaccgcacccggcggctcatactcgtaatcccagcactttgggaggcaggtggatcacttgtggtcaggagtttgagactagcctggtcaacatagtgaaaccccgtctctactaaaaatacaaaaattagctgggcatagtggtgcatgcctgtaatcccagctacttaggaggctgaggcaggagaatcgcttgaacccgagatggggaggttgcagtgagccgagattgtgcattgcactacagcctgggcgacaagagtgaaactccatcttaaaaagaaaaaaaaaaaagactacgtgggccaggtgtggtgcctcatgcctgtaattccaacactttgggaggccgaggcgggaggatcacaaggtcaagatatcaagaccatcctggccaacatggtgaaaccctgtctctactgaaaatatgaaaattagctgggcatggtggcacacgcttgtagtcccagctacttgggaggccgaggcaagacactcgcctgcgaggtggaggttgcagtgagccgagatctccccaccgccctccagcctggcgacagagccagactccctctcaaaaaaaaaaaaaaaagattatgtgattgtgttgaggaagagacagtgggaagaaagagacaacagtctgagaaacaactcacctgtgggctttaacaatacagccatagtcacatggtcataataggtcattttcttaaaagttttttgttttttaaatagttggaagtgttgctgtggaagaccagccagatgtcagtgccgtgttgtcagcctacaaccaacaaggagatcccacaatgtatgaagaatactatagtggactgaaacacttcattgaatgttccctggactgccatcgggcagagttgtcccaacttttttatcctctgtttgtgcacatgtacttggagctagtctacaatcaacatgagaatgaagcaaagtcattctttgagaagtatgtaaatttttacatatatatatatacacacatacgtagtgtgtgtgtgtgcgtgcatatgttttcacatctgtaaccacaaaaatgtaagactgcaacttaaaaagtacgttgtgaaggagaggtacctgaggctatgagaacttaaaatgtggggtttgatctagctggagaagtcagagaaggcttccagaggaaatgatacttgaagtgagatttgagatctgaagattaggtaggagttaaccagatgaagagaagagggaaaagcatgtgtaaaagctctctggtgggaaggatcctggtaggtacagaggctgaaagatggccagggtagctggagcagagaatgggatgggggtgtggtatactatgaagctgggaattggttagggactggaacagtaggcaggttctattgttaaagtgaaggcattgaaaaaaaaggataggcaggtttttgggccatgttgagggtctttgtttatcctaagagcagtagggagttgtattggataggattagatttggttgagagtcactgaaaactcatcaacaatggcataaataaaagtttatttttgcctttatcttaagaaaactaggaagcagtgttaggattcgattagaataagagtaactgagaacccaaacaacagaggtttaaatacaataaaagtttgtttatttttctcgtaaatgtgggacattcgggattggtgtggtgggttcttcattaccagggccccaagctccctcggtcttgttgctctctcatgcttttcatgcaatttccaccttgtggcataagatggttttcctgctctaagcagtcacatcagtgtgccagtcagcaggtagggcacacggaaactgcacacacttcttccttttatatcttaacagtcagtggccacacctagctacaagggaaataagaaatgtagtctttacctaagtgtctatgtgcccagctgatattcaggttttcttttatggaggaagacaggaaaaatggatatttggggagagcgaagcctttttgctacagagtcatttctgctacagagtcattaaaggaccatgtcgttattagatatatactttgaaaggacctttatgcagtggggaaaacaaatgggggatagaatgactatagggacaagttttggaagttattgcagtggttctcaactggaggtggaattgctccttccactagaccatttgaaaatgtgtagaggtggcccggcgctgcggctcacgcctttaatcccagcactttgggaggctgaggcgggtggatcactttgacctcaggagtttgagaccagcctggtgagacctagtctcttcaaaaaaatgcaaaaattagctgggtgtggtagctcactcctgtaatcccagctatttgggaggctgaggctggagaatcgcttgaacctgggagatagaggttgcagtgagctgagattgcatctctgcactctagcctagatgacaagagtgagaccctgtctcaaaaaaaaaaaaaaaaaaaaagaaaatgtgtggaggcatttttggttgtcataatgactgggcggaggagcaggaatactaaatgttctaatatgtgcacctaggtagtcccactttacaaagaattatcctgcccaaaatgttaatagcacccttattgagaagcactggactaggttgtggtggaggtgaagagaagtagacaaagtcatgagacacttgatagattggctagggaggtgagggagatggagatatcattgaaatctccagttttctggccgttctagctggataggggagccaattcctgacacagaaaaccctagaagaggacttgatttgtcagccttggaataattttgagttctgatttgaatatgcctttgactcatttaagaaatgtcaagttgataggtagatgatatatgagagctcagaacagaggtagggactagaactattaattggagttgtgtgcaatattgatggatatggatgaggttgactaggggagagtatgaaataagtcagtcagtgggctaggcccaaggagctccaaatttaatggccaagtagaagagatacacaggaagaaaaccaggggagggctgagttatagaagccaagggaaaggagtatttaagaaggaggcaggctgggtgtggtagctcatgcctgtaatcccagcactttgggaggctgaggtgggcagatcacctgaggtcaggagtttgagaccagcctggccaacataacaaaaccctgtctctactaaaaatacaaaaattagccgggcgtggtggcagacacttgtaatcccagctgcttgggaggccgaggcaggagaatcacttgaatctgggaggcagaggttgcagtgagctgagattgcgccattacactccagccttggcgaagagtgaaagtctatctcaaaaaaaaaaaaaggaggccgtgcttagcagtgtgaataattttttttttttgagatggagttttgctcttgtcacccaggctggcatgcagtggcgccatctcggctcactgcaacctccgcctcctaggttcaagcaattctcctgcctcagcctcccaagtagctgggattacaggcatgcatcaccatgcctggctaattttgtatttttagtagagacagggtttcttcatgttggtcaggctggtcttgaactcccgacctcaggtgatctgcccaccttggccttccaaagtgctgggattacaggtgtgagacactgggcctggcctgaatgagaaatgtttaatacaagcaacagagcctgaagtcaagatttatcacttaacacagggtagtagtaatagaggaacagtagaacttagcacccctggcttctatgccattatagtaaattcattatattaggatgcctaataggaagtatataaggcaaaatgttctgtagccaagtgcttttgaaaaaaaaaaaaataagaaaggctgatgacagaacttctaccctagaagctaatttctctttaaagtactgtcatctaaacactccatccttggcaacatagatactgtcacttaaaaaaacaaaaacatagcctgggcaaaagaacgagatcctgcttctacaaaaagtaaacaaaaattgagccgggcatggtggctcatgcctgtaatcccacactttgagaagccaaggcgggcagaatgcctgagctcaggagttcgagaccatcctggccaacatggtgaaaccccatctctactcaaatacaaaagattagccagccatggtggcacgtgcctgtagtcccagctgctcaggaggctgaagcatgagaattgcttgagccctggaggtggaggttgcagcgagctgagatcgcgtaaacaaaaattagtggagtatggtggcacagcagtcctagctactcgggagactgaggcaagaggaatccctgaacccaggagtttcaggctgcattgaaccactgcactccagcttaggcttcagagcaagaacctgtctctaaaaaagaaggaaaaacctttttgctcttcctgtctcatggtgtagctgtctccccacataggaagctggaacgtcataggggattctctgtcttcccattatggacagtctcaccccttgccaggaccccatcaccacaggaggataatgggcagttactgatataagaggctgagatttctaattttattcaaatcttagatcatatattgatgagttgtaatggggtaacatagttaacagtttagaaatctgttgactatgtgcttatcagagctggagccctaatatgtttagtcattgttttaaaaatgtttttgcattgattgctgtttttagtgaatgccaaatatattgtctttaattttattttcttaggaaaattaagcgttgtaaaaacaaaagtacatttaagtttactagttgttatcaaggctaaaggctttattttattgtctttggtaatagttgttgataccaaacaatgagtacttccactttgttgtttagtgatcatattaaagtattgatattttaaaaatgtctggtacatgtttccaataaatataggaaatcattaaaaatgatgggttttatgagaatgttatatattgattattgttgagatgctgagtactgtgtacattgagttcattatactcttttttatgcctttgaaattttcataataaaacttttaaaagtgggttttgagaaaccataacatttagtaaagcaagggttcttatattttcaaatgtctaccagtttcttttaaatgtctccattctaaagaaactgtctaccaatggtgggtatattatttttcacttaggatatttaagttcttttcttaaaatgtttgtgatacatttcattagagaattacatttgttcatttttagaataaattcagaaactgaattatagtcattttgaaatgagttacttcttatcctacagcttagttcaggattatttagactactacattgaaaatattctgggatggtttataagtatatgggggaaaggcagatcccttaatgattacattgaaaaatgactttttaaaatcactgaaacaggttccatggagatcaggaatgttattaccaggatgacctacgagtattatctagtcttaccaaaaaggaacacatgaaagggaatgagaccatgttggattttcgaacaagtaaatttgttctgcgtatttcccgtgactcgtaccaactcttgaagaggcatcttcaggagaaacagaacaatcagatatggaacatagttcaggagcacctctacattgacatctttgatgggatgccgcgtagtaagcaacagatagatgcgatggtgggaagtttggcaggagaggctaaacgagaggcaaacaaatcaaaggtatgggaatgaacctaagaactctataatgcagattatgaaaaattgtagcatttccatctacataagttacacatttttcttatagctagcttggaaacaatttttttcgtttgtttgttttgagacggagttttgctcttgtcacccaagctggagtgcagtggcgtgatctcagctcactgcaacctccacctcctgggttcaagtgattctcctgcctcagcttcccgagtagctgggattagaggcacacgccaccaacctggctaatttttgtatttactttagtagagacagggtttcaccatgttggccaggctggtctcgaactcctgacctcagatgatccacccgactccgcctcccaaagtgctggcataacaggcgtgagctactgcgcctggccgcttggaaacaattttatactgtatataaaattttgtgttctaagggtgatgtttatatgtgacaatttgggtatggttgcattttatggaaccctgaatgcagtggctgaaacaaagaatttttctcccataaaatgaatttcagaggaaggccttccagggctggcatgaaggctccacagtgccatcaaggtccctggctccttctggtttctgatccaccatcttcagaatgtggctttcctctttgtgctcacaaatggctgttgcagtttcagcattgcagctccgttccaagaaggaagaagggggaggacaaaaggcatatctctgctgaagctttccctttttaatcaggaaaacaatatttttttgatacaaccatacccagtatacttatatggacattcctagctgaaagggagcctgggaacagaaatgatttaactgagcacattgctactccaataaaatcagggttctgttagtaaggaaaaaggggagaatggctattgggtagacaaatacagaaccctgcttcagagtgtaaattactattttgtaattgtgatttatcctatcaagatgtaaaatgggtatattaatgaataaataattttaaaaatgttggctcttttgacttgtaggtattttttggtttattaaaagaaccagaaattgaggtacctttggatgacgaggatgaagagggagaaaatgaagaaggaaaacctaaaaagaagaagcctaaaaaagatagtattggatccaaaagcaaaaaacaagatcccaatgctccacctcagaacaggtgaggaaaaaacttcaggaacttgtgtgtggaggtataagacaacatgttatatagagttcaagtttgttaatagtcaaaaggtaattttgactctctttttctttcacagaatccctcttcctgagttgaaagattcagataagttggataagataatgaatatgaaagaaaccaccaaacgagtgcgccttgggccggactgcttaccctccatttgtttctatacatttctcaatgcttaccaggttggtaaaaaaattgggcgatttctgcctggagagtcatgtaggatgatgatttaccattaagagagaaacaaatgtattagctaaaatggagtttcgttatttaaactccttttttttttttttctgagacagagtctcgctctgtcgcccagctggagtgcagtggcgcgatctcagctcactgcaatgtccgcctcccaggttcatgccattcttctgcctcagcttccccagcagctgggactacaggcgcataccgccatgcccggctaattttttgtatttttagtagagatggggtttcaccgtgttagccaggatggtctcgatctcctgaccttgtgatccgcctgcctcagcctcccaaagtgctgggattacaggcatgagccaccgcatgtggcccctaaactcttatacaatttaaagacagcattcaggaagagagaattggatactgcacagaatagatagaagtcaatgtttaatggcatttgtttcaccgatcagaattctgctagcctttgaggaggagcaaattgtagttcatttctgttgaacttggtttaagtacttacgtaaacttatttatcaatttttttttttttttgagacagagttttgtgctgtcacctagggtggagtgcagaggtgagatctcagctcactgcaacctctgcctcccgggttcaaacgattcttgtgcctcagcctcggcctcctgaatagctgggattacaggcaccctccaccatgcctggctaatttttgtatttttagtagagacaggattttgccgtgttgcccaggctggtcttgaactcctgacctcaagtgatctggccgcctcagcctcccaaagtgctgggattacaggcgtgagccaccgtgcccagccatataaaccttattttattttattattttaatttaatttcattttttgagatggagtcttgctctgacacctaggctggagtgcggtggtgcaattttggctcactgcaacctccgcctcccagttcaagtgattctcctgcctcagcctcctgagtagctgggattataggcatgagccaccacgcccagctaatttttgtattttcagtagagaaggggtttcaccaggttgaccaggctggacttgaattcctgagctcaggcaatccacccgcctcagcctcctaaagtgctgtgataacaggcatgaacccccgcgcccggccaaacttagtattttattttattattattttttttttgagatggagtctcactctgtcgcccaggctggagtgcagtggcacgattttggctcactgcaacctctgcctcctgggttcaagtgattctcttgcgtcagcctcacaagtagatgggattacaggtgcccaccaccctgcttggctaattttggtatttttagtagagatggggtttcaccatgttggccaggctggtcttgaactcctaacctcaggtgatccacctgtctcagcctcccaaattgttgggattacaggcatgagccagtgcgcttggccaatattttaaatcaagaattttaaaagtctttatatattccttaaaatagaggattgaggagatatttagtatagtgtgaaaatgattaacatttgcttcctatctctaaatatcctaaaatagtattgtttagtctaacccttttattggcagggtctcactgcagtggatgtcactgatgattctagtctgattgctggaggttttgcagattcaactgtcagagtgtggtcggtaacacccaaaaagcttcgtagtgtcaaacaagcatcaggtaactgagatgaccttttggaatgtgaacttgccattagtctataccaatcttgattccatggaaaatacacaggagattgtgttctttacagaaattcacttgattttactttaactcaagattctaacattcccaacagtgaaaaaagctttggagtgactggggtgctagactggtttaatttctttaggtctcagttttctcatctgtagaatgagtgagtattaagctaaaaaacttaaagttaaaaatctaacattttatgattgcttgtaaatcttaaaaaatctttaaataagggatggtacttcctgttttagtcataaaaatggctaaaaagaacaaataaggtcaggattttatttgaaagttttttactttttgtttttttgagacagagtctcgccctgtcacccaggctagagtgcaatggcgcagtcttggctcactacagcctctacctcccaggttcaagggattttcttgtgtcagctccccagctccccagtagctgggattacaggtgcccaccaccatgcccaggtaatttttgtatttttagtagagatagggtttcgccatgttggccaggctggtctcgaactcctgacctcaagtgatccgcctgtctggcctcccaaagtgctggaattataggtggctcactgcaacctccacctccctggttcaagcgattttcctgcctccacacccggcctgaaataaagttttttactaactatattatttaaataaaacaatatattttaaattatttcaatatttccataggttttttttttttaattttaaattttttttagatggggtctcactctgttgcccaggctagaatgcagtggtgtgatcacggctcactgcagcctctaatccctgggctgaagtgatcctcccacttcagcctcctgagtagctgagactacaggtgtgtgcaaccacactggctaattttttattttttgtagagacagggtttctccatgttgtccaggctggtctcgaactcctctgggctcaagcaatctgcccgccttggcctaccaaaattctgagactacaggtgtgagccaccatgcctggcccatagttttcattttgtgaaacactgtggcatagtgggcaaaactgagtttcagttctggttcccacactgagtagctgtgtgcactctagcaaattatctgttctgaacgtcattttcttctcttacacgctgagatgatactgcctaatttagagggattagcaaagtgcggttggtatataggaggaaattttcaaatgttaattcctctcctgcactgtgatatgattactttaaaagttttgatgaatgtacttataaaatatcaatatttctggaccattttagatcttagtcttatagacaaagaatcagatgatgtcttagaaagaatcatggatgagaaaacagcaagtgagttgaagattttgtatggtcacagtgggcctgtctacggagccagcttcagtccggataggtaaaatacaaacaataaaaattaaatactgctatgttatattgaaattatataaaagttaactactggaaacattatgcaaatgctgggaaaattctgataaaaatctcatggttgtctgacgttcatcatcttttagaatcttgccatttgctaattcatctttgaatcctggtgtttgtacatggtagcaatttaatgtatactcacttttttttttttttttttgagacagagtttcgctcttgttgcccaggttggagtgcaatggcgtgatcttggcttaccgcaacctccgcctcctgggttcaagcgattctcctggctcagcctcctgagtagctgggattacaggcatgcgccaccacacctggctaattttatttttttattagagatggggtttctccatgttggtcaggctggtcttgaactctcaacctcaggtgatctgcccacctcagcctcccaaagtgctgggattacaggcgtgagccactgtgcctggcctgtatactcaaatttatagaatcaaaatgcacagtttcagggcttactggttttaaaaattagctttagtatttcccttttttttttttaattatttttatttgttacccaatggtaaataaccaaccaaagctttagttttatagaactccattaggggttgaattgcttcattgggtccctgcattgtgtcttctggctgcttcatcaaatttaagacaaattcctgacattaatggcatattagctagtaattgaggattaatctttctataatcaaaagtactaagagtaaatgaaaaaggaaattcaaaattggtttgcttccctttaggtgtatgattacaatgtcatcctatgtgtataggtatttgcctatttttcatgatctctaacactgtaaaaatgggtggagggtgttttgtattcataataccatcagtatattacttggatagataatagctttcaggccgggcacagtggctcacgcctataatcccagcactttgggagtccaagacaggcgcatcacctgagatcaggagtttgagaccagcctggccaacatgggaaatcctgtctccactaaaaagtacaaaaattagcagggtgtggtggcgcccacctgtaatcctggctacttgggaggccgaggcaggaaagtcacttgaacatgggaggcagaggttgcaatgagccgagattgcaccactgcactccagcctgggtgataagagcaaaactccatctcaaaaaaagaagaaaagaaaaaaagataatagctttccatccatcaaggtttcatcattacgaaactttgagaattaggttttttgttgcttgataaggttttgccagatgatacatttttgagggaaacgtctgatttcagtgaaaattgtaataaccttctgactatcaatcttttgtgtttatgcttgaaaaaggtagagaattattagcatgtctgtagtttttttttctttttcttcaaaagacatttcctttttaattcttacatagcttacacagcatgggaaaatagcatctttattttagggtcaaaaattgttgagttttaagtgacatatcacatttcttaaactttctcaattgaccttatttgactatactttgttaattacccctgctatttttttcttgtaaagaactctgattttccctaagtttttgtatcatattacctcattcagtaggtgctcggtatatgtagagtgtcagggttaacattagtttggttagttctttcaattgatacctactgtgaattgcgtgtatgaattaaaagtgagatgcagcatgttaggtatatttaatatagtcaaatatatataaaatattaaatgtattcaaatgtatataaaactgggcaggtgaccaaaggttactctgggagtcaaatatatcaccttctcttctctcaggaactatctgctttcctcttcagaggacggaactgttagattgtggagccttcaaacatttacttgtttggtgggatataaaggacacaactatccagtatgggacacacaattttctccatatggatattattttgtgtcagggggccatgaccgagtagctcggtaagaacactgtgatcttatgactgggtctattcaatgaacagaatggtttcttgttgggaattacacagccagccaaattcatttacacttccattattgaggttcaactttctgagaagcttttgcatttataacttatttgaaattggggccgggcgcagtggcttatgcctgtaatcccagcactttgggaggccgaggtggatggatcacctgaggtcaagagtttgagaccagcctggccaacatggtggaaccccgtctctactaaaaatacaaaaattagccgggcgtggtggtaggcacctgtaatcccagctattcaggaggctgaggcaggagaatcatttgaacctgagaggcggaggttgcagtgagccgagatcgcaccattgcactccagcctaggggacaagagcgagacttcatctcaaaaaaaaaaaaaaaaaaaaaaaaaagaaaagaaattggggcaggagtattattatatctgcaattacatctatatgaatcctggtttttaaaaaatagttaattaacaatcctccctcccaaccccatcagatacttaaccttgtcttccataccactgtgagcacctttatgtttctctgtcatctgcttagaagttgaggataaggtagttcaggttagaaactatttggccaggtgcagtggctcacgcctgtaatcccagcactttgggaggccaaggagggcagataacttgaggccagaagttccagaccagcctggccaacatgacgaaaccccgtctctactgaaaaaaaaaacaaaaattagccgggtgtggtggcacgtgcctgtagtcccagctactcaggaggctgaggcagaattgcttgaacccaggaggcagaggttgcagtgagccgagattgcaccacggcattctagcctggatgacagagtgagactgtctcaaaacaaaacaactatttggtggccagaactaggggaaaatacttttctgtggtttagactaggaatagaggaggaagaatatacagagaattggagttctagaacttaagttttggctggctacagtggtacacgcctatagtcccagctactggggaggctgaggtgggaggattgctggaaccgagtttgaatccagcttgggcaacagagcaagacctcagcatttttttttttttttttgagacagagtctcgctctgttacccaggctggagtgcagtgtcgccatctcggctcactgcaacctctacctcctgggttcaagcaattctcctgcctcagcttcctgagtagctgggattacaggcgtgcgccaccatgcccagctaattttttgtatttttagtaaagacggtgtttcaccatgttggtcaggctggtctcgaactcctgacctcgtgatctgcatgcctcggcctcccaaagtgctagaagtgtaagcgtgagcccccatgcctggcaagacctcagcttaaaaaaaaaaaaaaattgtaccagatgaactcttaggactgtgagtctcatttttcttcccctcagttaactagtaagtggggggcccactcagaactaactttttatgtggatgtttctgtatttattttgtatagatttttggcgtttcacagctatctactaattgtcatcttttgctttcaataactttataaaaggctctgggctacagaccactatcagcctttaagaatatttgccggccatcttgctgatgtgaattgtaccagattccatccaaattctaattatgttgctacgggctctgcagacagaactgtgcggctctgggacgtcctgaatggtaactgtgtaaggatcttcactggacacaaggtattttacactcttactattccagcatccaaggttgctttcaaaataaaaatattttttaaacaagtgacacataaattttaaagataccattcttactacaaaactttaaaattttgtcttattttcctagacatactttgatcttttctatgaacttttttctagggaccaattcattccttgacattttctcccaatgggagattcctggctacaggagcaacagatggcagagtgcttctttgggatattggacatggtttgatggttggagaattaaaaggccacactgatacagtctgttcacttaggtttagtagagatggtgaaattttggcatcaggtaaatgactattaatggctttacgataaatgctatgttaagaggaaacagtgttgacgactgcaatactaagtccttatgttttaggttttacttccctttagctatgattccagagtgtcatcctacatcaatcacttctcaggttaaagtactgcttgataatgctccttaggaaggaatagagttattggtcaagtttagatttttcacccaaaatgtacagtaaatacatagtgtagtggacaaaatgtccgaatgtaaatatgatggatgcaactaatggtttcctttgacttccccttaggttcaatggataatacagttcgattatgggatgctatcaaagcctttgaagatttagagaccgatgactttactacagccactgggcatataaatttacctgagaattcacaggagttattgttgggaacatatatgaccaaatcaacaccagttgtacaccttcattttactcgaagaaacctggttctagctgcaggagcttatagtccacaataaaccatcggtattaaagaccttttggaagctactgtttttaaaaagggagactaaaagcaaatacctcagtgattaatatttaagctacagagaatgtttttgtctatatggatctggaagtatgctgcttggaaaaatctgaacaggacagttccacgtttctatagcaaccacatttgactaatttccgttagttgaataagaggtattatgatcatggaggggacatttatggtgctttggattgtgtggaaactatgcattttctgttcaaatgctattttaatttattacatttagaaaaaaagttgatttcaataattcatcctgcttcaagattcaaattcagaaatatactatcatcttgaattttagctgaagaatcctatgagcatgtatgtttctgctgtaaaaacgtagttactgtatggcactcaaaaactatgttaaatgatccactaactttttttttcttggcccatgattaatggaatgtatgtaactaggtagggttcctttcttagatctagaggaagtacagccacccactgacatctgaatttatatacctgttgagttttgagtgcacccaaacactcgataaaccaggtgaagaaatttagcttccatgttctacttcagctaaaacagctacatacaacctagtacacttgaagtcagacagacatttcagttgcttacctccagtactgagccttgctttgggaaactaaaagatttagaccaagtcactgccagtttttgcctttgttgcattttgtacagtttttatatttttgatatcttgtaaataaagacaaccagcttttccaggttcataa

SEQ ID NO: 682 - DNA, 32744 bp, Homo sapiens
  source 1..32744: mol_type = other DNA
gaagcttcaggagacctatcctcatctgtgcaaggaggagtggccaactctggagcccaggctgttgcttcctggtctggtggtgaatcctccatagtctggtgagtgtagtgcccaactctggagcccaggatgttgcttcccggtctggtggtgaatcctccatagtctggtgagtgtagtgtccaagtctggaacccaggctgttgcttcttggtcttgtgataaatcctccatagtctgatgggtgggtgtgtgtgtgtgtgtgtgtgtgtgtgtgtgtgtatacacatatactttcccttctacccttcccattgcaatttgcttattatatctgcattgccatttacatgggataaaggtcgtttacccttaaaggtattgtgtatgtgtcttttcttctcccctcacgcatatcccacagagaacaaccagaaaggtgggacaactcaaagcattgatgtggggtcagggggcaacactttcaggtcacaggcagattcagttttctctgactggcaattggttgaaagagttattatctatagacctgaaatgaacagaaaggaatgtctgggttaagacacagagttgtggagactaaggttttatcatgcagaggaagcctccaggtagcaggcttcagagagaatagattgtaaatgtttccttttttttttttttttttttgagccggagtctcactgtgtcgcccaggctggagtgcagtggtgcaatctcggctcactgcaagctctgcctcccgggttcacgccattctcctgcctcagcctcccaagtagctgggactacaggggcccaccaccacgcccggctaattttttgtatttttagtggagacggggtttcatcatgttagccaggatggtcttgatctcctgaccttgtgatccgcccacctcggcctcccaaagtgctgggattacaggcatgagccaccgcgcccggccgtaaatgtttcttatcagactttaagagtcggttctgtgctctatcagccttaaggtctctgtgttgatgttaacactggttagcagctcctgaattctaaaaaggaggagggaataaggaggcatgtccaaccccacttcccatcatggcctgagctagtttttcagtttaactttggaatgccctgggctgagaattattttcggtttacagaggagaacttatgttcattggtataggatgacaatgaggtcagacaaataccactgaacttggcaggctgggaagttacaaagcttagcaaggccagtttcagtgtcatagtggggtcaaagcctcgttgttgcctcaattctagtagggtacatattcctgtctttattaatgggagaggttcttaatctccagcccatggacaaaggagatcatagatgggtttcaggaaaacatcccaagtcctgcctccaaattttgcaaaattttgtgcctgtgtatttttctggagaacgtaaaccaaacagtgtctgagacaggtctcagtctggaggtttattctgccaaggttgaggacacacccaggaaaaagagacataagttatcatggaatctgtggcctgtggtttttccaaagagggttttgaggacttcaatatttaaagggaaagagcagacagaaggggaaagaggaacaactatgcattcatttcacactcagtaaatctgccttttacagaagacaaagtaaacatagaggaaggagtcaaatatgcatttttcttggggtggactgaagggtgatttctagtcttgtccttgtcccctacctactgtaaatttgcatggtcagggtggaattcaacagaagtgttgtaaggtaaagactctgccactcacaaggaatttccctgtgagcaactcctctgggaggccacctagggagatatgtgggcttctgtctttgcagctgtttaggaacagaaggaaggcagtttttgcgtgactcagttcacaagcttaactttttgttgttgttgttgttgttgagacagggtctcgctctgtcgtctaggctggacaacagagaatgatctccactcactgcaacctccacttccgggttcaagagattctcctgccttagcctcccaagtagctgggattacaggcgtgcaccaccacgcctggctaatttttgtatttttagtagagacagggtttcaccatgttgaccagggtggtcttgaatgccagacctcagatgatctgctggccttggcctcctgagatgggcatagtgctagtattacatgtgtgagccactgcgcccggccctaagcttaacttttttctttggcagagtttagggtcccgagatgttattttccttccacaagagacatccacagctttcacgatggttaccgatcatatgtgccattcatctaagaccaaggtgaccacctggtcccaaagcctgcacctcggattcttactcgattcccgcctggtctcttccaggccctcagttagtttccacaacatgggagggttcctcctccgtggtctcgcccattcgcgttcccacccaccctccccggatgtgacgaccctgggctcccactcccccccatgagagaccatccacttccaccctttcacttaggcttcctggcgcagcctctatccaggaactctgtcccatagctgtactgcccaggtcgagctttctaaccccaagatgccactccgttcagacgttcccatcctccatccctgagacccggggcaggatcgcagcctaggggcctcacgggccgcctgctaccctgttagttgcaacacggggcggggcgtggctttgtgcacgtcggcttccgggaagagctttacgatacattgaccgacattttacgacaggcgggattgttttgtggctgtcagctttccccgtggtctgagtttgtggctgcatttttatctctggtggctctgctacggcggcgcagaaatgaggcagaagcggaaaggtgcgaaaggggaaggagatgggggaaaggggtggtccgaaaggggcgaacgcccaggcaatcaaatgctgaaccgaacttttaccgcgagaatccgctacccagtccagtcgccccgccacctagggtcagtgtgtccattctggtccccgagccttctcgtttttcctgttttgctttttgaagcaccctacccttcctctcttcctctttggcagtcacgtggtgtcttgtttgaatggcagggaaaccattattccaatatatgccctccgaggagttaacgtcgatttaacgggttgtaggacttttcatttgttaagatttgtttcacgacacatttgacgtgttagagagtttcttttaaagccttattttaagatattaaaaaaaccttaattatccttggattcagtgtaagagttgtgcatgcaattattcccatttttattacatcatgagttagcaatgaacaattccacctttggtttttcaacaggacggattcaaatttgaaatattctctcacaggttctgttcctatttctgtatctcacaggttctgttcctatttcatttgaccagctggtctaatcatggtaattgttgtcagaataatagctaccatttattgagcttgtattttgaagtcggtatcatttccattttacagatgaagaagctgagattcaaagagttaagtaactttcccagaccaaaattatacttagatatggagctggctggtcaggctgtatctgtgacctcaaaaaacataaaatgaaaaataaatacatcgttaatccctatgcttcttgacattaactgttatttttctttcttccaagcaacaattctaagtgtccaagttaccttagattaagtcttgtcatatttgcatgccctaaattaatttgttatctcactctaacttgctccttctcaatctaccaggattcttttagtttcttctgtcaccaagtcatgttgattcttacttagaaattacttcttgatatagtttattcctcttcattctggccgccaacctcctaacccaccttcatcactaactaatatttgaatggtatttcagctttcatatacattatttatttgagtcttagaatggttttgtgaaatttggatgtattaccccaattttacagacaaggaaatgggcactcaaaagttgttgatcttggccaggcgcggtggctcatgccggtaatcccagcactttgggaggccaaggcgggtggatcacttgaggtcaggaattggagaccagcctgaccaacgtggtgaaaccctgtctctactaaaaacacaaaaattagccgggcgtggtggcaggtgcctgtaatctaatcccagctacttgggaggctgaggctgaggctgaggcagaggcgggagaatcacttgaacctgggaggtggaggttgcagtgagccgagatcgcaccactgcactccagcctgggtgaccgagcaagactctgtctcaaaaagaaaaagaaaaagaaaaaaaattgtcgatcttttccgttaccacacagccagtaggcattgggactggatcctgtcttagattttgtgggttttttaaaacaatgttgcctttcaagagccatttgagtagtatccatattatatgtattctttttcactttctgaatcattctttgtaccgataatattcttaccttccttaaacgttactttcaactttttatttccaaagttgagaatatgcaattcttcactgtctgttgcattccatttcaatgcctttgcctagtggccagggtcccctgtaatctgttctttattacaccctgttagaaagctggattttagttaggctgtgctgtttcacacaaagataggtaattcctatgcctgacattatttcttctggattgccttctgttttgcatgtccaaatcttgccctatctttaaagatccctgtgccatttccttcatgaagtcttttcctactcatttactcttccagttcttgatacactcaagagctatacaagtggtttccaaatcttatctgttcttatcagccgatccccttttaccctccaaataaattcttacacagaacctcaatatataaacagctgaaagcagagctgctgtggtggaaataaagagacctcctcctttttttcctccatgccttattttcctcttcccttctcccttcctctgccatgaccaccaccagtcctacctctgttgcatggcccctgaggcacctttgtagaactctggaagtgctgagttacatggtttggaaagcatttagcctttgagtatagatggactttatttctctcaaaaattgttgtgtatatgttagccttgcctcattaaattagatgcagtgtgttacagtgaaaaaagcatggaagttgtggtgaaaagagctggatttgagtcttggctctgctgtttacgatagcttgttaacttgccttagcctcatttttcacatctataaaatgggataacagtacctaccctccgtgttactgtaagggttcaaatgagataaagtaaatgtgtgggctccataattgccagggccttccatccacgctttcattatgttttagctttctctgcagtgtgagtcctcagccccctgggccacggaccagtaccggttcatggcctgttaggagctgagccagacagaagaaggtgagcagcaggcgagcaagtgaagcttcatcagtatttgcagccacttcccatcactcatgttactgcctaagctctgcctcctgtcacatcagcagtggcattagattctcaaaggagtctgaaccctgttgtgaaccgtgcatgtggtgggtctaggttgtgtgctccttatgagaatctaatgcctgatgatctgtcactgtctcccatcacccccagatgggagtgtctagttgcaggaaaacaagctcagggttcccactgattctatgggaacagaattcgttatggtgaattgtataattatttcattacatataacaatgcagtaataaaaataaagtgcacaataaatgtaatgcacttgaatcatcctaaaaccaccctgctcccctggtctgtggaaaaatcatcttccataaaaccagttccttttatcaaaaaggttgggaaccactgctctacaggtgagaagcttgcttgctgacagcttccaagctgatatcccacagcttttgtccctggaaaaagactggcattttttaccttgaagaaaagagctcagattggcctggcttagagatatgcccatccttgaaccaatccttgaactgtgcttgagtggatggcgtcatacaagaacctgtcagcttctgctgttgcctttggatgagaccgagagccccagttgccagaagttcatgatggtggacagacaatattttagaaatgcattaagattcttaggcagatacctgggtttgagtttcaactttactccttgatagcatcttcatgtaacaggcacatattcttgttctgtctacctctgttctgagaattacctgaattcatgcatctaaatgttctttatgaactctaaagtattatgcacatattagtaattacacctctggagataaagggaagagaattactttggtcctttcctgtgtgattaagttctttctcctcacattgtttctactcctgtatcctttcctgtatttatttttaataatctcatagagtatgtgcttctaaagggagcttttcccatatatatgtaaagccacgtttgttttaaagatacaaaagatatgatcaaattgtaaacagtagagatttagcatcttctgaacttgagctattcatttggcatatttgtatggtttcggatggaaaactgctactaaatcagattttaaaatcttgattgaatgatacgatttttgacattgttgaatattaactttccaggagatctcagccctgctgagctgatgatgctgactataggagatgttattaaacaactgattgaagcccacgagcaggggaaagacatcgatctaaataagtaagtggatataaagagagagcaagcttgttcttaggtagcagatctcttttatgaaattatctagtactacttgttttccagctcaagttttattttagttgagaattttagctttctgccttgccttgtcattcatttctttttttttttttgcaagttccgcctctggggttaacgccattctcctgcctcagcctcctgagtagctgggactacaggcgcccgccaccacgcctggctaattttttgtatttttagtagagacggggtttcaccgtgttagccaggacggtctcgatctcctgacctcgtgatctgcccacctcggcctcccaaagtgctgggattacaggcgtgagtcaccgcacccggccgtcattcatttcttgatggcaaaattgtctcagcttaagaatactaatagcttctaacatttattgggcacttactgtattccagacactgttgctaatgcattgtatgtattagctcagttaatcccctcaaaattctgtgagataggtactgataccagccacacttgacaggtgggtaatctgagtcagagagcagttaaataatttgtccaggggtaagtaactagtaattggcagagctgggatttggaattaggtcagccgtctccagagcccatgttcttctgtgctgcatcgctgcacatcctactttccttccctactgtctcagctgaagcagcagctttctgtcaggaaaaccctccctttggggcccctgatctaatccaaccctcccctgctgtagaacctctttgacacattcatccacttcctctccataatcattttcagcttggactttcctacagtctcaaataagagttgtctttcatctctgcatctattttttttttcaaactataatatatattcactctatgtagatcttccctaatgaaagggttctctccccaaccccaggtcgtctaatcatcacatacaggaatgaccttttcttagactctcttctctgatacttgagatgctgcaatattttaccccttccttgaatcctcatgcttagtaaatatttgctacaggaataagtaaatatcctcttttgactataaagttattgtattttactgatttttctaccgtgtctttagaagtttttctttctttttttgttggttatacccctgattatacaaatctttaatttctagtgaacatttctacatcttatatatatttgttgttctctttaatttagcacatctaaagctaaagctgccatcgtccttaaaactcgcccctcctcagatgtcaccagcctattactggaaggtctctcagtctggcttcaacctgcttttccaagtttttaaacctctgtacctttacattgaaaatcttctgctttctgtcaagttggtctgcttgtatttcttaaaatatatgcattcctgtttttgcatctgcacataaatcagcctgtctgccctccatgtcatctttgtgtctttagtgactgagacctactctttcttctgtgctcatttccatgaatatctccccagcacacatcagattcctccctgaactctggaagcattcattgttggtatgtgtgtgtgttttatgacatatgttttaatcatttatacattaattttcttggtacgcctgtctgcaaacatgtaaacatagaacatgaaaggactgtgccttgcacatttgaacatagcaggtattcaggcagcctcttgtacgtgttaggtcctcagttaatatttgttgacaaatatgtgagcacttcacagatatttctagatggattaaagttagaagacagggtgactgttaagagtttggctaggaggcacaaagaaaagctggtaaaagttttttttaaactttcaaaaatatgtactttatttcctatttggttctgcatagccatccttgattttttttttaattgttgttgttgttttgtctaagacagtagttgtcaaccaggggtgatttcctcctcaggacatttggcaatgtctagggacatttttgagtgttacaacaggaagacaagaagaaggctggtagtacatagagaccaaggatgctgctaaacatccctcaattcgctggccacctgccacagcaaagaactgtgtggtcccaaacatcagtagtgctgaggttgagaaaggtggagtcagaatagtcctttgaagctgcagcactattctgaactagatctatattgtgtcatcgtccagggacccttctccctccatagtcctctggttttctttctggtactcaagggtgggaagtagtcattcactcgtgaattttattcttctatttccctgatagtcacagatcttaaaactatccttgtcacgtggtgaagggattggagagtgacagttgttaatgatgttgtttatagatcatcctcttggtagcttgtccttaaataaccgtaatcttgataatgtgagatgctttactttcagggtgaaaaccaagacagctgccaaatatggcctttctgcccagccccgcctggtggatatcattgctgccgtccctcctcagtatcgcaaggtcttgatgcccaagttaaaggcgaaacccatcagaactgctagtggggtgagtgattcgactcatgaggtatcgacacactgggtatctgttctggcagaagtccctgctccatgtgacgcccgtgtagtgaggtagaggttggggattctgaactaatgaagtccctgtattaggatatgtgctggagtggagacctgtgctgaatgcaaggagagcagagagagaaaaaaatataattgtgattaaaggagtagatgatgttttgacctctttaaaaatatagatttaggcttggtgacaatcataacaggataaatgttggccatcttaagctggtagctttcaatataattgatgcttatgaaaggtacttttgaaaggtagttaatggtgcaaagtagttctgtatatggtgattatgagcactgtggaagtccagacaacagcgatgtccctgcagcaaaaggggctggggaaggcccagtagaaagcacacagcttgcttgacccataagccaagaagagcaggctctaagtgtcatgggagcaaggacacaggggctaaggcacagaggtagaaatgacaggaagggcgtggtgcacgcaggaaatagcgagtacgccagactgaagggtgttaacagttcaggagagtaggactgtgcgttgaacaggtagtttgggatcagcttgtaaaaatcttaagtgtctggcaaagcagctagataataggaaacaaaagttttgaaaaaggtagtaatatgaacaaagtagattttcagaaaattaatttggatacaacatgcagggtagtttggagacaaaaagactagcttagatgctcttggtatgatgtcagtatgcagtgttaaggacttgagttaggatggagactctaggatgaaaaaagatgagtgtgagatacatgcacagaaattgatagaattaagaccctcctaccatatggtccccagcaccaaattctgttcctaatgtgatcccacaagttcattctgttatttgaattgggatattatattccaggcagcttgtgttgacttggtgaccatatctcctggatcaccttacgtttgtggctaattaaaccctaaaatttttacatacaatgtaccaccaaacctcatatcctcttctttgtacttaagtgtttttgttttgttttgtttgtttgtatctagtgtaaaaagcttgttagccaggcacggtggctcacgcctgtaatcccagcactttgggaggccgaggtgggccgatcacaaggtcaggtcaagaccatcctggctaacacgacgaaagcccatctctactaaaaatacaaaaaaaaaaaattagccgggcgttgtggcgggggcctgtagtcccagctactccagaggctgaggcaggagaatggtgtgaacccgggaggtggagcttgcagtgagctgagatcatgccactgcactccagcctgggcgaaaaagcgagactccatctcaaaacaaaaaacaaaaaaacttgttaagaaaaactaatagtccatgcccctcacctccctttttctaccctagggcaaccatttttaactcttagccaatttctttagcattaacttccatatccataaataaaataacattctttacataatagataagtcttgactttctttttttttttttttacctgagacagtcttgttctgttgcccaggcaggagtacagtggtacgatcttggctcactgcaacttctgcctcccaggttcaagcgattcttgtgcctcagcctcccaaggagctgggattacaggcatgtgccacaatgcccagctaatttttgtattttcagtagagacagggtttcactatgttggccaggctggtctcgaactcttgacctgaggtgatctgcccgcctcagcctcccaaagtgctgggattacagacgtgagccactgtgcctggccgactttttagagttaagcattatgtgtgggcttgccattaaagaagacagaaacttagcaacctttcagcctgactggcaaaccgaggcttctgtgataccaccctctctgtttcttcctctgtctctgatcatttctgtcctatcttggctaccttattgtgcttacctctaaaagttgatgttttctgttgtcctgggctcattgtgtttggtattttacatgctttctttggtaacctcatccatttgatgattttagtattgatgtatgctgactcccagcatgaaccattccctgagcttcagactcctgtcagattgtcagttaggcatctgtcctttgactgcctgagaacctcctgaagtatagcataaccaaaactaataccagacttgcttattcacctttcctgtccatgttagttcatggtaccaccgtgcactcagtttccaaaaaatgtgaaatgcattttccgttcctactgccactggtaagaatgctttggcctttattatttcttgtttagattatttcagtcatttccttacgcatctattttgtcctacctacatgaaatgcatctttaacagtgtcacaagagtgatctattgaaagtatcagaaacacacagctggtggccattccctatctactgccattctcacctccatgcttttattcttgctgtttttctgatggtgctttgtttattttatacagtagttttaggtttatagagaaaaaaaatttatacacttcctctagcaccttcacccctaccccagtttccctattattaatatcttgcattgtttggtacatttgttagaattgatgaaccaatattgttgcattattattaaccaaagcctgtacatacattagaatacactctgtgttctacattctgtaggttttgccaatgcataatgtcatgtatccactattactgtgtcatatgaaatagtttcactaccctaaaatctcctatttgtggccgggcgcagtggcttatgcctgtaatcctagcactttgggaggctgaggcaggcagatcagctgaagccaggagtttgagaccagcctggccaacatggtgaaaccctgtctctactaaaaatacaaaaattagccgggcatggtggcgggcgcctgtaatcccagctacttgggaggctgaggcaggagaatagtttgaacccaggaggcagaggttgcgttgagccgagataatgccattgcactccagcctgggtgacagagcgagattctgtctcaaaaaaacaaacaaacaaacaaacaaacaaaaacagctcctatttgtccctttccctctgcatgttctagacgtaacctgacttccactgattgttttattgtctttaataaagtttgctttttccagagtgtcatgtacagtaattggaatcatacagcctttccacttagcaatatgcattgaagtctgccatgtctttttgtgacttggtagctcattctttttttttaattactgaatgataatccattgtacggatgtaccactatttgcttattcattcacctattgaaggacatcttggttgcttccaatttttggcagttttaaacaaagctctgtgaaggttattgtgtccacctacattttcagcttacttgagtaactgtcaacaagtgcaactggtagatcatatagtaagactatgtttcactttgtaaaaaactgcaaactcttccagcatggctgcaccattttgcattcccaccagcagtgagtgagcactctgatgttccacatccttgctaacacttggagatgtcggtgttttggattttatttaattaatttatttattttaagacagggttttgtcctgtcactgaggctagagtgtggtggcatgatcacagctcactgcagcaacctcccaggttcaagctatcctcccacctcagcctcccaagtaactgggacaacaggcatgcaccaccacaccagctaatttttgtgttttttgtagagacagggtttcaccatgttacctaggatggtcttgagctcctaggctcaagggatcctcccagcttggtctcccaaagtgctgtgattataggcgtgagctatggtgcccagccagtgttttggattttagccattctcatagttgaacagtggtatctccttgttgtttagtttgtaattccctaatgacatgatgttgagcatctttccgtatacttatttgccactgtatatcttctttattgagatatctagtcacatcttttgccctgttcttaattgggtgttttcttactaggttttaagagttctttgtatatcttagctggaagtggtttatcaggtaccaattatgcagatattttctcctagtctgtggcttgtcttttcattgtctttctcagagcacaacttttaaatatagacaattaggtccataacccattctgagtttgtatttgagttcgtgtttgtgttcttgaaacaccatggttgttaacttggatacattactgtcatctaagcctcagacctcacttaagtttcaccagccgtttcaataacatcccacagaacctagttcagaatcacctgttgcatttaattgtcatatatctttagtctggacatttcctttgtcttttttggactccgttatcttaacgcttttgaagatttctggcaagttattttgtagcacgtccctcagtgtgggttcatcagctgttttctcatcatgagattcaggttacgcgtctttggcccgtgcctcatagaagcagcactacgttcttctcgtcatctcccatccagtggtgcgcaggtttggttttcctatcactgatgttcctcattttgatcaaggtgctgtccaccagacttaccctctgtcaagttatttttttccactttgtattaagaagtgttgtatggagaaatactgagaaactaggtggatatcctgtttctcatcacgtacccagttcactcctttatttgtgtgaaggaattaatggtttcctatttggtgggttatcatctgttactatttattttgatgcacaaattattgtggacttgaccagtgggagccttttcaagctgatttctatgtctttttaaaatgtcctcatcattctttgagcagtttctagctttctagcacaataaaatgttccaggcttggccagacatggtggctcacgcctgtaatcccagcactttggaaggacgaggtgggtggatcacctgaggtcaggagtttgagatcagcctggccaacatggcaaaaccctgtctctactaaaaaaaaaaaatacaaaaaattagccaggcatggtggcacatgcctgtaatcccagctacttgggaggctgaggcaggagaattgcttgaacccaggaggtggaggttgcagtgagccaagatcacgccattgcactccagcctgggcaacacagtgagactccgtctcaaaaaggaaaaaaaaggaaaatgttccaggcttatcttagactttctttgctccagccctggaatcagccatttccccaaggagccctggtttcttttagttggagaaggatatttagatactaagacctgggtcctaggtgtgcttactgctgttagggtgttgctgctgccagactctctcagtggaccaagcgaggacatatatatgtatagctgcatacataacatgcacacatacatgtaacacatttccatttgtatttatttatcagtctaccatatgttgaacactctgattggccacaatacctttaattccacccagcccacagagttcattctgcttctctctctttccatgtttatagctacttctctgatagtaagaagcctggcttgctttcacttttgtaaatggccagatttgaccaagtgccctggatgtaaccaatcttgcgtctctgccactgcctcctgtcgtcacctcactgaggctctgtcagacccctctgaggttatttacacccagaccctgaaacatgaagctgctagtttaatagtacctgctgcaaatattgagatccagtgtgttcatgaggcgtttgagtcacaaaggttaggtttatatataatttcatagaattgcttaaagaaatttttttcttacaggctgtttactaagacaatcagagagagaaagactaagaatcactttggctttaacagttaatttgttattttgtacttaatttattgtaaaatggaatataacttcacatatatattacatacggacaatttaaagatgattaatattgaacagagatcactcttgtacccattgcccagcttaagaaatacagcctcggccgggcgcggtggctcacgcctgtaatcccagcactttgggaggccgaggcgggcggatcacgaggtcaggagatcgagaccatcccggctaaaacggtgaaaccccgtctctactaaaaatacaaaaaattagccgggcgtagtggcgggcgcctgtagtcccagctacctgggaggctgaggcaggagaatggcgtgaacccgggaggcggagcttgcagtgagccgagatcccgccactgcactccagcctgggcgacagagcgagactccgtctcaaaaaaaaaaaaaaaaaaaaaaaaaaaagaaatacagcctcgtcaatacctttgaagcccctttttgccactctctggttgcattcctctccttccttccgagggataagcactctgtggagttttatattaattatcctataatagcttttttattcatctttcttttatagattgctgtcgtggctgtgatgtgcaaaccccacagatgtccacacatcagttttacaggaaatatatgtgtgtaagtatggtgattttattaaattgtatgtatgttttaattaagctaaatatgccccctctagcccttagtcagtacatcctggtaatgtttaaaacttcagcttaatagatttatagattactcctttcaaacaagcaaccattggtagatattttagtgctttaaaattggaatatataaggccgggcaaagtggcttacgcctataatcccagcattttgggaggctgaggcaggtggatcacctgaggtcaggagttaagacgagcctggccagcactgtgagactccgtctctactaaaaatacaaaaattagccgagcgtggtggcatgcgcttctagtcccagctacttaggaggctgaggcaggagaatcgtttaaacctgggaggtggaggttgcagtgagccgagatcacgccactgcactccagcctgggcaacagagtgagactccatatcaaaataaataaataaaattagaacatatgaatattttaatttattgcaatatacaattctaaaaatgtaggttatggaactcacaacagtagacattgggatatgcaactcaaaacagcacattctgttaaactcataaatgaaacatgggaatatgagctgcctaaattccacgtcagaaatttaaaatgaatttggatcagaaacatatcaaaataaaaaattatccttatacgtaacctttagatttctcaaactcacctatttgaaagaattagcggaagagtttgcatgattctgggtaggaagataaaaggggggaaagattttcttgagtgtggttcccaagagaacactgagtattgattcaaacttaggaaaacttcatttctgttatttgcccctaaaagcttaaacctctgaaataaacacaactgcagttattttgaaaatgggtgtaataatgtccctttacatatttatcttatttacttcttggtagaaaatacattatttacagatactgcaaaggtagattcttctgttaggatttgaaaaggaagctcatttgttatcaggattctttggagatggtagatgcttggaactagctgattgaactcagttttgcatctgacattcttgttcttttgttgtactggcagatactgccctggtggacctgattctgattttgagtattccacccagtcttacactggctatgaggtacagtaactttgaggctgtcctgatgaaatgttgcatcatgctttacctgtagtatggttttaccagtactggctttctgacaattttttgtttttgtttttgtttttttctgattttaaaagctgttcattcaccaaatatttgccagtgtctactagtgccctatattattctagccactagagaaatacttacataagcataaataatacttacttcttatcccaaatgctgttctaagtgctttacaactgtaaaccttattgcagtgttttgaagatagacactatcatgatcccagtttgccaatcaggaaactagggcatagcaggcttaaacagctggcccaaagacacactattagtaagtgacaaccaggtttcgaagtctgtgctgcttaccactacattgtactgtcactttagcagtggaaaatggacagggtcccattgtcttctggaatttacatttttttttcttttttttttttttttttgagatggagtctcactctgttacccaggctagagtgcagtggcacgatctccttcactgcaacctccacctcctgggttcaagtgattctcctgcctcagcctcccgagtagctgggactacaggcaagcaccaccacgcccagctaatttttgtatttttagtagagacaaggtttcatcatgttggccagcctggtctcgaactgctgaccttaagtgatccgcctgccttggcttcccaaaatgttgggattacaggcgttagccactgtacccagcctggaatttatattttaataatggaaggtagacagtaaagaaacaagaaaaagtatcaggcactcaaaaaatgctaagcagagatgtaaaatcaagtaaggtgatggcagctgagatggtttagctgtggtcgttaggaagggattctgtgaagtgagattgaagttgagtctgaatgacaagaaggacctagtcctaagaatatgtgaaaggggcattcctagcagagaagtcactagaatgaggcccaaggaaggaaagacatgggggtgttgtgcagtgcagggggtgagggaagcatgaggctgggagtgcaaatgagctggggtttgtaagcaaaggtaaggagtttccattttagcgtaggagtcatgagaagctattaggatttaaggcaggggaatgatacaatccaatttaggttttttgaaagatcattttgatggccatgtagagaaagggttagagtggagaccagaaagaaggcagaaggccagtgaggtgcttttgaaggagtcaccctcctcagaacacctcagaagccaggaaagcttgtgacttttttctcatatctgttttcattttttttcttgttttctagggttcaaattttttaaaatacaagaggaatgatttcgtgaaaaggcttcctctcattcctatcccctagccactctttttcactcttccccctaccagttagtgttgtttgttatttcctccccatccttcagggatattttagggaacacagcatacacaggttgcctatcccttatgtgaaatgcctgggaccagaagtgtttcggattttggatttttctggattttggaatatttgcatatacatagtgagaaatcttgagagtggaacccgaatctgaacatgagattcattttgggtttatgtacacctgatacacctaggctgaattaattttatacaatatttttaataattttgtgcgtgaaacaaagtttgtgttaagtactatgtgtggaattttccagttatggcatcatgttggcactcaaaaaattatgaggtttggagcatttttgatttttggattagggatgctcaacctggacgtattctttatttgactgattccatataaggtagcatatcagagtcctctttcactttgccttttattttacaatatcttagtgaacattttatgtcagtacattgtttcgtggctgtagagtattccactgtatggtggtagccattacaaactgtgtggtattttagaagcttacttaaaagttactttattatatgattctggtatatgtatgcacatctatgtctgtgagcagaacactttggtgaccctgggattccagaagtgtttatacaaaagacagatgtgatccaaggagacaccctgctgttgaggtgtttatgacagcgtgagtggacacctgccagatgcgattcaggacattattttgaaccctgacaagactgagaaaaattaatgcgggtacaagccacgttttcagtgttcggaaccatggagagttttttttaaaatacagtccttttgaaactactttttagttttaattcaatgtgggcataacaatatttttctcttctagccaacctccatgagagctatccgtgccagatatgaccctttcctacagacaagacaccgaatagaacaggtacatttttaaaaaacatgtttcttaaaaattaggtgtttatacttagtaagaagccattgttgcttgattcaaattgaacctgaaataagaatgaaaaaggtgtttttcctctttgtaagttttcaatatccatttgagggagggagaatttgccatgcctagcaaggtcaaaaacactactttctttaaagactgtatttattgtttaagggttttatattctctaagtttttttgaatttgtagaaagtcatttgtagtatgaaatttgtggaataaagatgtatgaaagttcttagacaatgggtgggtgtgttgacttttaatttccaaaagtcagattaagaagtattttgactggccatgcgcaatggctcatgcctgtaatcccaaccctttggaaggctgtgacagcaggtcacttgagcctaagagttcgagaccagcctgggcaacatagcaaaaccccatctacaaaaaatacaaaaattagcatggcattgtggtgtgcacctgaagtcttagctacttggaaggctgaggtggaaggatcccttgagcctggaaggtcaaggctgcagtgagctgtgatcataccactgcacttcagcctgggtgacacagcaagaacctgtctcaaaaagaagtattgtgacagatttgttgggtggaaataggaaatttcctacaaaggagtacaaagaactagtcggggtatggcattgttctctatcatggtcatggtggtggttacataactctaaatatctatcagctctcatccattgtacacttaaagttagtggattttatcgtatttaaattatacctcagtatggttgactaaaaacaagtactatgtacatgaccttgcagtgttcaagaaatctgaacattaatacagatttcctttatttacaagtttattttaaacttgtccaatttaaaaaatgtaaagcactgtccatagttgtaatagtaatgtatagtaggcacatccaagtctaaagtagataatggtacataaccatagtggataagttgtctctgggtttgtttattggcttattggtgaatactgttcagttttaatatccactttgctgtcacccaagcgtatgaggaacaggattgtcggtgacaggagaggactccatctgggggagcccacatttttccaaacagtgggttctaaactgacctttgcttcaatttctttttgggctatgatagttaatttatttaaaatgtaaaactattgagcatgaaatgcttatgtttaccaaaaaaaggagcatagtttacaagatttagaaatgaacatagagcagtgattcttttcttaaatgcactagaattacctgagtaacttctccaaaacgtgtcacatcttcacctcgggaggttctgattaagtctgctttaaggtcctagcaagatatttttaaaaactaccagggtaattttgatgagtatctcttgtaaagaaccatagatacagaaatagagtattcttttagtgttgatatatatgtacacacatgcatatatatagtttttctgtatacgttttttgccattttcagaaattagtgttaatttcaatacctatttttaaaaattagaatcttggcttattgtagtcaacaaaatgaaagatttgtatcattctctccactagtagaggagacctaattttattattattatttttttttttttaaacagagtgtcactcttgttgcccaggctggagtgcagtggcacaatcttgggtcactgcaacctccgcctcctggttcaagcgattctcttgcctcagcctccagagtagctgggattacggcatgtctggctaatttttatatttttagtagagacggggtttcaccatgttggccaggctggtctcgaactcctgacctcaggtgatctgccagcctggtcctcctaagtgctgggattacaggcatcagccaccgcacctggcctgaatatttcatttttaatcagactttcacttttttttagaaagcagacttgaagtgcctcctgtgcctggaatcatccatcaattttagactgctgtcttgatttttctttccaatctattctttttttcttccattacatcaaatccttattatgttacataatcattcatgtatcattgttgaccataaatgccacctttttgtcctctaggcttaccaccaagtctgacataaaatacatgatcaataaatacttactgttttgcaaattgtattatatttgtctttactgctttctagtttatattcttcgtgtttttaaatttccgctttgtaggtattcaagtcaagcctcttatttgttattttatattctcattctccctccttatttgagttgtactcacttttttctttcagacttgggcctattttttatccacagaattagctaagtgtgtttcattacttctgatttttaaactgtactgatgaaaacactgcaaaataagagatttgcaatgccttcttagagtagttccttatgcttatatcattctaatgctgatgaatttgtctttcagttaaaacaacttggtcatagtgtggataaagtggagtttattgtgatgggtggaacgtttatggcccttccagaagaatacagagattattttattcgaaatttacatgatgccttatcaggacatacttccaacaatatttacgaggcagtcaagtaagaaattcttattttatcatagtctccagagtggttgtcagtttatgctcctagcagtagtctacgagaatgccttctgccctgcatccacattcttacttctcataatctttcttgtttcatgggaaaggattatttcagtgaaaataatgctttcgctgaaataatcttttccagtgaaaataatcctttcactgaaataatccttttaaagaaaaaatgaatacagtttgttgacatagtagtattctcaaatagagagattcgccaaatatggtccatgaatgtcttttcagcccacccaagaagggggctgggagtattttagctgctgtaaaatcagcaaaacaaggtactgttatttaaaaacctaatttatagtaaatatttcataattattaaatagtaactgtttatgattgggatcttagtctgtgttgtgctgctgtaacaaaatatctgagactaggtaatttataatgcacagaaatgtattggctcacagctttggaggttgggaagtccaatgtcaaggtgctggcatctggcaagagccttcttactacgtcatcacacggcaaaagacaagagaaacaaaaagcggaccaattcacccttttataatggcattaatcttacccacaaggtcagatcgcctctcagaggtcccacctgttaatactgttacaatgacaatttcaacatgagttttagaggggacaaactcatgtctgtcaaatcatgtgttattcaaaccacaagttaatttagtcattttgaattctagttgacaaaattatgcatcattttgacaccttgtttttagcaagaagaatactacaggttagtatgtagttcagtgatttaagaagtgaaagtcttaaaatagtttttgttctcaggagttgcaggaacacctggatagttactattttccttatttaacaaatccttcttgagggcccactagatactatgtgctgttttagatactggaaagtggtgatatttaggctgagaccggaagtacaaggaggagttaggccaacagcaagaaagataaaataaaggctctgaaatgggaagcagcctggggtgttctagggacagagaggaagccagcatggttagatcctgtgttaatccatttgtgtccctataaaggaacacctaagactaggtaagttataaagaaaagaggtttaattggttccagttctacaggcttcacatgaagcatagtgctggcatttgcttctggtgaggcctcaggaagcttccaatcatggtggaaggtgaaggggagccagtacatcacatgacgggtgcagggaggtgccacactcttttaaacaacaaatctcacgtgaaacaactgagcgagaactcacttatcaccaaggagatggtggtaagccatttatttatgaggaatccagccccaggacccaaacacctcccaccaggccacacctccaatattggggatcacatttcaacataagatgtggaggggacaaacacccaaaccatgtcagatcccagtgaacaagagaaagaacgtcatgagacggggttgaagtgttaggtaagggccaagatacatgcttttaaggagttgaaattttatttgaaatgcagtagggagcagatgaaggggaagtggcaagttctggttaacaggtagggtcattccggctactgtctggctaatggattagaggagtaccagggtgaaagtgggaaaccagataggaggccatctgattacatccatccctgctcagatgggggcggcagcagtggtgatggagaggagattgagatgggggtaagagaaaagaagggatcaagcctgacactaaggttttggctgtcagaaatggtaggaaggtagggtagggctgtatactgaggtgggaaagatagcgggaagagcagagaaaatctcagagggagaaaatcaagagttctgttttggatgtgtgaagtctgaagagcctgtgatacattcaagtggagatgtcggtgggctctgaatgcaagagaagtctgagctgacggtacgaaactggggattatcagctcataggtaacattgacaaccatgtaagtggaggagaccacctcatgggagagttgtggatctccaaggtatactaagtgaaaagcaatttttagagcaattcttatagtacgatcccattatttgtgtgttcatgcacatacacacacacatatctgtatataaatgcatagaaaaggtggcagaataatggtcatcatagaccttagagctgaggaggaaaggacatgggaaatggcagcaaaggaggatatttacatttgctctgtatacagtgggccaggtgttgtcatgggtgtttaatattcacttatttagtactcatagttagcctttgagttaagtgttcagattatctctgttttatgggtgaggaagctgaggcacagagagataagcaatttgcccaaagttgcagaggtggttggtggtagaatgggatataaatcccaggtagctttgctttcagagcctaactttgcaagctgtgctaggtgtcagaatgtgagtgtgtctgtatgtatgtgcacatgtgtgtgcacatcatcagagcttgaagatcttggaaggaatatggcctgtttttccttgccctccttccctaccaccctcaggcttttctctggcttctcttttatatggggtgagggtttcatatagctaattataaggttgttcaaatagtgccacctcttaagattttttgtgtaggacaaaattttggatagacctaagagtggtttttattaccctgtaagtaaagcagttcttggcacatagtaagcacaagtaaatgcgtgaatgaattttgaatgaacagttagctaatgacctgggtagggttgcctcttggaattgggggcagccacatctttttgtgccctcgctactccccctacccccttaacttcctttgttctccttgggtttgtaaaagtgaaaagaagagaggagctttttcataaaatttaataccaagggtagctcaaagagcccatctgaaaggtttggcagctgggagagtttgtgtggacagcagcccacttctgtttgattgactctagggaatgcaacaggtgaattctgtgtccgtgaatctggacctgtagcattgtgatttcttcgtcttacaggggctttagtaatagaggagatggcgactgcattgttactgctcgttcaaaactgatcaagaggccgggcgtagtggctcacgcctgtaatcccagccctttgggaggccaaggcgggcagatagcttgaggccaggagtttgagaccagcctgaccaacatggtgaaacttcttctctactaaaaatgtaaaaattagctgggcatggaggctggtgcctctagtcccagctacttgggaggccgaggcacagaaacacttgaacccaggaggcagaggttgcagtgagccaagattgcactactgcactccagcctgggcgacagagtgagactgtgtctcaaaaaacaaacaacaacaaaaaaaactgatcattaatatgagtcatacttagtaaatgctgaagtcttcaaactttagaggagtaatgatatcatccagctaattactcttaataatactgaaaaatcaaactataccttagataaaatgtgattgaggaaaaacaacctttattagttcaaagccaggcgacggggatggcagcagaaggttctctcagagggttgctgaccacagttcattcagctctgaaaattccctggcagggacatctatgaagataagtttttctctgcaagcttatatacttctgtactcatttcttggaccttaatatgtaaggtcttcttatcttgaagaccttacatattaagtggaattgagctgtaaatatcttagacttgcctctctcccccataaaaatttgccactaagcttttcatctcctacagtttgggtcccctgaggtatatgaagcaggccaactaagatctgcatagtgaacttttagtatgtatctagtttgacattttcatcaattgaaagtaaaaattttgttttattcttggtgtaacattttatttttgcagaaatgttctagtgctaatggtgcttgaatgtaagttttccatcattgggttgaaaatagggttgtctagtccagcgagctcagtgcagatcatgatgtgtttgtagaaaaagccctgtggaagagaaatcctctttcagtaatattctaggcagtgccagtgttgttttgtttctgttcttgaatttacctcaagagggcaacgaacactttattttcagataaaaatttatatatgatttgggtcttcattgcaacacatctcatgaatgcctcttgagaagtaatgaaagtacaatctgggagccataaaaccatccataaattacactgaattctgccaacacacactttaaatgttttgctcttttctctcagtctctatatttttatgagatcatctggaaaaaaaaaagacctgatttgtggcgtgttgttgctttgttaaggtaaagttttactacaaacccctcataatagagtttgtatttgttttgagggaaactttgtatttgaggaaataatagtctagtttgtgctatagaactagagacagaaagtattttcaagtgttggcataattgtgaaataaaaagcagcccagagaagttgtggttttgacataatgtggccctcggaaatgtttggatttgaccttgcccttctctctcatcctgcccagagtctatgagtgaaaactggttggtttgcacagcgtagcccactgctcttagatgtaaggtgatgaacttcatgtttattttacttttgtttttgcttgctgactacatagatgtaaactgactttcattagcttagcagggttttttaaagattaattttaaattaggttaaaaatgatgtattgtgacctatgagtcagcaagcagcatttaaggttaatagtctgttcacgttagggtcaagttttactgctgtgttggctcaggtgtccctgctatgttttcatatgttgaacctgattaaagttttgcttcttaaaagaataggagttaaggtaaagaaaagccccagcaagcagagcctggttattatttatggcaagctagtagcaagcagtgtgttatatatattctcgtggatggataaattggaaagttgagtgaacagagagttcaaggacaaaacaggtatggcttttgtgaaggctcattaaatcaagcaaagtgctaatcactcagtactatcagctggactgagattcttcagtagtctccagagagcaacaattactggtgactgtcatcgtgtaacaatcaggctctggagatgaaaaagaccggtagtgggatctgagtcacccattcactagaatgcaaatgttgccaaataactccaacaaccttttaaaatagttttattcctttttaatcagctttgcccagaagcagttttacattcaatctttaatgctccttggctgttttcacaagatgcaatttaaagggtagttacccattaaaaagtgagtgagtcatactttctccctgtggaattttaaattcatttcccgttccttcctcttcccccgccccgccccccacgccccattaatgactttagatcctccaactatgttcttacctgtctgagaaaagctgaagtgctaggtaatgctaggtaccaggcccagaagacaatttcgtagacttgcacagctgcaacggaagcaaaaggaacctacagagacctgagagtgagtgactgtggccctgctgccctgggcgtcatttctggcaggcctcaggaccttctgcatttctgggctttgacgctgacactgcttatctctcactttttctattgaccattttactttctcttttggtcacccagatttccatacatggtgaccaggatccttaacattggccagagaacataggatacaatcttagtcactttaagagagttgatatggtttttctttcagcattttatttgaaacaaaaattaaacagtttttagtgagcatccacatacccatcacctagattctacgatacttgctttatcacatatctgtcagttccactatccattcatcagtgtctctcgcgtgtgcttgcgctgtcttttttgatgaatttcatagtaagttgtatgcttcagtacacttctcccgggatacttcatcatgcatatcactgactagtgttcactgtctgcagtgtttttcttttgaagtaaatttacatacagtacaaaacaacttgtggcgttttatatatatatatatatatatatatatatatatatatatatatatatatatatatatgaacacatatattaagtataccatttgattatttttgacaaatgcatatacctgtgctacaaagtcctattaagatacagaatgtcaccgtcatcccagaaagttcccacatcccacttgccagtaaatcctcccctgcgcctcccagaggcagccgttcttctgatttttttccccatcacaaattagttttgtctcttctagaacttcatataaatggaaccatatagcatacacttgtaggcctctctcactgagcatagtattttgagatttatccatgtgttgggtgattcattagttgttacctatttagtgctgagtagtattccattgtatgcagagatcacagtttgtttaccatccttctattgatagacgcctgagctgttttgtttgtggccattatgaataaaacttcagcgtacgttcttgtgtaagtctttttgtggctatatgtatttatttctcttgggggaataaatagacatagaattgctatgtaagtttagttttacaagaaaccgccagtcattttcccaaaatggctctactatttgtactcccaccaataatgtatgaacatttggttgtaccacatcttcaccaacatatggtgtagtcactctttttaattttagccattctagtgggcgtataatggtatctcgtggttttagtttgcttttgcctgatgactaatgatgttgaacacttttttagtatgtgcttatgctatttgagtatatttcctttgtgaagtatctattaaaatcttttgcccatttttgattaggtggttgtatatcctagctgccagtcctttgtcagctctatattttgcaaacatgaaaacccagtctgtagtttggctgtttgttatgttaatgatatcgtttagccaaagtttttaattttgataaagtagaatttagcagttgttttctttcatggttattgcttttctgtattgtctctaataaaccattgcacgttcccaaggcacaaagatattctcctgtgttttcttctaattacaggtttgagctttcacttacaggtttatgttccatcttgaattaattcttatgtgtaatatgaggtggggatcaaggttcctttttccccatatagacagctagttgctttaacatcacttctttaaagattttccttccctattcggattatatcacacctttgttaaaaatcgaaggactcagtaaatgtgggctgggctcttttctgtttcatcgatctgtttttcaatccttatgccagtgctacactgttttgattactgtggctttttagtgtatcttgaagtcaagtaatatgagtcttctaactttgtaattgtttttcaaaattgctttagaaattctaggtcctttgcatttctatgtaaaatttagaatcagctggccaatgctctattaaaaagtataatggatttagaattgtgttaaaactatagaacaaatggaaagaattgacaatttattgcttcttgcaattcatgaacatagtctatctccttgtatacttaggtttttaaattctcttagcaatcttcattgttgagattgtataagccttttgtaaacaaattctttcaaaatatttgtatgtgttttggtgctacagtaaatgaaatgtaaatttcatttttaaattttattattattattattatttttttttttttgaatcggagtcttgctctgtcgcccaggctggaatgcagtgacgtgatctcagctcactgcaacctgtaccttctgggctcaagacattctcctgcctcagcctcccgagtagctgggattacaggcatccaccaccatgcctggctaatttttgtatttttagtagagatggggtttcaccatgttggccaggctggtctcaaactcccggcctcaggtgatccgcccacttcggcctcccaaagtgctgggattacaggtgtgagccaccacgcccggccataaatttcattttttcaaatttttgctgctaatatatatacatacggttgatttttatatattaatgttatgtcataagaccttactaaattcactacttaattctaaaagctatttttgtaaatcctttaatatttacttcctaaacaatcatgtcatctgcaagtacagtgcattttacttttcccttttggatttgtatgcttttctttctcttgccttactgcactgcctaggaccttttcttacagtgttaaacagaagtggtaagagtgggcgtctctgtcttgttcccagtgatacagggaaaacatttttatttcagtattaagtccagtgttgcctgtgggttttttatagttacatgtattagattgaataagtttattgaaagggtttatcattaactcatttgtctgatgctttctctgcatctatttaaatggtcatatgattttcctcctttatttggtaatatggatcattttgatttttttttaacattaaacctcacatgcctaggataaaccctattatatcatcatctttacatattgttggattcaacttgctaatactttgtagaggatttttgtgtctgtgttcatacagggtggtggtctgtaattttcttttttataattttgttgtcaggtattcgttgttggtattagtgtaacgcaggcttcacaaaacaagtaaggatgtgttgttccctcccctgttttctgaaagtgttcatgtaacatgaatatgatttcttccataaacgtttgctagaactcaccagtgaaactatctagggctggaattttctttatgggagggttttagatcataattcagttcatttaatagatatagagctattcatattttctgtttcatctgtgtccattttaaaaagttacgtttttcaaggaatttgtctgtttcattcattttgtcaaacattttggtattatgttgccttattaggcttttaacatctgtggaatcttagtgatcacccctgtttcaaccctgatactcatcatctgtgttttctctttttttcttgtttacccgagttaggggtttatcaattttgttgttcttttcaaagaagtagcttttggttttatttcctctactctgtagacttctgcttttatttttattctactttctttccgtttaattgctcttctttttctagtgatttaataaggtataaaagcttggccaggcgcaatggctcacgcctgtaatcccagcactttgggaggtgaggtgggcggatcacctgaggtcaggagttcgagaccagcctggccaacatggcaaaaccccgtctctactaaaaatacaaaagt

SEQ ID NO: 683 - DNA, 5270 bp, Homo sapiens
  source 1..5270: mol_type = other DNA
cccaggaaagcttgaaggcagagatagactcacgtctctaagacatatacataatatagccgcaaccgcggcggccttactttcccggagctgcatccccttttaggcgaagagcggaggcgaccagggactaccctaggtgaaagggcagccacctggccctacccgggctcaacgccgagcctctcggaggtacggcctcccggggaccttccagactggtcggcgcaagcgaagggcggggaccaccgaaggagtgtgtgacttaggcatccagcgcactgcctgacccgaagtaccgacccgagttatgcccaccctccaactttgcgacggaaatgtgtcatcgaaagccaggtaaccagtgggccgcggctgggccgccggggcaggctaggggcgccgcggtgggcttcggggcctttggggccgtgggcttttgctgccgcccgccccttccggctcctccctgtagagcaaagggcacgtgagcgaggcgcccgaagccgtcgcggcggggaccatgttgcttccgaacatcctgctcaccggtcagggcgcgcggccgggagggactgggctggggcaggctgggggcgcagagtgctctgggcatcgggcgcccaggtgggggcccctcactgccctcttcagaggccggccgagggccacgaggcggttgtcagcgccccgggagccgaccctcgcgggcgttgcgggaggcgagggaggggacgcggaacgttaattccgttggcctgaggctccgggggggggcgggggggggtggagagaggtcggcagatccagctctccagcttggcaacctgcttagtctttctgaatctggtatttcgtttgtaaaatgggttgttgattctttggcagggttggccttgggatttttagcgaaataacgtaaggccatatctgcttcccggtagagtcattaatggtggatgcctcactccttaggcctccgtgggccgtattttattttttctttgcttctgataaacgcctcagattagatttcggtaaacgagttcagatgtttgtgacgtgacgaaattgctgtatgcttttgttgagttacatcaaaggatccccccgccccttaaaaggaaggcatatagagcatttcgggtcgtttctcgcgtaggagtgggtctttgaagccatactcagggtgcatgttatcagtgaagggaattaaaatgctgcataacgactttaacgaatatttttgctagccgtttagtcctgaaagtgtttatcaaattgtaggccattcgtggaaaaatctaatgcatgtagattttattgcaaggtacagaaaaattaagactctttgtgggaacagtaaagttacatcattcacccaaaggtaaaattgttggcagcgcacaagacatgtctgtttctgagaggtgcagattaaccaccccacaaataacgtttagaattttagattccttaagcggaagattttacatctttttgcatggatcaaacatagtgccctggttattaagtcattgtcaaaactttaaagtgaacattttattgaaaacatgttgagtccagggttcagacttggtgtattatagtggacttgaggtgaccgttattctcctgggtatgggaactggattatccctgttatctttatgcttaagtttaatttcagggatgttaaatctgaatagctgaaaattatgaatttgatgatcttgaaatgtaattttaataggtatcagaaggggaaggtaaagaacaatgtatatagtattgtcatttatgtaaaagggaatatgtgttgtatttatataacaaagagtatgtacatatatgtacatttacatgcaaacataaatagggtttctttgggaaaggaaactggtttacagtggttatctctagggaagggcgcaaggggtcagtagaggtaattttcagactgcttaattttaacatgaacagttttgtttttgttcttgtttttgtttttgtttgagacagagtctcattatgttggccaggctggtctcgaactcctgcgcttaagcgatcctcccgccttctcctcccaaattgctgggattacacgcgcgagccaccacacgtggccatgaacagtttttaaatctttataagttaaagcaaataggccaggtgggtggctcatgcctgtaaatcccagcactttgggaggtggaggtggggagatcgcttgagctcaggagtttgagcttagcctaagcaacatagccaaaccccgtctctacaaaaattaaccagggcatggtggtgcatacctgtggtcctagctaccggacaggctgagatgggaggattgcttgagcccaggaggtaaaggctctagtgagccaagttccactgcactccagcctaggtaacaaagagatatcttgtctttaaaaaaagaaaaaggtaaataaattattgtaattgattcgaggtggctaatttttttttttttttttttgagatggagtctctgtcgccaggctggagtgctgtggcgcgatcttggctcactgcatcctacaactacctggttcaagggattctcctgcctcagcctcctgagtagctgggattacaggcacgcgccaccacgcccggctaatttttgtattttaatagagatgtagtttcactatgttggccaggattgtctcaatctcctgaccttgtgatctgcccgcctcggcctcccaaagtgcggtgattacaggcatgagccactgcgcccagcacgagatggctaattttattctcagcagttccccggtagcagcaggcagtttgaattggcgtcagaatctgctgagccccacccctggagaatcaatacactgggtaatattctgacattcagttagctttggaaaatttttattagatcgtagtacatgctaatttacatatggccaggcatggtggctcacgcctgtaatcccagcactttaggaggccgaggctggcagatcacctgaggttaggagtttgagaccagcctggccaatatggtgaaacccggtctctactgaaaatacaaaaattagctgggtatggtggtgggcacctgtaattccagctactgaggagactgaggcaggagaatcgcttgaacctgggaggtggaggttgcagtgagccaagattgtgccactgcactccagcctgggcgacaagagtgaaactctgtctcaaaaaaaaaattttacatatgattgctaattaggaaatttttcatttcagtcgtcaagaacttttaagggcagaggccaggtgagactctgtctcaaaaataaaaggaaaggcagaaggtggaccgcagtgtgataagtagtatttcacaaacagtatttttctgtggcttgtcttacaggtacaccaggggttggaaaaaccacactaggcaaagaacttgcgtcaaaatcaggactgaaatacattaatgtgggtgatttagctcgagaaggtaagggacactttggtgttagatttgttttgttttttttttaaggtctggtaagtggagtgttagtgctgggtattgtcatagggtacaaaaaacagagattgccattaaagaatatatactctgttagggaatccacagaaatattaagtgtctaatgctatgtcctggttattttgaccattttcccttccgccttcaaaatggctggcaattcttgtgaatagttgggaaggctcctataaagagactggatttcggataggtagaatgtgaataaggagaatgtttttaagttgaacaaacaaaggtttggtactgctaaacatatatatgagcacagtgagtatattggtctcactggaaagagactgttttgagctcaggtgtgggacctgactatgctatggtatcttagattagtgtgagatttgcatgcaactgcatatattctaagatgatcattgtttttatttattttaccctgttttcccctaatctttcatcgctcccttatttgtgtcttcatctttttatagtcgacaatgatttgtacatggtaggaactcaataaattaaagcgaccttaagttgcctcattaaaattaagaaaacatatggtttaaattttaaaaatttttttacagtttaacatagatttaaaatttttttaagttcctgacagttgctactaaagtaactatttcagattgatctaatgtacatatttttttcaaatgatctaaagtctgatcatcggatatcatggagtctggcaagacggcttctcccaagagcatgccgaaagatgcacagatgatggcacaaatcctgaaggatatggggattacagaatatgagccaagagttataaatcagatgttggagtttgccttccgatatgtgaccacaattctagatgatgcaaaaatttattcaagccatgctaagaaagctactgttgatgcagatgatgtgcgattggcaatccagtgccgcgctgatcagtcttttacctctcctcccccaagagattttttattagatattgcaaggcaaagaaatcaaacccctttgccattgatcaagccatattcaggtcctaggttgccacctgatagatactgcttaacagctccaaactataggctgaaatctttacagaaaaaggcatcaacttctgcgggaagaataacagtcccgcggttaagtgttggttcagttactagcagaccaagtactcccacactaggcacaccaaccccacagaccatgtctgtttcaactaaagtagggactcccatgtccctcacaggtcaaaggtttacagtacagatgcctacttctcagtctccagctgtaaaagcttcaattcctgcaacctcagcagttcagaatgttctgattaatccatcattaatcgggtccaaaaacattcttattaccactaatatgatgtcatcacaaaatactgccaatgaatcatcaaatgcattgaaaagaaaacgtgaagatgatgatgatgacgatgatgatgatgatgactatgataatctgtaatctagccttgctgaatgtaacatgtatacttggtcttgaattcattgtactgatattaaacatgcatgctggatgttttcaagttgtgttttagaaaactaataataatgagtaaacacagttaccatacttttcaattgaaatgaaggtttttcatcagccttaaaagtgtaagaaaaataaagttgtcattcattcg

SEQ ID NO: 684 - DNA, 24894 bp, Homo sapiens
  source 1..24894: mol_type = other DNA
ttttttttttttgccggagtcgagcgggtgctgctagcggaggcgccatattggaggggacaaaactccggcgacagcgagtgacacaaataaacccctggacccccttgttccctcagctctaagggccgcgatgttgtacctagaagactatctggaaagtgagtgcgcggcgctggcggcggccgccagtgggacgtgcgggcgggcaagagcgcgagtggacgggcagcgagatggcgggagggagggggcggcgggggatgtttctttctcacggtaactggcagcctcgttgtgggctgccggccccctcgacccccctgacgcacgcgcgcagtgacgtaagcgcgtatttcgccgttggccccgcccctctgacggactctccctttgacagtgattgagcagcttcctatggatctgcgggaccgcttcacggaaatgcgcgagatggacctgcaggtgcagagtaagtcggcgcgtctactactcctgttcgctgcgcgcgttcagtgccagacttgcttgtcatcactgctagcgcctagtgctctttcactgtcctctggctcactccgctagtgcataaggagttgtcaaaaagaactggcagccctgaatctcgccttccccttccctcccatgctacttttttctggcttttgcaagagcaggaggcattgggacacgtgtattcctttctagaatgtgggattgtgcaaaaaatatttctctaccgtcattgacatagttatctatgtttcaatggacgtcagcataataaatgttgagatgtcgtcttgagccttttcgtatcgaacttagatttcagcatttatacttattttaaagttcatcctattcacagtttttcaagagtggaaagcacagaagcagaggttatatatagctctttagagaccatggcaaatgtcaaattttgaaaacttagttacacattagatacattttaaattgtaacagaatcgtcattttcttggttaaaatgagtgacagaaattagatttcactgtaaagtttcttatgtgctgtactaaaaattttagcagttaatgaacatttctttttctttcagtgatagcttggtagtctctaggactttttccccaaattaactttgctctttcatagagcaacgactataaataggtggctcagggaccacctgctgcagctaagaacctgtccttttcactgctcctggcttctctgcccatgaccacacacccacttctataccctttgcttatgagtatatttttccggtaagtttcaggtggcacataataaaaagtggtggcatggaagccactttctgttcagtggattgtgatatgaagtatgaattgtgtgtgtggttctccagctatctcacaaattcattttaattttagtgtagttgaaatgctgaagatttgctgaagtagtgttctctgcaggactgagcacagacattgatgtcagatctgagtttgttttagggctttactaatttactcattgactctgactgtattatcacttgtgaggggcttacattgtctataaaaagagaatcatccaaggatttaaaatgttacacatggattagaatttctagtatctgatacaaagtaggcattaaataaagggtaacttactttaaattatttttatattttattgtttaaaattttaaattctcttgtaatttgggcttacattatacatattacaggctttttaaacgtgcatttctttacagtaactagaattttctaaagttaataggtattatggattaacagaactgtgtgccaaataaattcagaaatgcttatttaaacaaaggaacatacttctaaaaaattaaccataggacttcatagagtctttaaaaggctattgtggactggaaatctccaaaagaagtatattatgaaaagatttttctcaacttacataacaacagaatcttttttattaatttttcctttttttttttagcagacatccaatgagatgattagtcttggcatataatttggggaaaacttacctagaattaatgtttaaatgattgtacctactactttcagttgggatatgacatgatgagatgtttaatgccatataccaaatatttttatcactttttcttgttaaaagaaatgtgaggattatctaatggtgttttaattgtgtttcggtacatttgtctgatttaataccattagcttttgacctaaaggctttattgctcaaaaattatagtatagagcctatctactttggctgttggaaaaaattttgaagtaacaaaaacaaaaataatctgtcaataaggaaaattgtaactttttaaaggaagataattgaggcattatatatttacacaatcaaagcataacatatttaagttactggcaaggtgaaagagtgtgtattgtcagattttttccctccctaaatcaaaccatgtatatttagtatatgaatttggtcatttaatatgaattttttttattatgtcatagatgcaatggatcaactagaacaaagagtcagtgaattctttatgaatgcaaagaaaaataaacctgagtggagggaagagcaaatggcatccatcaaaaaagtatgtgcaacactttggataatttatcaagaaatattgggaccctctgaaaaagatatttcaaaattaaatagtggtctggatatcaaaatgagagaatattatcaatgactccttagaatataaataatttattgtggtttagagcttcagatagggatttttagtcattaaagcgttttggtaattaaaaatattgtttcaataattactgagtattagaaagtgacagaccatttaaaagttacttttttttctattagtttgttttattctagttgagatagagtactgtattccagttttggccacaaactaggtaaataaacatgagcagaccttgaagaatattttatatattgctaggtacttaaattagtggacccacagaagaacgaaatcttaaaagttagaaggaatttaagaaagccttctagtttaaactctaaatttgcacacgaattggtctggaaacatagaattctttgaggttttgttagttttatagtggctatagctgtcttccagaattgaatgagtatacacgtacatctcaaagtttgctttgaaagtatgattgagttcatttagggatggatacattggaaaaacaacttaaaagacttgagtttggtcatgattctgctatttagctgtgtgacattaaatcttaatatttctgaataataatgccttcctaaacccaatgttcatagaattgttcaaggatcaactaagaggcctggcgtggtggctcacacccataatcctagcactttgagaggctgaggcgggtggatcacctgaggtcaggagttcgagaccagcctggccaacctggtgaaacctcgtctctactaaaaatacaaaaattagctgggcgtggtggtgggcgcctgtgatcccagctactcgagagactgagacaggagaatcacttgaacccaggaggtggaggttgcagtgagcctagatcgcgccactgcactacagcctgggcaacagagtgacagagtgagactccgtctcaaaaaaaaaaaagggtccactaaggaagaaatttggaaactacaaattgagtagttctgttatgatatgttatttattctaccacatggagggaagattgtttctcttaggaaaaaaaaaaatcataatctataacagaagtggtcctagcttggaagatacctggagggacatgtgtttgtgagtaaagacatgttatatccacatcccagagtcactaatcatttctttaacctgtggagtgcaccttaagtataccctgaaaagtctagtactccatggaaattcatagtatcatcttctttccccctcttttttaaaaaaaaatttaataagttgaggcaaaatctaaaatacagattgagttgtatgaatatatacctaatttaaagtgggagttatagaacaactggaaaatggggaaatgcagatcagaatcctttcaatagctgaactttaacaaaaattttttaatggaatgcaaatgtactttacaagttagatcaattttagttaactttttattttaaatactgttcattaactcatatagctttttctagacttacaatggcatttacttttaattatatcctttctagaaattctgaacatctcccttttactcttggccattgtgcatagtttctaatcctataccatccccaccctatttctaacaggtttttgttttgttttgttttttgtttttttgagacagagtctcgctctgttgtccaagctggagtgcagtggcccaatctcggctcactgcaacctctggctcccggttcaagcacttcttgtgcctcaacctcctgagtagctgggattacaggcgcccactaccatgcccggctaatttttgtatttttagtagagatgaggttttgtcatgttggccaggctggtcccaaactcctgacctcaagtcatccgtcctccttggcctccaaaagggattacaggcgtgagccactgcccctggcctctaacaggttttttattactaaggtaggatgactgtgataacaagatatgataatgaaaatgcagttgtatgtcctgcatatgaatattttaaaatgattaatttatttttgaaatgaaaatgttttcattcaggactactataaagctttggaagatgcagatgagaaggttcagttggcaaaccagatatatgacttggtaagtaaaagtaatgtgcatactgtgccataagtacttgaataacagattatatcttaaattgtattggcttaaatgtagtaggaagaagcaactaaaactgaagtattgctctcttgatcacatctaatttgacatttcagtgtccattttatggtttctttgtggaaaagtcagagtggttagttaatgtggtgagaactgtacattttagcaagtctatacggcggtaaggtggtttctgatgttagatattttttaaacaagaattaatgtttaactttattttactaatccttgtcttcttaaggtagtgtgtttacttgccttatacatcattttgagattgtttctgtggtaaaatacacctaagaagactgctttgacaagagttcttggtagtctgattaaaatgaagaagaatcatttgaatcagtgtttatgtgagtgatgttaaaagatcgtatgtaacagctgtgtcagttgtttaagcaatacaagatgacaaactttaaacaagattctttttttgcagcagcacttctaaaagattgaaaacaccaagaagatagatagaatattcactatttctcatattgatgcaattgtggtgctctttttcatttgaaacatcttctcctaaaatatacactttaagaaatagtcatttctgtttttgcattaaagtaaattaaagcagaaaacacatgctcacttttggctaacttcagtgtatagatttcatacttatgttgtctttcctgggtacagatttattactgaacaagtacgtgtaagtaaaatgtcattggtgagcaggacacaagataaaaggtgaacaccacatatggtgtgaattgtaaatgcttataccacaaacttgaaaatgtgtcatgtagagccatggaaaatgtctagttgtttttatgtagtacacacattttaatggtgctaacaacctgggctcttttgttcatagagttattctgaaaaaaatttcataaaagacactgcctaaagataggtagaataggctgtagcttgatttactgtggaataaaaaccaaaaaaaaaaaggtcttaattgtttcagtctttaattatgtctataaacttagaaaaaggcatttacatttgaatctagactaatttgtttagtaacattcttcctcatattcaatgactgtatgtatcagtccttatttagagactgcctgctttttaattcatatagctctttggttctattctttgttttgtttattattttgttgttttattgcttgttagacctttactaaagatattttgtgtatttagaaaaaatataacataaatatatgctttttaaatatgtgtgtgtgtgtattcatctcttatttaaaaaccacactgttcatccactctgtgcctgaaaaaagggagctgtacctgggtctaatggaggaataaaaagtaaatactaggccgggcgcagtggctcacgcctgtaatcccagcactttgggaggccgaggagagtagatcacgagatcaggagatcgcgaccatcctggctaacatggtgaaaccccatctctactaaaaatacaaaaatattagccgggcctggtggcgggtgcctgtagttccagctactcgggaggccgagacaggagaatggcgggaacccgggaggcggagcttgcagtgagcagagatcgcgccactgcactccagcctgggcgacagagagcgactctgtcttaaaaaaaaaaaaaaaagtaatactagaaatggctcttgtcctcaaggtgtctgtaaactactgttgtggggcagacatacctgcaaactaaagtggagaatccatacagaaacatgtaataaacattaaccagttgaatattaaggggtgtctactgaaaaacattgaagtaagtcatgcagagttacttactgatttcttagagggtataggaagagttttgaacagagtttgtttagaaagtcaaggtcctgaattaggtattgtattgaggggaaagcatttcactcagagataatggcataaacagaaggaaagtacaaattcagaaattaattgagaagggatagattccaaggctaaagagtgaagtaataaaggcgaggtagtaaatttaataaagcataagaaatacaacagaaagcaagtgtccataatggatccatgcagatgtgagttcaaaccctagctcagccatttcactgacaccatgactttggaaaagttatttaatcttgaaccacagtttcctgctgtaaaaaagcaatattaatttataccttactgaagggtttgcattagaatacatacaatgctattagtttggcagatagtaggatttgctccttctttaagaactcagtccatctcatttcctgaactggaattttctattttcctgaagccactgcttccctttcaactctgccaagtggaagctgctgtctctcactctcctagtatctctgaggcttctttttgtcttttcttctttttcttcccccaccctttcttttctgcccccacctttgctctaccctcttcctttttattattttttttctttttccctttctccttccctgcctttctttttaaatactttaatcctatttcaggtgaacattatatccttaatataaaaaatcccttctctttcagacttagtgataatcatctcagttaccctctgcctcttatcactataatttaatggcttctaggtgaggctcagattgaaaaactggtacccggttcacagttctctgttgcaatcatcttatactacctagtcatctacttctttggcttttgtaaatgctaatccacttcagtcgccacagactgaacctgatcatcacttggaattgccctgcctctgatacttcttgcgtctacacttcctcctattttatcagccctttcctattcaatcaagagactggttgagctcttgaccacttttcttacaggtaccttccacattgttgctgccttagggcatgtttttacttgctgcatctttgcttcatcacttatgccttctctttttcatctttagcctcttttctttctattggcttctataccacagcatttaaacatgctcaggtcttcctcatatttaaaaagaactcaggcaatctaatataaatcgtgtcgtgaccgtgactctgctttagctagtgtagtcttccttaatttctcattcagactctttgacactcccttaccttcaatttattcctaaatttatggcaattggggttctatttactaatcctctataacttcatttaatgaattctttattgctaaattcatcagacagcttcaattctttttaactgaccctattggtaaatttaatgcttattgccattcgttttgtcttgccattcttgaccttgtattaccatgtgactgcctgctctagatgctcccacctttgtgacctttcttagtctccttcttgggtacagctcataatgatggtgttcctcagggttctgtccttgacctacatggtttcttactcttcaagtggttctcacatgaaggtgattgtcttcccctcttctacctgccaagagggccaggaagaacaaattccacagcgtaaagacctgttctttcaaatgcaagttttatccccaacctttgcacaccacccaagttgagagacactcctctattgcaattccatgtgttctcttagtgttaacaattatacgttaattattcctgaagcccaagctgtttctttgagtcttttaatcttagctgactattcccaggccctagaactcagtgttttgaaatttaaaactcaaagcatctcctttttcttctctaactaccctcccctgccccatcaccaactttttgtttctaaatctcacatgaaccacactgaccttgtagtcattcagattagggcactgaaagtcaccctatactccttgtcacttcctcacatttttttttttttttttttttttttttttttttgagacggagtctcactctttcgcccaagctggactgcagtggcgctatcccggctcactgcaagctccgcctcttgggttcatgccattctcctgcctcagcctcccgagtagctgggattacaggcgcccaccaccacgcccggctaattttttgtatttttagtagagacggggtttcaccgtgttagccaggatggtctcgaactcctgacctcgtgatccgcccgcctcggcctcccaaagtgctgggattacaggcgtgagccaccacacctggcctggcaaactattaaataaagactattttagatttcgataagtacacaggaggaaataaacattgtagaaagagaggaagggggagaaagggagagacaattgaataactggcgaaggctgttaagaatgtagtctaaggagatgacgtttgaggtggtacttggaaaataagaaagaaccacctgttggaaaagctaaggaaagaatgtttcaggcacgtggtataccaagggcaaagtttggagtggaaaagacttggcaagttgaaccaagagagaggccggggtggttggtctgtggtctgtaatgggaaaggagcagcatgaaaggaagcaggcaggagctaatgcatgggggccttgcgagccagtctaggaggagagtgattcttagtctaaagcggtgggaagccagtgaaggactttaaacagaggcgtggaatatagaccttaaaagagattttgtgtaggtatgcctttgcttaaacattatattataggaattttaaataagcatgtattacttttacagaatttatggtacatcaccatagtatgcaattatgtttgattttatccctcagtgttttatatggcgttgcattttgttgtattttttcattgaaatattttatttacttttaaaccagtagtaaacattttttttcctgtgaccatcactgcactggtcacctcatttattaaggaataaaccaaactacatattatcaacatattatcaatgaagaaatttgttttagggttccggtagaagaaactgacagtttattttagtagccgttttagtgaaatttgactaacacacacaaaaatctatcctgttaaaatagttttgttctagaagcatgatactcataaatagttgttaaatacttatttgtgtttctcagccagatgtcactgtcataaggatgtattggattgcaatacctaataaagttgatttatacataccctgataaaatttgagcttttagttaatgcttgaatgattttagcagtctcttgcagtgctcaatacccttgaacttgcttctttttttatatcctggcctgttcctgagatggttatatttcagatgcacattttacctataaatttgagagttttcatctgatactctaattaaggaaatatgtgagtttgaccttttgatttctgtcctgtccttattgtctttcaggaagatgattagacagagttatatgctaaggcctctcaagtatttgtttcagcataacaataggtcacattttcatctagtttaaatctaatttagagatataaagaatcattttcatgacctgttatctgagaaatactttgctatcatggtttcttcttcttccccaatttaccctctttactcgctattactagaccttttcatggttagaaatttaacttactgctgtctatttcaacttagaatgtaacagacttgattgcctcttccgatagggcaagctagacatctaaattttataaattgattgtattggaagcagtagatcatgtagagactttaaaaaagctgtatttagttttgtttgggtccattagtgatacactttaaatgtgaatattagaaaaccagagagtcaaaaaagaaagagtcaaagattacaactctatgcaaatattataggatgaaggattttttgtttgttttgtgcagaggggccaagtatgacttaaatttgctatgatcatgagtgtgttaacaagtaatgttggtagaatatcctttgtctttaaagaggctagaaaaattataggagtttaaacttaaagctgttatgatttggggttgtagaatatgatttgggattatagggcaaggaaactttgtttatagcacttgttgacattaactgggaaaaaaagaaataattagactctgtggttagccctgttttaggaatctgtggctaatggaaaatctctcaattggatcagtaccctctttactattgtaaatcagtcttatgaaagcagatgtttgtggaagggtgaggtaacttacatccttgctttgcttgatgcctgtggggacaacatggtgatcagctagaagaggtgctgtaaccgttcagaatcatgtaggttgagggaatgcacatgatggatttcaggcaagttcacagctcttattatggctgtttaatattgtttaaatatcctagtgctttatagcttaagttaattcttgtggtcaatgggactttccaacttctaatttgatttagtacagcagtagtaaatagaagaaaaataatgctcattgcctaataattgcttataatattaatcaggtcataatctcttttacatatgaggaagtaagaatgattggaagccgtcttataaagatgcctaccacaagtggttaaggcttttctgtctttgtttattttaactatgaatttggtttttagagttattaaccctttaggttctagtgccttttctgagctatctagtattgaaagtcttgtcattatttttaacattttcatatgtagtgaactttatcaataatatatttaataaaatgaaacaatccttaaatgcagaggtgaagtgagttagggcaaggtgtatggtatgaaaaagaaaggtctttatctcaccctaacactaccccctcaacctaacattcttgctcactgtgctttatatacatattacacgctacatcatactttgtttttctctaagcatactgtttgtctttctgtctctacattttttattgtgattccttttttccttctatttgaatacaatccatcttcaccgtcttaattcgtacctccttcgtgtctaccagtgttacttttttatgtacaacttctgactctttttgaactgttgcttatttgtgacatctagactatatttttatcccttattatattaaaaatcatatataaatcttgatttgtcagctaaattctaattcctatgaaggcaatgattctcttccattcttcatatatcctccatttaatccagcaccaagcacgtaatagctcaatatttattattagtataattgtaggtacaaaaagcaatggagtgttttcgttgcattagtggtcttggaacttaaatatgaatattttttctgatttcccttgagattaaattttgacaatgaaagaggtatgctcaaataacagacgtctgtgttcacactattattggaaaggaagttccattaaaggatgctcaattacctgcagattctttgaataggagcaagtatccataatatgtgatgttataggtttttaaatattctagaactctgaaaagtaatgtgtgtgtaaaggtagaaggaaaactggctttcagtttttgaaaaaatcacaaaccaacaccctaatgattgttgttaatatataaaatacaaataataggacaatattactagtttttatacttgagttatattattctgaagaatgtttttcaaaaaaaaaacagttgttttctgcatgcagaaagttcagaggtcaatgtcaggtaaatggcaaagcagaatttgttacaaataaagttaaatttggtttctgtaatgcattagctatatgaccttgggcatattacttaagtaacccttccgagccttaatttcttcacctataaagtagagacagtaataacttcaaaagatcagatcgagggctagaaaagataggtcatctgatgcgtcaagcacattacctcctcttcataggcatctaacccatgcacattgtgttttgctacctttctccccttcttcctcatgttagttacacattatttaattctaaaccttacttaaaatgttgccctggtagagtatcatagcacatgttgatatctgtaagaaagttatttctaattctagcagtaatccagtgggaaactagacttagaaaaggatgttatcaataatgtgacatgaatatttttcaaagaatttgtgtattttttggtttcacttcaaagtaatgagtttgaaaaaatattaaaatatttaatattaagtttaaaaaatacattaagacattttttgttagtttgaagtgtcatataattttctgaaattagtcaaaagatctctcagtgacaaaataaaattttgccaagttaactagggaaatagtattataaataaaataattttaaccagatcctttgaggaatggagttttctggctaacaatcccttttgtttcacctcttcacataaatgtttacaagcattatgattcactctcatgccttagagtaatagatgtatagaatataggaacttctttgtagactgaggatctttcatcattctaaataatagcttttatcgtatgacagtgtggatgatggccttataagcaggaggagattaggctctaagtaatcacagggcatattatgaaaagtgaccagcctccaccatcccctcctcccattctctaatccctaatcagttttgctttaattttcatgtcctgacttctgaaaatggagtatagaacatttcctaacaagttgagagtctgggtcttagaacttaaaatttattgaaggagacttgggagattatttagcctaacaccctcattttatagattaaaaacctctgaggcatagattaattgacttgctcaaggatactaagcagattcactaaaagaaacaaaaatttaggtttcctcattaagctgacactttaacagtgtcccaaattttggtggttatctttgatcttctttgaaacaggtagatcgacacttgagaaagctggatcaggaactggctaagtttaaaatggagctggaagctgataatgctggaattacagaaatattagagaggcgtaagtaaaatttacagttttccatcaatattggacagtacatgtgcaaatcgctgagaagaccttgtcccacagaggcttttgaaatcctgcccttcaatggatggtggcatccaggccagatagcttggaccctaacagttggaaatgtttgggtcatgcatactgagagagataatataggatatcatccactcactctttatgaaacaacatattaaatcattttatatccacatatactagtaagttgagtggtaagaacaaatttaaagaaatgtaaccatcgggagacaaattaaccatcttgcattaagtgtgttgactttactctgcctctttatacacttaagctttgaggaaagttgttagtttctcttcttaagaattactttatggcttttccttaactgcatatactgaaaaagactcacattggtttcataacactacctctttttcttaaagaagtgttttcttctttcccttagcagcaagaaaccattttgatatttctttgcaaggctctatttgatctcctgctataacttacccctgtcacttctttggtgtgacttcccaaaaatggaagcatgagcactgtttccttaactaatttagcatttcttcaacctaaataggtaatgtacataaaagcagttagtgtggtactaggtgtagagtaggcactcactagatgttaattgaaccaaattaatattatggctaatttctactagaatttaattaaaacttacaaaccttctttttcttggtgcatttcaacagtaagaatatgtacctgtttctacacacagatgaaagatttctttacagtgccaatctatgtatctctctactcactagaagtcagctagggaagccaatcacagatctgtcttggtatccatagttgcatttttgtgttcaaaagtagatccatcactttagataatcatcctatttatttgtgatacttttcttctggaggaaccctatataaagataataagtattttgagacaaaattaaaaattctgtatctgctttgattttttaaaaatgctgatgatagctgtgagtaatgataattcatgcctattcagtactgcaggaaggttaataaagcatcctctctaaggacacagacatatgaaacaaaattggatcaagttataaaaactgctccaccctgtgccctgccataatttcatctcaagggatcaaaaataaacccagaaaaatgtatttagaggtattttaaagcttggtgttagagattctattcctcactttttgcgaacaaaatccctaacttcttttaggaagtctttattatcataatgtcattttaatgatcaaataatttttttcatatagtaatgtcccccatcacgtagaacttcagaatctcccattaaaaggtcttcaactcagtaaaactaggttgactcttaccagtaatgagattacaatgtccattcatccatttatatggcacccactatggtgaattccctaattagacacgagtatgccttgagccattttgtacttaagattaatattgggaaaaggataacttattgtttagagagaggataactcagtgtgggatggacagtggtgatcctctaacatgtctggctaaaataaatacaggcatatgcatcagaacttgctagtcctctgctgggtaagggaactcattgcctgtagttgagtgacatgtgaagttctgcggtgacatttaatggtggtgtatctctgtgcctctcttcttttaggatctttggaattagacactccttcacagccagtgaacaatcaccatgctcattcacatactccagtggaaagtaagtttggtgtagtgcagctaagttttaaaaacaatgaaaaccttattatatcacctatatgttctctttttttaactctacacaaccaattgagaaataaatcccttctttttttttcattgcaagtactggcagacttgtctttttccttggggggagcatatgtgattcggaaatgagtattctgttttctcttaaatgcgtagaaggagaatgtatagtactaatagcatatattcccttcatacacatacctgattctccttagggagcttttcaactgagcattctccttagggagcttttcaactgagccaaacaataagctattttgtaataggccctttgtctttttcatccttgcttctccagtgcttaacctaatgtttggcatataattaagtctgaatggttggtaagtcagtgagtggatgaattgttagttagatgactggctggctggttggtaacagtcaaaaaatgactatatcagtacatcttttgacacatcaatttggtgggaaactattttaagtggtagattgtgttttgaaaacaaaatttccctcacattgtatgtgagcccatggtgtatcttgggttatctttagtactttgctagaagttttttaaatggtggagaagtctactcttaataaacatgtgacacagagttctgcttgtcctgccttctgaggaaacatcatgttctgtattttatgaggaacccagatcatactgtttcacattttaactggatataagtattatgccttgtccatagttctctaaagtttaaaaacacatgaattttttatttatatttagaaaggaaatataatccaacttctcaccatacgacaacagatcatattcctgaaaagaaatttaaatctgaagctcttctatccacccttacgtcagatgcctctaaggaaaatacactaggtaagttaattttcttaaatatgattgctttgtttgtttgtgttagagtaaggggaaataaagtgtttcaggattaatgaatcatacagtttctttacctggttaaagtatacatatggagaaagaagaaaaaggaaaaccaaatacattattcagttgacttaatgtacaagtgacattaaaaattttaatgattatatgtctgtgctgggaaataatgtaatttagactcactaacattatgttctctgcaaccatttttatttcttttttacatctacacaggttgtcgaaataataattccacagcctcttctaacaatgcctacaatgtgaattcctcccaacctctgggatcctataacattggctcgttatcttcaggaactggtgcaggggcaattaccatggcagctgctcaagcagttcaggctacagctcaggtaaaaagtaaagggtttagagacaaaatgttacattttgtcggaatcattggaaacctaatagaaataacgggatgtgaacaaatagttttctaacgttgtatattttcatttttaagtcatgatttcacgatatgtgatattttatttaatgaaataatacataggaattgcctgattgataatgaaaactaaaaaataggtttatcatgcggattacatgcagacccttctcacaataactgctcatgttgcccatgttcttgactgcagtccacagcacatgctagcatagttcttcgttctttctgccagttccaaggcttcccctgtagccttggacttaggtcatcttgagtttgttcacttctgtatagtttgcctatattccaaattaagaagctgcccatcccatagtttatattctaactgtgtaaaatcttattttaaatctttaaatgaaaaaggttaggccaggcatggtgactcacacctgtaatcccagctctttgataggccgaggcaggtggatcacttgaggtcaggagttcaaaaccagcctggtcaacatggtgaaactccatttctactaaaaatacaaaaaaattagctgggtgcctggtgggtgcctgtaatcccagctactcggtaggctatggcaggagaattgcttgaacctgagaggtggaggttgcagcgagccaaaatcgtgccactagactccagcccaagcgacagattgaaactccacctcaaaaaaaaaaaaaaaaaaaagcttaaattccagtgatgaaaataatagtttaaacaatataaattaacatttgataaaccaaaataaaactataatttgtaaaacttgaaaaagaaaatctacatatttacatatattgatgctatcaatgaatgtctatttaagatgaaggagggacgaagaacatcaagtttaaaagccagttatgaagcatttaagaataatgactttcagttgggaaaagaattttcaatggccagggaaacagttggctattcatcatcttcggcacttatgacaacattaacacagaatgccagttcatcagcagccgactcacggagtggtcgaaagagcaagtaagttttattgttacagtagccctatacctttactgaacacttggtctacttgacacttcagccaggcctctctatgttaaaggcaggatataacggattaaaattaaccttgcagaggtagggagacatgcggttttcattttatagtgccatactttgaaggtgtcaagtctttaaaaagtgttagagttgtttttaatttttctagagtcataaattgagtttgttaatacatgacttctttttatcttcttttattcattaagataaatcattttatggaactgcttttcatttattaccctttattttgccatgtgtttcaaggtaaattaatgcaatgcaaattatatcctggtgattttttttttttaaacaagatttttcattttgattaacagcaagcaaggcgtcttcattcttagtcttgggtcccaaaaactgatggtgtaaaaatatccctagattttgtatatgagacttgggatgactgtataagctttaaatatgaaaacctaatagcatttatcactgtctatcccaggtaactgaatatgctgggtgtttatacataatgaaagttcaaatgctaggccaaaataattagttacctagtagttatattttctgtattttaaaatatgttatattttttgtgaattaatcccttaaagaacgatcaatatgaaataaccacaacagaagtgtcaaacatcttaaaaattaattcatcttaatggtacaagtttaatgtaatttcttatgataaagttctatacttttagaatttaaatagcatagggcttagcagtaaattacttgtgaatttttacagtcttggttccctgccatactcatggtaggtattcacacatcagttgatggttataaccactttcatcaaatgtttttgtgtgtgtgtgctttaggttttgatgaagagtattcagtttacttaaaaatacgaataatgagtggctgggcggggtggctcatgcctataatcccagcactttgggaggccgaggtgggcagatcacgaggtcaggagatcgagaccatcctggctaacacgatgaaaccccatctctactaaaaatacaaaaaattagccaggcatggtggcgggcgcctgtagtcccagctactcgggaggctgaggcaggagaatggcgtgaacctgggaggtggagcttgcggtgtgcagagatcgcgccactgcactccagtctgggcaacagagcgagactccatctcaaaaaaaaaaaaaaaatacaaataatgtctgtaaagtagccagaacttatgttaattcttcaaagtactacctacaatttaagtcattggtaaatccggattactttagcttacactttaatttatacatttgatgtcatttcattttatactatttatttaggagttattctcagttaacttctggatggtgagcaaataaaacttatactatttttttcagaaacaacaacaagtcttcaagccagcagtcatcatcttcctcctcctcttcttccttatcatcgtgttcttcatcatcaactgttgtacaagaaatctctcaacaaacaactgtagtgccagaatctgattcaaatagtcaggttgattggacttacgacccaaatgaacctcgatactgcatttgtaatcaggtaaaagtctgttatatctataaaagtataatctgaataaactagaaggaagagaactatttcatttttaagcacttttttaaactcacttaaaatacctttgctttatttgtatacttttctcccccttcttacaaaagtgacatttgctgtaaatactgagtataaagaaaaatgttacccataatcctagccctcagatacaacctgtaactaaacatttttggtataccactaccatatacctcatgtgcacattggctgccttaataaaatacaacagactgggtagcttaaacaacagaaaataattttctcacaggtatgaaggctgggaagtccaagatcaaggtgtccactgactcagttctggaggagggctcccttcctagatggagactgctgccttctcaccgggtcctcacatgatagagggagaaagagtgtgctctggtgtcttttcttataagggcaccagccttgtcagagtaggaccccactctatgacctcatttaacctttaccacctcctcacaggccctgtttccaattatagtcacgttgggggttagggcttcaacatatgattttgagacataagcttgcatttcataacacgtgtctatgcagatttgcacatgcatgtgtgtataagtttgtcagtaggaaccacagtgtatactttcttgttactggcttttttctctaaatcaggtataccgaacatgatttttctttaagatcatatttttaattttcacatagttatctcttatgccatccagtgtagttttcttaaccaatacctagctatagattatattagtggttttaatttgtttgaaattagggataatattacgataggcattttttaaatgtaatccattttatacatctaatttcttggataatcttttagaaataaaattaggctgtaaatatttgacagacaccaaaatatattttctagaaatttattaccaaaaattaataaacataccggtttactaaaccctgtccaacactggatattattttcttttaaaaactaagtaccaatttggtagttttatattatgattgttttaaatacactagtattattgaagttggacattttttgaccatttttgttttttacattatgaatcgactcctaatggtgtcggctgatttttctattgtttttgttatgtactctaaatatttgcttgatttagttttttaaaaataattctaaaattttaattttatgtagttatgactgttaatttttttttatgaagcaagccatggattatatacttagaagggctttctctttggctcttctttctacaaaaaattgtcttgtataatattttctcctagtttttatatggttttgtctagttctttgcatgcttcagtttcttcacatttaagacttagtctatcagcagattattgtgtctaacagtatgagttgccagtctgatttttaaaaattttaacaatttgttagctgttccactatcacccgataaacatttttcagtacaaatgatagaaaagcatatcctgtatcctgacaacaaaagtagattacttgcaaaagaacaaaatcagactgaacctagagttttcctctgtaacactaaaaaactagaaggtgatggaatatgtctgtagagctttcagggaaaaattaagagcccccaaaaacttgatattcagagaagttatttctctgcataggaccatgtaaatatattttcactcatgcagagaatcagaagatatgccatctagttaatcctgtctgaaaaattattcaatccactgagaacttcagtgaactcaagaattagcaagttatgccctaaagtgctggtgatgaagagcaaaagaaaaatgagaaaggacataaaatagataagtttagaagtttcaaggaaggagactattaattgcaaaaatataaatgacctaatgtgacccaagaagtaaaaactttcagtaagtaaataatcaagaaaggaacttaaaatttttacaataagaactacccagaaagatgactccttcatccgggtgatttatatgtcaagttcttccagacttctgaagggcagataattcctgtgcatttcttcccacccttgccccaccctgcccaaaagagtatttcaggaaaaaattattataccttgattctcaatgtaattgtatattcagtgtatttccctttattttccagcagtatcatacataaacagttaattggtatctaggtgtttgttacatagtcataataaagacatttaattttttttaactaggtatcttatggtgagatggtgggatgtgataaccaagatgtaagtattacatttttctatttaggaatgaaaaaaatcacaggttgttattacttgaatatttgtcttatttgctgtatggtttggtctaagaaaacaggtttgcaggtatattagttatattatgctaatgctagaatattcctcttcaaaatagggtagtgtcccttaatgtgttccctattttaatttttaaagctaattttatggttttatgtgcagattgtctcagaagtgttatgttgtatgaaaattataaataccctcctttccctttactaaaaaatactgtgtttactagaatccagttcatttatcacattgaagaaatggaattttaaaacaattcattctttcaggctgcaccgtgctaaagtgaagggtgggataattgaggatctaatgtgagattatcttcctctcatgagtataatattttttcctgtactctgcaggtgtcagctgataagagccacccctgatctaaaaagtaaaggaaatttgaaaggaaggaattcttggtttttaggagacttaattttagttagagatacgttttttattcaatactgagaatattgttgtctagtaattttgactccctccttatttagtagtgacaggatcctaagattaacaagagttttaaatttgtaaaacaatctgaagattgagggagctggctaggtgcattaaaatgtgtacttttcctagacctgatagggttacagcaacatgctcacgtagattgggacagagcctccttctgtttccctgtctagaatcccttgtaggctgtttgtggttgttgcaaaaacaatattgcccaaccatttcaagaacatcactgtaaactcttctggggcagttagtgaaaatgatgaatgagatttctatgagtaccagcatcatgcttctctgattcttcttattcccagttgtgctcttctgagtgctaagactttcatgaaagagttttctgcttaatatgtttcaaagaggaataatttttctctacatttcaaggaatagaaacacccacgtaggaaatgcagggcataagacataaattaatgtctttaattacaatcagcttattctactttatgagacagcaaataaggctgactattaaataaaatcttaagttatatttaccttctacatagaagattcatcccacttctttttgcccttgaaagctgaaaactagtgaattttcattcattaggatgaggggactagattacatggacctcaggattcttgaagatgcataatttttctgtgccttcatttcctcattcctgaagcttatcatttagtctaaatgatgtctaaataatctagatctaaaaattctgatgtcacacatctaattattgttaaattaaatggattattcagtctcctgagcatattttaatatactctcttgtcttcagaagtactgaaaacttgttttttgcaattttgctttctagtgccctatagaatggttccattatggctgcgttggattgacagaggcaccaaaaggcaaatggtactgtccacagtgcactgctgcaatgaagagaagaggcagcagacacaaataaaggtggtccttttgtttgatgaagaaataaacttcagctgaagattttatataggactttaaaaagaagagaagagaaagaagaaacaatgcatttccaggcaaccacttaaaggatttacatagacaatcctataagatcttgaacttgaattttatgggttgtattttaataatgtaagtaaattatttatgcactcctggtgtgctatgaatattattccagttagccttggattatttcagtggccaacatatgcagacatttgtactcctcaaccattttctcaaagtaatgggcattctatgatttagacttcaaggaattccaatgatgaagattttaaggaaagtattttatattcaacaggtatattctgctgcatgtactgtactccagagctgttatgtaacactgtatataaatggttgcaaaaaaaaaaaaaagtcagtgcttctaaaaagaatttaagataatggtttttaaaatgcctttataataagctttgtttctttgtgaaactaattcagcaggctgaaggaaatggttcatgtgataatgtgggctggtatcctctagagtacctgggtacataaacagaaactcctgtaggtaaaaagtaatttgtgccattagtctttctatgtttctgcatccagatagagtgcagttcatgagggagggggcgggggactgaaggggaaagggcgttaaagtgatacatttttataccaaatgtgtttatttttttgtgcaagtaatccttaaaattgcaattgtattaggtgttaaaataaagtttttaaaaaatta

SEQ ID NO: 685 - DNA, 4222 bp, Homo sapiens
  source 1..4222: mol_type = other DNA
gaggggacgtagcgtcgccgcgccaggtctctagcagctgccgctgagccgccggacggacgctcgtcttcgcccgccatggccgagagcgactgggacacggtgacggtgctgcgcaagaagggccctacggccgcccaggccaaatccaagcaggtgctttgctgactgaggagcggccgggccgggcggggcggacgctgggccggggccacggaccgtggggcagggggctcggggaagggcaggcggggcctgggacagggcgcaggggacggggacaaggctggggtgccgggggcaggacggggttcgaagggcggggcgaatcgcaggggtaggaggaccgggccaggacaggggtgggaaggtggggggcggacccaggaggggatggacggacccaggaggcagggggcgggcgactggaggaggagaggagcagggaaccggacggggcaaggggcaggcgatagggccgggaccagtgccagggtggggcggggaggggataggggcagggactgttggtggggacaggtgtgaggacagaggcaggaggtggggacggggacggggacaaggctgggggccttgtgtgaggataggggacagagaaccagggtgggcactgggaacgggggcagggatggagatggggacagggcttggaagaacagggtagagtggggtacagggcttaggacaggggtggggactggggcaagcagcaggaaccagcgatgaaggtggggaattggggttgggatagggctgggggccattggacagcagttgagggcctggggcgggagactgggtgacggggcagaggttagtgacctgagtgggagctggggacagggggtaggctcctccctgagagttttctctctgcctgggacctgcttggttctactggtctccgctggtcagatactgcccagggagcctgcctgggtgcatcacaggctgtagagagtgcctgcttcaggggaccccatgagcaggtggaccctgttgcacaggtggaagatgggcgtgccctgaacagtacttgtggaaggagattaccaatgtggctgatggatccgagggtcagttgtgagtctgatgtaatagggaggacagtttagtcaccgcctctgcctcattcgtaccctcaggtggcctagggctgaagcctttgaggccagttgggccaggatgcgctggggctctggtgacagggattcattggtctgccctacccttactggttgcacagtcaaaaccaaattcactctccttttcttttaaaggaaacttaatggccacaagctaggagtcatgggaataattgcgtggcagcatctgtgagcagatcacacttaggatgctccacaagtcactcctctgaagtggtagaaatgttggccgggcgcggtggctcacgcctgtaatcccagcactctgggaggccaaggcaggtggatcatgaggtcaggagttcaagaccagcctggccaagatggtgaaaccccgtctctactaaaaatacaaaaaattagccaggcacggtggcaggagcctgtaatcccagctactcgggaggctgaggcaggagaattgcttgaactcggagggcgaaggttgcagtgagccgagatcgtgtcactgcattccagcctgggcaacagagtgagactctgtctcaaaaaaaaaaagttaataaatacattatattaatattcagtgactgtagatgagatggcatcactgttattggtgatgtttctggagagcctgcaggcttccatgagatgtgtcatctctgtgttactaggaaccagattcagggaggaaggccacaccaggccagtatttggtgttccttcctacttttgcagtagagtccagcagaaaagtaaatctgtgctaaatatgatttctcaaaaagaatccactaacgcataccagctattcaggagggaggctgaggccagaggctcacttgagcccaggagttccagaccagcctgggcaacatagcaagacctcaactctaaaaaaaaaaaaaaaaaatccctagtgtgtctttctcaacagcaaaggaagtggtgttctcttagcagttaactgtgactttcttagacatctgattgtagaggcttttgtataatgagtttggggttttgttgtgttttattgtttgtagagacaggatcttgctgtgttgcccaggctggtctcgaactcgtggcctcaagtgatcctgctacttcggtttcccaaagtgctgggattacaggcataagccatggtgcctagttgagcttaggtaactgaacccaggactgcatatcagtccttgggcaccactagtccttagcagtgtgctaactggctaacagcaggcctgaattggtgtgtgctggatactgtcaaagctaattttgatccactgatgttttctaattttctaggctatcttagcggcacagagacgaggagaagatgtggagacttccaagaaatgtaggtacttgtgtttccgcttgcaacatgaggctgtgctgtggggtccatgtgctggtgggtgtggtgtgtgcggcgcccccggggacgttgtcagctgagtgcctgcctgcaccggtgctggccggagccctgggaggcagccatcttcccagagcagctctggttggcatgagtacagctgcctgtcctcataactgagagaaaactctggaagtccacgacctgaggtgtgtgaacttgggacagcctgggttcccatgtccccttgagttcaggcagcctctggggtctggttaccgctttgaaatggtttttcttcaggttaattccaaatcctctcctctgcttttgcctcacaccgactccaggggctgctggccagaacaaacaacattctattaccaagaacacggccaagctggaccgggagacagaggagctgcaccatgacagggtgaccctggaggtgggcaaggtgatccagcaaggtcggcagagcaaggggcttacgcagaaggacctggccacggtgaggctgcgccggggctctcactcctggggttgtgggtttggggagggggatggccggtgttcagatagcacggggagggtgggctccacccccctggttcccctgcagggaatgcctcgggaagccaggtcagcccggctctcactgcctctcgcacaaaacccagctgcgtgtgggtgcgtaccccaggggccctagaagctgctgttctcaggcgacgcttcgcgcctggttttgcagcagtcctagtggagctgatgtgtataaagcacatcttctctttagaaaatcaatgagaagccacaggtgatcgcggactatgagagcggacgggccatacccaataaccaggtgcttggcaaaatcgagcgggccattggtgagtgtccctccacccttcgccgggtccgctgaacagggaggctacccgctcccagctggggttggtgagagtgggactcgggggaagaagatggccctgggggtcccctgttctctgaattctggagctttgcttctccaggtagtacagactgagggatggtggggtctctgcaggcctcaggaaacccctaagagcaagtggagtccgagtcccttccccttgccagttcccgtcagcctgtgctgttggcgatggttctctgagcctgagcacagcgggtccgggccctgtcagcatggggccggaagccagttccacagaggaccccggctccggttcttccggagaggggtgttcatgctctgctgtctaaggtgatcagactcatcctcttcaaaattagatgtgggaaccaggagtgctcgtgtgctgagagcccagtgaggcacgggagcggcgtggccccccttccctgggaagatgttgaagaggggcagcgttggggggaggagggagctggtgctgcagtggccagtggctgtggctcatttcaggcctcaagctccggggaaaggacattggaaagcccatcgagaaggggcctagggcgaaatgaacacaaagcctcgaaatcagtgcgctccagctgatctcgttccgccggttccccttggccgccagttccgttctcctcacgggccgaacggaacaaggggtccagcttgcgggggaccctccccagcccattcctgctgtcaaacaaacaaaaccttgcaaagcgctgg

SEQ ID NO: 686 - DNA, 7604 bp, Homo sapiens
  source 1..7604: mol_type = other DNA
cacccggtgggcgtcacgtgacggactcagtagaccgccactggctgtgcacgttatggggtttccacctagggctcggcctgaggcttgtaacactccgttttcccccgagtcacaggggcagtcttgcccctcgcagctgggtcgcggtgtctctcaaaggtccccctctacaggggcttcgtgaggcccgggcccacagggcgctcggtcccggaagtgacgtctcccagaggggccggaagtggcagtggagggagggaagatggcggaggtggtgagtccggtgcccggggcggggcggagggagccaggggaggtgggtagagcccgaggccccccagtagccgaccctggcgtcgcgctgtctccccagggggagataatcgagggctgccgcctacccgtgctgcggcggaaccaggacaacgaagatgagtggcgtgagtgacgttggggggcgggactaaggaacctgagggcgaggggcgggagtcaactgaaatcccgggatggggaggggcgtctggaattatggggcgggcgaggcgcagatactttgatgaaggggcgtggctcttagctgctccgagaggtacagggcggggcctggaaaggggtggcacttgtgactgaaggaggcttaggagagacctaagtgctggagcttagggatccggcctgggggtggagttcaggtcgtggaagggtggagtctcatagcctggcctgtctaaggcccctgtctatgctattctcatagccctggccgagatcctgagcgtgaaggacatcagtggccggaagcttttctacgtccattacattgactgtgagttctgggcctgaggtggggcatcagggtagggttgggggacagtctttggcattctgtcctgagccatccccactgctacagtcaacaaacgtctggatgaatgggtgacgcatgagcggctggacctaaagaagatccagttccccaagaaagaggccaagacccccactaagaacggacttcctgggtcccgtcctggctctccagagagagaggtggtgagtaggtcccccacttcaccttttctctcctgcctcctatttctcttgtctgttggcattaggagctcctggatgggcaggaggcggctccctctcaccctgacttcatcttgcaaaggatgggggccaaattgcacatgtagctcccagagtccagtagctagtcctgtgtccttcagaaggcgagggtggggtttgataattttgaggtgagggacccctcttccccttccccatcccactgccatccccgccccaaaggaagaccctggacctatctctacagccggcctcggcgcaggccagcgggaagaccttgccaatcccggtccagatcacactccgcttcaacctgcccaaggagcgggaggccattcccggtggcgagcctgaccagccgctctcctccagctcctgcctgcagcccaaccaccgctcaacggtaccctcagcaattccagggaccttgctttcttctcaggtcccaccttctctaccttctgacccacctttgttggtttctctctgcagaaacggaaggtggaggtggtttcaccagcaactccagtgcccagcgagacagccccggcctcggtttttccccaggtgagttccccaaaccatctcttgttctcttcctctcttctactctctggtggcttttttcaggctcatttcacagccatcccttcttttcctactatctcggcagaatggagccgcccgtagggcagtggcagcccagccaggacggaagcgaaaatcgaattgtttgggcactgatgaggtgggtctggggagcagcagaagggaactgggtgaaaaggaagggatgcaggcagggtggagagttatttagtgatgagtttaaaaataaagaaggggtggtgggcagagctagtgttggtgggattaggagacaggcagaacattgttcaaatgagtcattggggccgggcaccatggctcatacctgtaatcccagcactttgggagtccaaccaaggctggtggatcacctgaggtcaggagtttgagaccagcctggccaacatggtgaaaccttgtttctactagaaatacaaaaattagccaggcgtggtggcgggtgcctgtaatccagctcggaaagctgaggcaggagaactgcttgaaccccggaggtggagattgcagtgagccaagatcgcgctactgccctccagcctgggcgacagactgagactccatctaaaaaatggggtcattgggtgatcttttccacatcatcgatcctttagggtttcaggttttttatctggaaattggggatcatggtacctcccccttagggttgctgttaggcttgaaggaaacctgtcaaagggctgtgagctgtggtgtcctgctgagctgtctcttacaacctggtattttccactggccctgggcaggactcccaggacagctctgatggaataccgtcagcaccacgcatgactggcagcctggtgtctgatcgaagccacgacgacatcgtcacccggatgaagaacattgagtgcattgagctgggccggcaccgcctcaagccgtggtacttctccccgtacccacaggaactcaccacattgcctgtcctctacctgtgcgagttctgcctcaagtacggccgtagtctcaagtgtcttcagcgtcatttggtatgaggggtccagggaggctgccttcccagcaccctccacgttgcccttgttcctgatcctcctctcttccccagaccaagtgtgacctacgacatcctccaggcaatgagatttaccgcaagggcaccatctccttctttgagattgatggacgtaagaacaaggttagtgcttgagaggcagtgaggcgctggggtgaatcaaatgacagcttcttcttgctcaggtaaacactgaccagtcaagccagcagatcagtccagcccatttttattgagttcctgctgtctggcaggtgctggtagccaggaatgagacagtctctgttctctgacagcttagtccatgggagagacagtcataccaatgacctctagctcccagtgtcctaagtgtcatgaaacagagggtaggttagcaggacccaaaggaggtggtcagcagagcttcatagagggttacctttcagccttggtggatgacaaagtggctgaggggatttcttgcagtggtgttctgaagagtaggcatggatgcacaaaggtggtctttgtgaaaggcagagatcattctggttgggaggcagaaaagggaggatgagggaaggctcgtacatgggacagagcttaggtgatgaagatgctgtgttaaccaccattttgtaattattaatgtggacctgggcatccaagtggcagtacccagcagcaggcggttaaaaagcaattcctgggctgggcacggtggctcacacctgtaatcccagcactttgggaggctgaggcgggcggatcacaaggtcaggagatcgagaccatcctggctaacacggttaaaccctgtctctactaaaaagtacaaaaaattagctgggcgtggtggcgggtgcctgtaatcccagctactcgggaggctgaggcaggagaatggcgtgaacccaggaggcagagtttgcagtgagccgagattgcaccactgcattccagcctgggagacagcaagacttcgtgtaaaaaaaataaataaataaaaagcaatttctggctgggcacagtggctcatacctgtaaccccagcactttgggaggccaaggtgggccaatcacttgagcccagaatttcgagaccagcctgggcaacatggagaaacccccaggtactcgggaggctgagttgggagaatcacctgagcctgggaagtcaaggctgcagtgacccacgattgcatgattgcaccactgcactccagcctgggtgacaggagtgagaccctgtgtcaaaaaaaaaaaaaaaaaacccacaatgtctgaaatgcaggagaaatcgtgtgcagaagtaaagcagcaggattcataattttgctggggtaaaccctaaggcagttattttgttaaattccagaattccttaactctgttgtagagtagcagatcagttcccaggaggtgtgactgtggatgtagaatgttaggttttttaacagctagactcccaagactgttagatagggagtcagtggtcagagtctcactttggacacattagtttgaggagccgtggtcagagtctcactttggacacattagttcgttggctgctgttaaaaaacattaaaaggcagtggtctctcctggtcaggcttagaatggaggtgtgcggagcaaggcgggaaacttgcctgactgagcagggaggcactcagacaccatcacacatctggcacacaggcttttcaacactgaggagcagccctgcctaagctgcgggctggtggagtgggtcaggcccagccagggaagaacactcatcacctagcagcctggggcatagcacgaacagtgaagctcctggttgaccctgaaccactggccaggctcaaggcgggatacccagagtggtgacaagccttttctcttgcagagttattcccagaacctgtgtcttttggccaagtgtttccttgaccataagacactgtactatgacacagaccctttcctcttctacgtcatgacagagtatgactgtaagggcttccacatcgtgggctacttctccaaggtcagtgcctgcccaagctgtccctgtgccctgtcctgagccagatcccttccctgacactcacctgtcccccttctccaggagaaagaatcaacggaagactacaatgtggcctgcatcctaaccctgcctccctaccagcgccggggctacggcaagctgctgatcgagttcagtgagtatgtgtgctgcggccagggggtagtggacccactatcggtgcctcacaggcagatgggccaggctactgtgattctcaaccctggctgtgcagcccagcctctaggggaaccagccagaaataacagtggcactctcccggggttctctccgttcaggctgactgccctgcttatctggggtaggttctcagccccccagtttgctccttggccagggttctaagtgccactcagctttccccaaatctgacttacgtgctcctgcctggagccatgggcagaaggttagtgagccgctggtgctgatgtatctggtaacgtgtgccatgatacgagtactggggcaaggaccagtggctaatgtccccagttgtcccctgagccttgcaggcaggtatccaaaatgctgtcagcagatagacataagcatgttgtccctcgctccttgtgtccagtgaggtcagtctcttaaagccagaagggactctgaacttcatcacacatgggctcttcagtgccctccccaaccctgaggccccttcttcccagcctcttactccccatcaccccccattctgtctgtctcaccactcacttggaataaccaagctctgacctgagaaacaaggaggaagttctagctgttgacctggtgaagacacagaggctttacctgatcaaggttatggtccattcgagaaattttattggttaaatgatgcccagatggggtcacatcctcagaacttctcagcctggtagcacaagtggatgcttgaagaaactcagtcttggaactcagacagcaatggagacgggatgtgagtgggaccagcaaggggctaaggtccattatgagggtgaggaagggcttctagaagtaacaaacatcccaggtccctgactggggagaatgaagacactgaccaagagatgtgaagccactcagggctgtgcagggtctgaggatctcactggggacggcctcccagcggccagctatcagcacgagttggagggaaagagccatggtgggggtcagtcacgtggctcccaggaatggtctccccgacttaggaagcaccttggtgcaccttttctccttgcatcctcacaaccacccagtcaggccactcaagtcttacagcaggtgacactcccaaggtcccagctaggaggactttgagaattcaagcattctcaggtctggattagagacaggaatctgtctccacttccttacatggctagacacagagcccgggatggcaaaggaaaattggaggccccttcttcccatgagccattttctctgcatcccctgcccataagccttcactggcctctgatcaccctcatggttgactgcagctgctcctctcagtgccctcatgccctccactgtgctcagcgcacggaaagagtgaatactcagttcttcctgagggaactgaggcacagagaagtggagggcatagaactgccaagtggcagggccatgataggaactaggcagcctgccttggcaacctgtgtttttaaatgttgcttatgttcatctgtgacctcttactcaccctctcctgctccattgctttaggctatgaactctccaaagtggaagggaaaacagggacccctgagaagcccctctcagaccttggcctcctatcctatcgaagctactggtcccagaccatcctggagatcctgatggggctgaagtcggagagcggggagaggccacagatcaccatcaagtgagcctggcgctgtctacctgggggtacatggcatggcttgtctgttcctgggctttctctctcagggctcctggggacagataaaggtcctcagggaacctgacctgtgctctcccacagtgagattagtgaaatcaccagcatcaagaaggaggatgtcatctccactctgcagtacctcaatctcatcaactactacaaggtagggaggcaggcaggggagacaggtgtgtgggatgcagagtgcagtcctctgtgggctgaccacctgctgaacccatctcctctgcccagggccagtacatcctcacactgtcagaggacatcgtggatggccatgagcgggccatgctcaagcggctcctgcggatcgactccaagtgtctgcacttcactcccaaggactggagcaagagggggaagtggtgaccagacactgcccactgcagtgccaagacggcagcaggactggggctgatagcccaccccgcccccactgcagctcccacaaagcactctaagggagatggggctgaggacagctcaaaaaggagaggacaggcctggcaggggcccactggtgcccagcaccaaggcgagctccgggctcagaccaactccaaggtcagctggccacaggcccaggcctcctctgaagcagggaccagagggagccaggcagctgtgtacagtgagaagggatccggatgggggagctctgtacagagggctggtgattgtaaaaatttcttttgtaaagtagaagttgggggtggggtgggtgctggctgcaaaaatttctggcttctcttacccctattgcccccggcaataaattgtttctatatgccaga

SEQ ID NO: 687 - DNA, 32742 bp, Homo sapiens
  source 1..32742: mol_type = other DNA
gttcagttaccacgtgaaccgccgacggagacccgtagtgggggaggcggcggcagcgttaagtgagaaaggaaaaaagacaacgaggaaaaaggaggtgtccgggtagggcaacgcggcgacacccgaggcctggtggtggcggcggatcgagatattcaaggctgaagcagctacggaacggcagcggcggcggtcggacaaactgactgaccgagccgggtggtggcgggagcagcgggagcagccggaacgatgccggccgtgagcctcccgcccaaggagaatgcgctcttcaagcggatcttggtaagtgtgaggctccgggcaagcggtggggaggatttagccggtaaccgggcctgtcacccctaacctcggcccggcgggcactgagccactcccgcccgggaccccgccttcatagctctcgtcaggccgaatgcattgctttgctccctctctgtggttcctactatggcccgcgcgccagggaccacaggcttcttcattccatccccacgcttgaggccctggttccggactaggccccgacctcccggcttctagactgccggttctcattctccccgatctgggggagaagaggcccggcctttggcgggcaagtgggcgacaccggcaggagtcgcggcccggttggtgtgggaaccctgctggcaggtcggggtggcacccttggaaggaacaggtggtgcggatgcagcaggctcattcattgcctaaacgcggttctccctccatcatctgtccctccctcttcctcctctcttgggattcacctgtctccgcccggcccggggtcacccaatgacctgagaggagggaaagaaggagttcagagaaggaaagaaagcttttcaaacgactacctccttgtagtcagttgcatactggagtcttcagctcctctgcctccgttgttctcgtttctggagtagggatgaggcatttatttcttagtttccgagcgggaaacagccccaccccgtcactcttctcgggaggtggggcccattgcgagggggcggttcggtaggaagtaaaaagttgagtctttagttgaaacgttgcagacctagacttttcttatacactgaagtatattaacacatgcaaaaacttaccagagaaatgagaatataagaacttttgagatggattttgttgacgctagctcagacttattccctacggttcaaatgtgtgcagtttgtatttttttaaaccataaatgcattgatgtttgcagggactgtttacattgtaaaatatgtcctgtagccttggagctataattaacacattgtagcacattttttgtttggcatttagtatgtgggttccccctttcacgcaaacgtttccttatgatagaattaactgtatttgccaaatttaagacttttaaaatttgggatgtgtgtgtgaaagtgttagccttttcccccgcagttataatttatttcacctgtttgaaaagtagaacaactctggggattcagtttttctagaaatgaataatcatccatttgaactaactttgattttacaaaagtgtccatatgccctacagatttagtgaattcattttgaaaaacattagaaagtcacatgcagtgtcgcaaaactgttaccttgaaattcttactggaattttgttttgttttaagactaagagtgtaggtggagctgtaaaatagttttaggaaaaaagttacttttaaacccttaaaaagactaattggtgtgcaggtagaactgtaacataagtttagaatagcaatttatctttaatctctttttcacaattctttattttgaaaaaaatgaaactgaaaagttgagagaacaaggaacactcataaacctttacttatatttatttgccatatatgctttctctctccctatgtatatgtatatatacatttgtataaaagtaagttgtagatgtaaaatttatctctaggctgggcacggtgtctcatgcctgtaatcccagcactttgggaggctgaggcagatggatcacttgaggtcaggagttcgagaccaggctggccaacgtagtgaaatcctgtctctactgaaaatacaaaaattagtcaggcatggtggtgttcgcctgtagtcccagctactagggtggctgaggcacaagaatcgcttgaacccgggaggtggaggttgcagttccagccttggcaacagaggaagactgtctcaaaacaaaaacaaaaaacttcatctctaaatacttaagcaagcatctcctaagaataaggacatcgtcttgtatacttataacaatcattctctaatattgtctaatatctggttcatatggagattttctcaagtgttagcacttttttttgtttgtttgtttgagacggagtctcgctctgtcgcccaggctggaatgcagtggcgcgatctcggctcactgcaagctccgcctcctgggttgacgccattctcctgccttagcctcccaagtagctgggactacaggtgcccgccaccacgcctggctaattttttgtattttttagtagagacggggtttcaccatgttagccaggatggtctcaatctcctgacctagtgatccgcccgcctcggccttccgaagtgctgctattacaggcgtcagccaccgcacccggccaagtgttagcactttttaaataaatcaaacttttaattttgagaagactgtaataatcacgtagtttaaggaataatacagtgcactttactcagttttcccaacactaataccttgcaaaaccatggttcattattataacattgatacaatccaccagtcttattcagatttccccactttacttgtacacgcgtgtgagtgctcgcgcacgcgggtgcagtcatcccttggtatctgtcgggggttgatttcaggatcccgcgagattccaaaatttgcaggtgtttgagtcccttatgtaaagtggtgtagtatttgcatataacctatgcgaatgtatactttaaatatctctagattacttataatacctaatgcaatattactgttatatagttatactgtattttaaaaatttgtattttttattgtatttttaaaaatagtttttacctatggatgcagacaccaaggataatgagagctgactgtatttacttctatgcagcgttatcccatgtatagattgcaccactacaattaggctacagaacaagttccttcagtccaaagtacccccctctgttgcccttttagaaccacatccattatctctcccaccgccctcccatcccctctcgctgcaggctccagcaaccggtacatgtcctctatttgtataattttgccattcttttgggtttagagatagagtcttcctctgttgcccaggctggagtgtagtggctatttataggctctatcaaaagggcactgtaacctcaaactactggactcaagcagtcctcccgcttcagcctccggagtaggggggatcactacagggctactacatccagctaatagtttattcctttttattgccaagtagtattccatgatatggatgtaccacagtgtgtttaaccatccatataatagcaatttttgattaaacatcttaatttttttgtggtagtgttagtggggcaaaaacctgtaagtttattgccaaaatcacagtgctgaagatctattgataagttatatgtgagagaaatgtggaagtcactaaatgaaggaagagtaaaggagctaaaatgtccttattgttctcatacattaggaatgaagaaagtgttactgaccaaaaggatagtattgattttttgaaattgcttctgtttcttgagatttgatagtaagttagtgcttttaagattttttttttttttgcccggtctgataaaggaaatgttggacataatgtgatgtgtgtgctctatgtaatcaagtgttgctaggttggtaacttgttgtttttttttttttttgagacggagtttcgcttttgttgcccaggctggagggcaatggcatgatctcggctcaccgaaacctctgtctcccgggttcaagcagttctgcttcagcgtcctgagtagctgggattacaggcgtgtgccaccacacctagctaattttgtattgttagtagagatggggtttctccatgttgttcaggctcgtctcaaactcccagcctcaagtgatccacccgccttggcctcccagaatgctgggattacaggcctgagccactgctcctggctgcttggtaacttgttaaatcattcctgcagcattcaacttttgagctgctactttgttagttgtactgtacttgttatgataaacttaagtaggaaatacagttagtttgtatttcaaaataaacatttttttccttaaatttttaatggaaacctgctttacacataagtttgcaaaaattttagagtttctgcagtggatttgcctggcttgatctagtctagttgatctctaaaattcagttttgttgtatatttttctcttttttccaatattactcttctgttttctgactaaagcattgtcctaagttagtcaaaatgcttgcataatgtttcttgctgataatttgtctagaaaaaggatgggatgaatttaatgtgacatatactatgtaagagtttattttattttgtttgttttttgagacagttttgctctgtcacccaggctggagtgcagtggtgtgatcttggctcactgcaacctccacctcctgggttcatgcctcagcctcccaagtagctgggattacaggcgcctgccaccacactcggctaatttttttttttgtatttttagtagagatggtgtttcaccatgttggccaggctggtcttgaactagtgacctcaagtgttctgcctgcctcggcctcccaaagtgctgggattacaggcatgagccactgcacctggtcctatgtaagagtttaaggaagacttgtgtttgccagaagctggtttttttttttttggtctggttttttttttgttttgttttgttttgttttgtttgtaattacaaacttttaacttatttggaaaattaagtcattagaaaattgtggcctttgcctactgttgatgctatttgtttatctaaaagtttgaggaggttaccagatatttataccactttgttaggatctaggttaagggtaggaaaaatgaggttgccagagtagaacaaaatccacaccttagattttaacctgcttggaaaagatggacatatcctaatgcctttcaatcaagtattggtaggttggttgctgttgctgctgcttccttctctcttttttgctcttcaaatgttaatgtcagttataagaaaaatctaagttgggaatagttaaaatattgtacatcaataaatgtagttttggactttagcctgaatgatttaaattgttagttgtaagtgttaaaggacagaatttttctttcctagaaaagtggtgagagaagttaaaatagcatgatgattatgtttgtgatttgtcactatttgccaggtaaaatgagaaatctaccatttgccaggctctgctctaggtgctttagaatagcactgcacagtagaattttctgtgatgatggaaatatttgttatctgctctaatatgatagccattggccatgtgtaggtttgttttttgttgtttttgttaagacagggtctaactctatcacacagtctggagtgcagtggtttgatcacggctcactgcagcctccacctcccgggctcaagctatcctcctagctcagtctcccgagtagctgcgactacaggcgtgccaccacgcctggctaatttttgtatttttggtagagacggggtttcgccatgttggccaggctagtcttgaactcctgggatcaagcagtcctcctgccttggcttcccaaagtgctgggattacagatgtgagctactgtgcctggcctggccacatgtaattattgcacacttgaaatatggctagtgcaactgaggaaatgaatttttaattaatcttaatttaaattcaaatagtcacatgtggtgaatggttaccgttttggacacagcatgctttatttagagtcctttcttaattctcaaaacttttcaaggtggggacatttttattaagcaaacagactgagattaaggtcaacagctagtgttagttacagtctggaataaaactttttttcttttcagggcacttaacatcacacctgcctagtgtttaactatttaggggaggggtgtaggaggagggtgagggaattgttaggcaaaggagtagtaatacttattaggtggctgtatacattgtataataagtaaattattattattattattatttttttgagacggagtctcactgttgcccaggctggagtgtagtggtgcaatctcggctcattgcatgctctgcctcccgggttcacgccattctcctgcctcagcctcctgagtagctgagactacaggcacctgccaccacacccagctaattttttgtatttttagtagagacggggtttcaccgtgttagccaggatggtctcgatctcctgacctcctgatctgcccgccttggcctccctaagtgctaggattacaggcatgaaccaccgcgcccggcccattgtataataggtaaattattttatgtgatttattttctttgggaaagttaatgtttctgctagttaatgatacttagtttagcttcagttgctgatgaaatttagattaggaattgttagcaagtaggtgtccatatgcacatgaaagtttaactgattaatttctttgtgacagaattccagttttgcaactaagagtggacagtaactttgaaattggttttaatatacttttgcttgtacttcatatatttagaatataacaaaaaatcaaaaaatggaaacaaagtttggtctgttctgaaatcccattcagctcttagtagttaatcataagtttatttatttttttgagatggagtctcacttttgtcgtccaggctggagtacagtggcgtgatctcagctcactgcactctccgactcactgcaacctccacctcccaggttcaagtgattctcctgcctcagcctccccagtagctgggattacaggtgtccaccaccacacccagctaagttttatatttttagtacagacagggtttcgccatgttggcgaggctggtctcagactgcttacctcgggtgatccacccacctcagcctctcccaagtgctgggattacaggcgtgagccaccgcaccctgccggtaatcgtaaatttaaactcggataaattatcccttaaaagtataccagaaaacaaaatgcagttttgctattttatatatgtgtatataatgtgtatataattattataaaaattacaaaatgatttttctgtaaaaatcgagtgagggccgggcacagtggctcacgcctgtaatcccagcactttgggaggctgaggcgggtggatcacctgaggtcaggagttagagaccagcctggccaacatggtgaaaccccgtctttactaaaaatacgaaacttagctgggcgtggttgcaggcacctgtaatcccagctacttgggaggctgaggcgggagaattatttgaacccaggaggtggaggttgcagtgagccgagatcgcgccattgctctccagcctgggggacaagagtgaaacttcgtctcaaaaaaaaaaaaaaaaatctagtgagaagtgaaaatcttttaataatgtggtaaatttattctttgcttgctttttaagtgtgtgtgtgtgtgtgtgtgtgtgtgtgtgtgtgtgtgtgtgtccaggatttcactgtgttgcccaggctagtcctgagctcaggtgatcctcctgcttcagcctgccaagtagctgagattatggtacatgctactgcgcctggcctgtttgcttactttttaatttttgtctttctggagtgagatgcagtatgaatgaacaaatatatgtttttgttttaaactgacagcatatatttttaaaattctgtattgtgttagaaacctgaaatgttttaaaaaatattttttaaaaattcttttgcgtcaatagagtgggttaaaaatacttgtttgtgcagagtgaccacagttcagttttcaatagtagtagatggacaacactatattttcagaaaagcagactaaagcttaaaagggaactgaatttaatgttccattttttagatgtgtcaaagtcttgcagtcctgggtcattattggggctcaaactagttatttgatgataatagaattgccatccaaactattggagcgctggttaatgaacagtttccagaggggcgggcatggtgctcggtgtgattgggggactggagagatactgtccagctggcctcaactgaagggatccctctccttagtgtgcagtcttatatcttttaatatttctgcttctgacaatgaagttctgacagagcattgattcaaatatatcttctttcttcataaaaacatttttgggccgggcgcggtggctcacgcctgtaatcccagcactttgggaggccgaggcgggcggatcacgaggtcaggagatcgagaccatcctggctaaaacggtgaaaccctgtctctactaaaaatacaaaaaattagccgggcgtagtggcgggcgcctgtagtcccagctacttgggaggctgaggcaggagaatggcgtgaacccaggaggcggagcttgcagtgagccgagatcccgccactgcactccagcctgggcgacagagcgagactccgtctcaaaaaaaaaaaaaaaacatttttggacataaaaagctatgtcgtataaaggatcatatgcaaaggactgttcagaattttctcccccagatacctgtgtgactcatttttcttatttgttttaggacttctgctcagatgtcctttatttttaattttaaatttatttttattattattttttgagacagggttttgctctgtcactcagcctagcatgcagtggcacaattttagtttacttcagcctctgcctcctgggttcaagtgattctcctgcctcagcttcctgagtagctgggattccaggtgcctcctaccacacctggctaatttttgtatttttagtacaggcggggtttcaccatgttggccaggctggtcttgaactccaggcctcaggtgatccacctgcctcggcctcccaaaatgctggaattacaggtgtgagccattatgcctggcctaatttaaaaaattttgagacagagtcttactctgttgcccaggctggagggctggagtgcagtagtgtgatctcggctcactgcaacctctgtctcctgggttcaagcgattctcccaccttagtcttctgggtagctgggactacaggcacatgccaccatgcctggctaaacaggtgtcctttaaatgttatttagagaccttccttggctagcagtcagtccttctcaccttattttcttatttcttactttattctcatttatcagcttctgacatacatttacttttatgtttatcacgttttccacaattaaaatgtagggtttatgaagataaggacgtctgttaatggctctattcacattggttaaaatgatgtaccatagtagatgtttaataaatatttgttatgtgaagtgagtgtgaaaatagtgattacagggcaagagagaaaaagatctttggattgtgtgcttgcataaatttttggagaagggagttaagctgggctttggcattacagagtacattagtgtatgaaataattgtaggatattgggcagagcctatattatggtaagactttgaagtttaatttataaatgaattatagtatttgtttatatagcctttcatcacaaaagcataataagaggaaaattttgttattgtttctttggttttggcattggaggagaaatggtatcaggattaaatgagtttgttgtgaggagcctgctgctgtattagaatcttcagatagtagggctcagccatacgtcatttcataaagctttacaaccgattctgacacgaagtcagggttgatgaccactatatatgatattaagaaatagacctgttataaaatttaaaatataaaatgttagaagagctgggcgcaggggtgcatgccagttactcaggagtctgaggcagcaagattggttgagctcaggagttgaaggctatagtttgtgattattgcgcctgtgaattgctactgcactccagcctgggcaccatagcgagactctatctctttaaaaaaaaaatttgagggaaagtaatcgtagtgttagagttgctttgtgtttttcagaaaatttaaaaatcaagtttaattcttggtatgctgggaagctgatgtggaagagagaacaagtcacataacagtgagcttagccagcaatcagcattcatatctaaatacaattttgctctctatttacaggcaatatcctgttgaggagacaaacttaagattcttagtgagaaatagttctgaaaagaatgtcagttgccaattctgatagtaagaagggtgagtgaagaggcttaaattcagtaatagttctcagtgtaaatgttagggtgtggaaggaattttatgctgtggttgtattcttgacttttggaaatttccctgaaatgccagctgtaggcttaaacatctaagttgttttatgatacatgctgtacaaacttgtattaaagttgtaactttaagaacactagtctaacttgttgcctgtggtttttttcctcctaggtaagataggaaattatattgttcactacttaatatggcattaaaataatcccttacacttttaactaaagcaatcttttctttccttgttatttagaagtaaaatagcttgtaatcccatcgctttgggaggccaatgtggaaaatctcttgaagtcgggagtttgagaccagcctgggcaacatagcaaggctctgtctctgtaaaaaatgaaaaagttacttggatgtggtggtggtgcaaacctgtagtcctagctacttgggaggctgaggtggaggaccgcttgagcctaggagttcaagactgcagtgagctatcatcatgccactgcactccagcctgggtgacagaatgagaccttgtctgggggggaaaaaaaaagtaaaataaaaattgcagtgtaagaattaaatgatggacaggttgatgtttttgttatctgatgggctctactgcactttctttggttagtataatatgaacaaatcttcagttgaaataatgtgaaatttctactgaaacaccttggggaaataatattatttgaagccagtattatttttaattttaaagattccatttgattttattacagaggagattatgtaaacattcctgagtggcatctgtaagagttgttttatctgattacataaaaggagaagtgaaagtttgcttttaaaaacagtagacctagggaaaaaaagcctggccttggttggttgtctccttttacacatggttgctgttcaaattcaaaaacttttttttcctctcacaataaaatggctaaaatggcttacacttaaaatgttactctatttttcaaagagaacttgttgggtagtacaagattacctttaattatcaatgtttgaggaccaagttagaatttttaagaaggggaacattaagcaaagcagtatttatttagtatctattttgagccagattttatgctagactttttacatgttagctgatataaactttgtgacactcccttaaggaaattgtaagtatagccaatacttaatgactacattgttacagtatatttctttcttttttttttttttgagacggagtttcgcttttgttgccgaagctggagtgtagtggccgcgtgatcttggctcactgcaacctccgcctccctggttcaagtgattctcctgcctcagcctcccgagtagctggggttacaggcatgtgcctccatgcccggctaattttgtaattttagtagagacagggtttctccattggctggcctctaactcctgacctcaggtgatctgcccgcctcggcctaccaaagtgctggcattacaggtgtgagccaccgcgcccggcctgttacagtatatttctaaatgctttatatacaggtaattccactgtatcgggacatggagattcctaaaagtcgctgcgctttgcaaaatcacgcaataaaaaccacagggcttatggggaaaatgagtttgaccacaacattaaaaaacattattagtgacagattaaaaacaaagataagaacttaaaatggtagtactgttttacatatgttaaatggttaacaaatacataatactatgatgtaaatattgcactttaccttgaaaaagacagtgcttgcttgcagaagtgggcatctgaaggattacagtttgtaaattattgtgaagtggagaaagtcaggttatctgaaatctgatggtaagttgtaacatcagatgtagatgggtgtggttcattgtggctcacaacatacaaggggatctgaggtagttgtttgaggtgtgtgtctgggtgctgctgtgcatgcctatgagacttgttttggctaggtgctgttttctgtgttcatctagagtttctaatagatgaaattcatagaagcaaacatgaaatttaaaatgttaaaaatgctccccatgaattgtgttggagccaatgtgtgttttcaaaacaagcaatgtaacagaatttacctgtacatgatttaacttagagttgtagagatcatatatcctgtgtttgagtagttcttaactctgaagtatggctgtttactaagagccctagtcttgcatctaatacctgagatagtgccacattctttgccgtcttaggttgccactgccactaaatgaaaaccaaggagacttaagcatcttccaactgtttctttgttagggaagcttttttgttgagatggagtctcgctctgttaccaggctggagtgcagtcgcatgatcttggcttacctcaacctctgcctcccgggttcaaacaattctcctgcctcagcctcctgaatagctgggattacaggcgtgtgccaccatgcccagcaaatttttgtatttttagtagaaacgggatttcaccatgttggccacgatggtctcaatctcttgacattgtgatccgcctgcctcggcctcccaaagtgctgggaatacaggcatgagcaaccacacccggcctagagaagcgttcagttcagttcagtttagtttaggttaggttaggttaggttaggttaggttaggttaggttaggttagtttagtttagtttagtttagtttttgagacggagtctcgctctttcacccaggctggagtgcagtggcgcgatcccggctcactgcaagctctgcctcggcctagggaagcttttgatagaggctaattcattttaaagatttctgtgggagaccaagtgacattttaaaacccaggaaataggccagggacgatggctcacgcctgtaatctcagtgctttgagaggcagaggtgggaggatcacttgagcccaagagttccaggccagcctgggcaatatggcaaaaccctatgtgtacaaaaatacaaaaattagccaggcgtggtggtacgtgcctgtaatccccgctacttggcaggctgaggtgggggattgcttgagcgtggcaggtccaggcttcagtgagcagtgttcatgccactgcactccagcctgagtgacagcgtgagaccgcgtctcaagaacaacaataacaacaacaacaacgactcggcaaatctgagtaaaagagaaaagcagtacttttctaaactacctcccaaattaggtagtgagatacgtatacaagtgcatgcccaatggtaaagcacgtgtattattagtacttgctcttttgtagatgtagtctattttaaaccttagctttttcactgaattgatctcatctttggtttatgttatacttactctgggtcttatattctgtttgatgtttttatttgcttattttttatttttattttttacttaagagagtttatattttcattagttacctttatattatacctttaaaaatcctcttagtctctctcttttttaaaaaaaaaaatttaggtttcttctatttggtttatcagctttaaattagagccatttggtttcattttcttacgtgtgaagtcttattccagtttcttttttttctgtctcttttcctgtgattttttgaagttatatttactttgtgagagtatgtcattttacatactattcttcctcgtcaatacctttgttttaaatttagtactacaatattgttaaagatttacagatcttttcttgaagttctcaatcacttcttggataaagctcatcatctagtagattcctcaggaatgcttgtgaaacaatttcttaaatttttacatgtttaaattgtttcctatatccttgatatttgaaggacagcttggctggatataaaatatttgattcacatctaccacctgttctgtctcttctatatgtatgacttttctttgattcttttcacatctatttctttttcatttatgtgaaagcattcctattttctatctctttagatcatatctgttctctctagggcatcttttgtaatttagtcttcatttaagttcagtttgttcatgttttacaagttcctgttatttgtctactctgtttaaaattttgagtttctcatttgaggtgttcttttatgtctgcatttgttatttaattactttaaatttgcgatggatatggtgatattacatcttttctctgtaagcgtttttgatgtgttttcgtctgcccaagtattttactttttattccttataagtaatttggtatgaatgctgagtccttttttctgttcaggttgtttgtgccagattttattgtaccaacaatattgttatcttattttgtcttattttggtgatggggttagggtggccttctcagtctcttagttcaagagcattctgatttgttgccacagtgaaatgtagttttaaaaataaattaacacctccccccaccccccgccatagttctgtcttgttttagtaggccatctatgctctggtcacttcctttttttcctttatcatcaaccctccaaatgacacctccttctctcccagaaactgtgccttgctaaaactgttgcctttgatcttacatactttctaagtgtatttttgacttcccagtagccattgctctcactgtcatgtatcagatgtgccagtactttctctcagatggggccctctcctgatggtaaatcctcagtcatattacatgtaattcggttaccactaggactctgctatattgctcttctggacagttcccattgaagcttctggtcttcaatgtttatgctcttatacgtaaattggagtttttagtcatttcatctccttataatgctgtggggtcagctatggatgattttatttgctctttttcttggcctgtatggtttttatgaggatttgtggagggtgtagaaattagaggatcgtgggccgggcgcggtggctgacgcctgtaatcccagcactttgggcggccgaggcgggtagatcacgaggtcaagagttcgagaccagcctggccaacatggtgaaacccgtctctactaagaatacaaaaattagctgggcatggtggcacatgcctgcaatcccagctactcggaaggctgaggcaggagaatctcttgaacccgggaggcggaggttagagtgagcccagatcatgccactgcactccagcctgggtgacagagcaagacactgtcttgaaaaaacaacaaaacaaacccaaattagaggatggccattaacctataggggacttaatctgtgttttttatgtgctatgcttgaaaatatttgtgtttgctttaaaataatttgcaattcaggttttgtataattggataattggttatacttctgttttaccccattgttctctcttcaaactctcttggaagtatttgtcatggaaataactatgaggttatattttatagctgtctgtcaatcatgtgtgtaatccttgttttgcagatttctactcttatcaagcaggaatctgaaatgccactttaatgttctttcttcaagtgacataatttcatgctacaaagtaaatgaaatataaaatctggcacattttatgatacatttacaagagtataatattcagaaagtggatggtgattgttgcactcaattttgcttgctagtaagaccatatatgtaattttcacttctgtgtccaaaacttccaaagataaagaccaatgacgccctaatgcttgtactccacaaaaatattggtgtaaaattccttacagatctttcttgtcttttttattctgagactgagtatttattacctttataatattaagatgctttttgtgtgtgtgtgtgaaatactaacgccaaaattttttttaatggcttatttggaaaaataaaaatttagcaattccatttcggttcccccgtttgtttttttgaaaccctattagttttttaaatatacggtgcttctttggcagcacatatactaaaattggaacaatacaaagaagattattagcatggcccttgcacaaggatgacatgtaaattcatgaaatattccatgttttcttaaatataaaaaaaataagtaaaacatagaaacatgggaataatattatatcaacttcatagagtggtctaaaatgtcaaaggaggctgggcatggtggctcacacctgtaatcccagcactttcggaggctgaggtgtgctgattgcctgaggtcaggagttcaagaccagcctggccaacacagcgaaactccgtctctacgaaaaatacagaaattagcctggtgtggtggcatgtgcctgtaatcccagctacttgggaggctgaggcaagagaattgcttaaacccggaaagtggaggttgcagtgagccaagatcgcgccactgtactccagcctaggcgacagaccccatctcaaaaaaaaaaaaggaacttaaaactttcatataagtaacagctaaaagaacaaagctgtttagcttgaataaaagaaaacagaattcttacagagctataatcccttatccagttacagggcgatagtttggatcagtatatctaaaaacatttttgtaggccgggtgctgtggcttacgcctgtcatcccagcactttgggaggccaaggctggtggaccagctgaggtcaggagttggagaccaggccaggctggccaacatggtgaaaccccgtctctactgaaaatacaaaaattaaccaggcatggtggcgcatgcctgtaatcctagctgttcaggaggctgaggcaggacagtcgtttaaacccgtgaggcgggggttgcagcgagccgagatcatgctactgcactccagcctggctaaattttgtatttctagtagagatgggttttcaacacgttggccaggctggtctcgaactcctgaccttgtgatccacccaccttggcctcccaaagtgctgggattacaggcgtgagccaccgcgcccagccaaaagttgtatttcttttattttatttttgcttttatttatttattttttgagacaggcactcgctgttgccaacactgcagtgtagtgacatggtcatggctcactgtagcttcaacctcccaggctcaagcgatcctcccacctcagcctcgtgggcggctgggattacaggtgtacactaccatgcctggagaattgtgtatttttagtagagatgggttttgccatgttgccaggctggtcttgaactcctgggctcaggcaatctgcccaccttggcctcccaaagtgctgagattgcaggtgtgagccaccacacccagccaagttctatttcttaatattgtgggtttcagatgccatgatctcatgatatggtgtttcagctcagctgtggtgctgatgcactgtgcctggcgactgagaatgtctctttctgggattcctcttaccaacaggttcctaaagctctgtttctttaaacatctttctttgtgtttttcagattggataaattttattgcacactgctactttcctgttatctgttatcttctttctgctcttgagtccatacagtgaggtattttctccttaaaaaaattgtttcagagtgttcactattgcttccttgagcatttttatagcactgaatagaaagtcttagatatctctttcatctttgcattggtatctgtttcttttcccaggcaagttgagattttcctctttgcatactattttattagactctggatctcacttaaatcctgtggaaaatgttgataattttgttttagtgatttggttaggttcaagcttcaagtcccaactcctctttgggatgttgttctaatgtcagtttatttttcaacatctttgcagtcctatttgggtctattccatgtatgtgccacttcatagccagtctggtgcctgaacggagtatctgttagttcggttttcaaagtctttaatattgtgagtagggtcatattcttgcatgtataggttagggggcaaacctagggattcataaacaactttgtggtgttgcttttcccagttctttctctgtgatcttcctgaatgtttccccgggttttttatttacttatttatttatgttttgacacggagtctcactctgtcgtccaggctggagtgcagtggcatgatctcggctcactgcaacctccatctcctgggttcaagcgattctcctgcctctgcctcctgagccgctgggactacaggcgcatgccaccacgcctggctaatttttgtatttttaatagagacggggtttcatcatgttgggcaggctggtctcgaactcctgacctcaggtgatccgcccacctcggccacccaaagtgttgggattacaggtgtgagcctctgcgtctggcctccctggtgttttttgagactgagactcatcatgttgcccaggctgatcttgactcctagcttcaagcagtcctcctgcctgggcctcccaaagtgttgaggttactggtgggagccacctcacccagccaccttctttttatcctctggctagaaagctgggcctttaataagctattctgtgctgtgcacttttgtgactgtgtctagctagagatttattcattttttttttgatcttctcaaagaaccagcttttgatttcacaaatttcttctgtttttcttattttttcgtattttttcttttgccaaagccaaatatttctaatttttttctatttaatcgactctgtttttattatttgcttctgcttatgttgggttaaatttgctcttgttttttctaatttcttaaggtgacttctattaaacatttccattttaaaaatagtttccatttcttcattgagattttctgtttcttcttaaaaaaaatttatagccttttacttatttttttgtggagaatctgggtctcactgtgtttcccatactagtttcaaactcctgtcctcaagtgatcctcctgcctcagactccagaagcactgggattacaaacttgagccacagtgcctggcccttatttgttttttttttttttttttgaaacggagtctcgctttgttgcccaggctggagtgcagtggtgaaatctctgcccactgcaagctccgcctcccggattcatgccattctcctgcctcagcctcccgagtagctgggactacaggcacccgccaccacgcctggctaattttttttttttttttttgtatttttagtagagatggggtttcactgtgttagccaggatggtctcgatctcctgacctcatgatctgcctgcctcagcctcccaaagtgctgggattacaggtgtgagccaccgtgcctggccccctcatttgtttttttgttgcctttgtgttttgctttaaatcctttagtgttacataatagtaacttgttttgaagtctcagctacttacgtcattgttattaatatttctgactctttttttattgatttctttctcctgtaggtcatgggttagtttcctgcttggaatttatagtaattttcctcccataattttgtatagtatggatcctaggatatttaatgtctggatcctcttgcctttcttaatagagttttgttttggcagacaatttgcttgtttatcagcttatactttttgaggcttgtttttaagttttaataaagatgggttgatatggtttggctgtgtccccacccaaatcttatcttgaattcccacgtgttgtgggagggacctggtaggaggtaattgaatcatgggggagggtctttcctgtgctgttctcatgatagtgaatgagtttcatgagatctgacagttttaaaaaggggagtttccctgcacaagctctcttctcttgtttgctgctatataaggcatgcctttcaccttctgccatgattgtgaggctcctccagcctcatggaactgtaagtccaataaacctctttgttttgtaaattgcccagtctcaggtatgtctttatcagcagcatgaaaatggactaatacatgggtctagattaatcttattcctaaggtgtgagctttctggatctctgctgaattctgcagtctttaacgtagtctcttaacttgatacttggaattcaaatgtctgccagccatgcatgagcaccagtagttgttaggctcatgctacttggtaattgttctttgcccagctttcatagacctttgctgtgtacctgttcagcctactctgtgtgagtgtgtatatgtgtgtattttttatttttgagacggagtcttgctctgttgcccaggctggagtgcaatagggcaattttggctcactgcaacctccacctcctgggttcaagcgattcttgtgccttagcctcccgagtagctgggattacaggcatgcaccaccatgcttggctaattttcctatttttagtagagatgggtttcaccgtgttggccaggttggtctcgaactcctgacctcaagtgacccgcccaccttgtcctccccaatagctgggattgcaggcataagccaccgctcccagcctcagcttagtatttgacggaggatggaggattcctgtggcagatttctttttcttttcttttcttttttttttttttttttttgagatagagttttgctcttgtcacccaggctggagtgcagtggtatgatcttggctcactgtcacctccagctcctgggttcaagcgattctcctgcctcagcctcctgaggagctggaattacaggcgcctgccaccatgcccagctaattgttgtatttttagtagagatgtggtttcactatgttggccaggctggtctcgaactcctgacctcaggtgatgcaccttggccttggcctcccaaaggtctaggattacaggcatgtgccactatgtctggctaatttttgtatttttagtagagacggggttttgccatgttggccagactggttttgaactcctgacctcaagtgatctgccctcctcagcctcccaaagtgctgggattacaggcgtgagccaccgtgtccaactcctgtggcagatttctgaagcctcttctatatatagttctctgtagcaccctgccccataaattccagcagtttctaattctcatatctactcaggtcagtgagactgctaagctctgtttaggtcccccacccacacccctacacctcttacacctattctgcagtctggaagatgcttctagagacaaatagggatttttcttgggatttaccctgcttctcttctgaaacggtagtcctgtattggcttttgtccaacagctgaaaacagctattttatgtttactttccagttttatagttggcaggaacctcatctagtgtcagttattcttatacatttgggagcagaagtctcagagtgtatggtgccagaatttagcacatgcgactttattatctattagaacaattcagtctcttgttttttgaggcaagtcttgctgttgcccaggctatagtgcagcagccttgtcctcccagattcatgcaatcctcccacctcagcctccccagtagctgagactacaggtatgtaccaccaggcccagctaatttttgtattttttgtagagacagggtttcaccatgtttcccagggttgtctggaactcctgctcaagcaatctgcccacctccacctcccaaagtgctgcagttacaggcatgagtccagcccagtttgttttaattatatcctggtttgcttctttgcttcattgtttctatagcagagtgttaaaattttaaatgttaattcctgttgaaaaacaatagcctgcattattcttctagtatttttgaaagtattatgttagattttgaactaacatatgcaggtgttacaggtaggaggacaaatagatactctggcatttcttccatagcaagggaaatccttattcacagttttgaaatttcaagaactccccaaacacaagagtttcagatgagggaatgtagacctgtatttctgtttaatgcaatgattcttctgtggagaactgaaaatgtctgtctactgtgtcactttataaaacctgttttaagtgaattgaatgtaaaacatatgttgaaagtataccatatgtagtattttgcatttcactttccgtaaataaaagcaaagtaagttccctaaaaagttagtttagggccgggcgcagtggctcacgcctgtaatcccagcacttcaggaggccgaggcagggggatcaccagaggttggagttcaagaccagcctggccaacatccaaattggatattttttgttactttttcctttctattctcctttgtaataagtgacctattatagaagtagtgcatttcgtgaaaaaaattgagatctatttacttaaatgcacgttggttcttgttgaggagaaatgaattagtagtagttatttggaggggcctgccattctgaattatttttacagctcacattgacaggagataattgaattaatggcattgaatataatttcaataaggacatagctgaatttcattaattgagaacataatcattaggatctaaaactcagttactgttctaagtatgatgaagtaaaaagctaactgctgtaatgtaaacatatctcattcaaggggcggggggtttagtttttaattttcctgtcagttatttggaggggattatctagtttaattttgtatgttcacttctcactttattttgggcatttttattgtccatttgattataagactgggtaagcaatgtaacagttgaatttgttgattagaagatcttttaaaagataaaaattttgggtttaataacctttaacatttaataaaatttctgtaggtgatggaaagagcttttaaccaggagtcagagagcctaaattatagtcttaaattttgccactagttaggtatgtaatctggggtaagttacttgttttctaaattttacctctacaataaggattaaaccttttgtgcttatgggattatcatgctgattaaatgttaccgaggagtctctttgaaaaacatacgataaacaaataaaggtgtttccagtcacaccaccaaaaataccaattggaatcctgaatattttaaaaatcagctatgtaaaataaagttacattgtgcatgtcaagtaagaatatcaattttatttattttttaagagacagtgttttgttctgtcgctcaggttggagtgcagtgttaccatcacggctcactgcagccttggactcctgggctcaagccgtcctcccatctcaggttcatgagtagcagggagtacaggcatgccaccatgcccagctaatttttaatttttttgtagagacagtgggtctcaaactcctgcctcaagcgatcctctcacctcagcctcccaaagtattgggattacaggtgtgagccaccatgcccagccgttgtctgtttttatatgctagtttgaattatatttgtataggttcacataagtattgtagaatagtaaactattccataagttttggatgaaaactttcttgttaaaatcagaatgtttaatagcagttgtgtctgcaatgagattatgggttgattttcttttttcatttttttaaagctttctacaatggccattacttgtgttagcagttttatgtttttttgtaaaatgttttaggcactaggttagggaagtagttacaatggttaggtgttatggttctgtatctggattgtctgggttcagattctttttccatcacttaatagcagtgtgaccttggccaaattatataacctcctggacctcagttatctcgtgtaaaatgaagatagtaagactacctgcttcatatcattaagattaaataaattttccctgtaaagcacttagcacagtgcctgggactcagtaaatgctcattaaatattagctgttattattgttaagtgttttacatgtctttttctcatgattgctctccatgatttaaggattctttttgatactcagcaaagtactacataagattatagaattaaagtatagagtcactgtttgaaaccagagcctttgattccaaaggtggcccttttcactacttcgttaattcctcaaagtaaatttttccgttcatagtgtttctgttatataaaaattaccttggaatgtaatgctaggattattacacagtgatgatactttatcaattctatacttttaacagatgaggcctagatttccttttatatcatatttactgtattagttttggtaatttaagcctttggcataaaggccattaatacaaagtcaattaaaataaatttttacttagtcttatttagttaaaagagactataagttagtacttttagtttaggtatgtcattaattttgggtgtcctttttgtcgttttaattttttttaaccagttactaataaatattttttcctttttttgaaacagagtctctctgtgtcttgcccaggctggggtgcagtggtgtgaccatagttcactgcagcctcaacctcctaggctcaaggaatcctcctgcctcagcctcctgagtagttgggcctaaaggcacacaccaccatgcctggctaattttttgatttttttgtagagacaaggtctcactatgttatgcaggctggtcttgaactcctgggctcaagcaatcctcctaccttggccttccaaagtgttgcaattatagacatgagccaccgtgccaggccagtaaatctttgtttgtttatttgtttgtttgagacagagtctcgctctgtcacccaggctggagtacagtggtgcaatttctgctcaccacaacctccgtttcccgggttcaagtgattctcatgcctcagcctcccaagtagctgggactacaggcgtgcgctgccacgcccagctaatttttaaaatattttttagtagaaacggggtttcaccatgttggccaggttggtctcgaactcttgaccttaggtgatctgcccaccttggcctcccaaagtgctggaattacaggcgtgagccactgcgcccagcctgaccagtaaatcttattctcattctttttcctatcttatggtgaatatacgtttctgtgtgtacacctaggttggaaggattggatcagatagtatgtgtatttgttttcgttttgttttgttttgtttgagacagagtctcactctgttgcccaggctggagtgcagtggcacaatctcagctcactgtaacctctgcctcccggatttaagcgattctcctgcctctgcctccctagtagctagcattacaggcatgcaccaccacaccccgctaattttgtatttttagtagagacagggttttgccatgttggccaggctggtcttgaactcctgacctcaggtgatccacccgtctcagcctcccaaagttccaggattacaggtgttctagaagctttttcattttaacttacacatttagatctgcagtgtttttagatgttttttattatgaagaaaggtcactgtagttccactaattatatttttctacattatcttttctctctctttcattgaggtggtttctgttgctatgtctgtcttctagcccactgattttttttttcttcttctgaagtgtcataaaatctgctttactcttatctgggaaaggttccattttaaaaaaattgaaattaaaattttattttattagttttttcagatggagtctcgctctgttgcccatgctggagtgcagtggcacgatcttggctaacttcaatctccacctcccaggttcaagcagttctcctgcttcagcctcccaagtagctgggattacaggtgtccgccaccacgcctggctaacttttgtattttcagtagagacggaggtttcaccatgttgtccagactggttttgaactcctcacctcaagtgatctgcctgctgtggccttccaaagtgctgggattacaggcgtgagccaccacacctggctggtttcatgttaaattctgtattttcttttttccttttccttttctttttctttttctttcttttctttttttttttttgagatggagtctcactctgtcgccaggctggagtgcagtggcgtgatctcggctcactgtaacctccaccccccgggttcaagtgattctcctgcctcagcctcccgagtagctgggactacaggcacgtgccaccacacccagctaatttttgtaatattagtagagatggggtttcaccatgttggccaggatggtctcaatctcttgatctcgtgatccgcttgcctctgcctcccagcgtgttgggattgcaggcgtgagccactgtgcccggccttctttttttttttcctcagacagagtcttgctctgttgtccaggctggagtgcagtggtatgatcttgactcaactcactgaaacctccacctcccaggttcaagcaattatcctgcctcagcctcccaagtagctgggattataggtgtgcgccaccatgcctggctaatttttttttttttttttgtatttttagtagagacaaggttttgccatgttggctaggctggtctcaaactcctggtctcaagtgatctgcccatcttggctttccaaagtgctgagattacaggcatgagccactgtgcccagccttaatactgtattttcatctttacaaattctatttgtttttttcgaatatatttcattttcctcttcatttgtttatccattgcttaaattttgagcacatttataatagttgttttaacttctttatcgtaattccatcacgtttttaatttctcctggttatggatcatgttttcctgctcttaggtgtctagatattttctattggatgttatacattataggttttatattattttactaaatttaactgtctttaaagagtggtgttggactttgttgtggtgcacagtgaagatgcttgtctgtcaacctgattttttttgagggtttgttagggtgggtctaaagtaatactctagggctagtgtatgtctactcttaaggaatgacctttttgcagtatttactgaattctacagctgttcgttgacactccattctggcaagttggaactcttactaccatgtgggctgtgagaattgttaaacttaatgcgtcctcatcattctttgtctggccttgttatgtttcaccctacatatgcaaaacttagtactcaacagttttcaacaacagacacatggggatcttctgtggatttttggatctctttctcagggtggtttcatctcttgcagagtgcctcagcctcgttgaacatcagtctttgttaactctgtggactcctgtagtttgcttgggatccttcttcctgtgctgtgagctaggaagtgcctccaggagtaaagtggtggcattactagagctcatcatgtttgtttcccgttctcatggttcacagtcttgcgccacctgttagcaccacctgttgaacctgttatttcatatattttgtccagttttctttatgatgaaagaaaaagttcagcttcacctactccatcatgccaaaagtgaaagtcacctaactacatttttatacatgtaaaatttcagaaagctgaaggttttatgaacagtgacacttaaccctcttccttataggtatgaattttcataaacagcaagaaatcaagaatattccttttaattatgttagtctttacatcatagcttcctttagtgctttcttattataagaaaaacaagctacttttaggctttctgctaagtaaatgggaacactaaatttagttacttagtcttactatgtttctttggctacatatgatgaatgatagctctcaagtaactgcttctgctttctcctcctcttatccctgaaatcactgtgcctgctgaatgcatagttgattgtgggagacaaagaaaatattcaaccagttaggaagctattgccaagaaaccgggtctgataggacctaccagaggacagaagtataagggaaggagaagcaccaaagatgattggttttttttgcataatcgtctggttgagttgaagagggggaatcaactctatcttcaggatggtgaagacttggtgcagaatacattttgggcgagaaaaatcagttgtatttggatatattaggtttcagatgcaaaacaacagcattggaaggctgaggcaggaggattgctggagcctgtgattgagacactgtactccagtctgggccacagagtgagatcctgtctcaaagcaacaacaaagtggagatgatgggtatatagttggttgtaaagcaactctagtttgctgtagtgtgaacttaattgatttcttcatgctaaaatgtgaaattttacatttttatttttctgtttctacacattttctaccatgatttttgtcatcacttgcattaacttctttcccagattttaaatatattgcctcaaaaattatgagcaaaattgtttaaaatttatatcaatgtattctggcacgaattgtatcttttagagcactttttttttctgtaacaaatacaatgctttaaaaataaattttcatgtgaaagcatatgttgatgtctaaaagtcagctagcactaaaagatttatgatgaaagaaataatgttccctattttctcccatccccttgctttccccctccagaatcaagcaacttcagccctttattttgtctggtatttgccttcttgttgcttagtaatacatcactatttcttcttgatacatagcttttaaatatttgttgacctctggtttgtgaaaatgaggactcagaacttactcattcacacatttgcccactttcatcttcctcattcctcaacataattatatcacaagtttttttttcttctttctttcttttttttttttgagacagagtctggccctgttgcccaggctgtagtgcagtggcatcatcttggctcactgcagcctccgcctcccagcttccagtgattctcctgcctcagcctcccaagtagctgggattacaggcgcctgcatgccatcatgcccggctaatttttttttttttttttttgtatttttagtagagaaagagtttcaccacgttggtcaggctggtctcgaactcttgaccttaagtgatccgctcacctcagcctcccaaagtgctgggattacaagcatgagctatcatgcccggccatatcacaggttttttataaactagtacagaatgtttacatttttataactatgcatatattgttcagtattgagccaaatttgtactaaatccaagtcttatacaagcttttgttttttctggagttaatacctattatttaggcagttgactggttttctgtagacctattgctcgtttcctgcaaatgtgcctgtatttctgtcatgagcttatgattaacattttccatgttagcaagcacactagttcgatttttgctcttgctggaaacctattccatagtagcttttgactctgctccactctggagtggctgttctctagttcttttttctgtattatattccttatttactaagtcctatagtgcttttgtttttgagatacagtctcacactgtcatccaggctggagtgcagtagcgcaatctcggctcactacaacctctgcctctcgggttcaaacgattctcctgcctcagcttcccaagcagctaggattacaggcgcccgccaccatgcccagctaatttttgtatttttagtagaaacggggtttcaccatgttggcctggctggtctcgaacttctgacctcgtgatctgcccgcctcggcctccaaaagtgctgggattacagatgtgagccaccacgcctggccctcgatagtgccttttaaaaaatttatcctaatttcttttaatggcttcctaaggaagaatacatggacacaaaagtttagctttttgcaaagctttaaaatgtctttttgctcttatacagtcttggtattttggtttgtatgttttttttttttttttttttttttttttgagacggagtctcactctgttgcccaggctggagtgtggtggtgcgatctctgctcactgcaacctctgcctgctgggttcaaatgattctcctgcctcagtctcctgagtagctgggattacaggtggcgccagcaggcctggctaatttttgtatttttagtggagacagggtttcaccatgttggccaggctggtctcgaactgctgacctcagatgatccacccaccttggcctaccaaagtgctgggattacaagcatgagccaccgtgcctggcctcttatatagtcttaatgtatgggagcaaaatgacattttgcgagattggttccaggatctcccttgggtaccaaaatccagggatgctcaagtccttgatatacaatggcatagtatttgcatataacctatgcacatcctcttgtatactgtaaattatctctaggttatttataatacctaatacaatgtaaatactgtgtaaatagttgttatactgtattgcttagacattaattacaagagaaaagtgtaagtttgtatagatgcagtttttttttttcctaatactttctatctgtagttagcagaatctacgcatgtagaacccatggatatggggcctgactgtacttgattgatgactcagctggtacagaattataagttgaaacttaattttcactctgacttttgaaggccgtatatttgtcttctagatttcaacagtatttcatttttactttcaaataagagtgcattgctattctgattatagatcttttttatgtgacttgtttttttcccctctctggaagtttttaaggaccttttttttttattttcaggctttgagatttcactatgatatgttacagtctgggtattttttccgtgtattttgcatggactttttttggccctttcagcttgaaagcttcagtaaaaagaaaacgttcttcagtaaaaagaaaatgttctttagaaaactagctgggcatagtggctcatgcctgttatcccagcccctggggaggccgaggtgggaggattgcttgagtgagtcctgagatcgcttgagaatcttggagtctgagaccagcctaggcaacatagtgagtccctgtctctacaaaaaataaaaatattagccaggtatggtggcgtgtgcctgtagtcccagctacttgggaggctgagatagaagtattccttgggcccaggtggatatggtcgctgtgagctgtcatcacgccactgtgccctgcctgggtgacagagtgagtctcagtcttaaaaaaaaataaataaaagaaattctataccatttatttttctgttctctttctgcatcactcagttgttggactttactaatctatattttgttcctttgtcttttacttcctgtatttgaaccttttgtattttttattggcattttaccgagatttagaagcatatggaaatagcattctgttgtatttaacagagtagagaaatttagcgttgaatttaaagttgtttgtattccttgctaaacttaaatttttcttttttgttttgacagaggtgttatgaacataaacagtatagaaatggattgaaattctgtaaacaaatactttctaatcccaaatttgcagagcatggaggtaagt

SEQ ID NO: 688 - DNA, 13031 bp, Homo sapiens
  source 1..13031: mol_type = other DNA
actctcccaagctcccagtggcgtctgtaggcggcgatggtgaagttgctccttcacgacctggagcgttgcgaagtggtgctaacatgagaaggtcataatatgagaaaaacaaaacggttatcgggatgctgtgcagaacggggacatatttagaggttacaacgggatcgtaatgacttcctgttgcatagcttgattgagaagaagcgcttccggcggtcttagatcactaatcaacaaaccagctttcggggtctgacgcgatccttgcctcaggcctctcgaggtccagacagccgcccagcccgctctgcgacgcagcagtgaatagtgtggtacctccttgtctcggttcaggtccagacctccccgtcttccggctgccctgaacgtcaggcgacctcaggaccctgtgattggcgcctgcgccggcggaccgtgaccgaggaaacccctggagggacttgggcattccttgggctccgtgcctgttcttcgtgctcctttcggtaaagtaagggaagagggcgacttttttgttatttcgttcattcatttattttttttctgaaattattaaggcagaatagttaagtggttaagagagcagactctggagactgtcgatttttgacctcgccatttgtgacattgggcaagacactaggcctcagccctcactctgaaaaatggggataagattattagcctcatagggttgttggaagaattgaatcaaacaataaaggccagccagaccggtggctcatgcctgtaatcccaacattttgggaggctgaggcgggaggattgcttgagcccaggagttccagaggaggctgggcaacatggcgagaccctgtctcgccaaaaaaaaaaaaaaaaaagaaaaaatccaggtttgatggtgcgcgcctgtagtcccagctactccagaggctgaggtgggaggattgcttggtcccaggaggttgaggctgcagtgaaccatgactgcaccactgcactccagcctgggctacagagtgaaaccctgtctcaaaaaagaaacaaacaaaaaaggtgaagtctggcatatagtaaacattcaacaaatgccagatatttctgtgtgcctggccctgtaacaagaccacagccataagaaatagacgggcagaaaaaatctattgcgataagtactaattaaaatccaaggataactgctgtgacatagacttgcaaagcactgtgagaatagagaaagggagatgcactggtgaagtgacggacggtggggacttatgctgtacttaaaaatgaatatgagtctgccagggatgtgcaaggttggcagagcatttctggcagagttcacagctgaaagtgtcaattgtggaaatgtacagcattctcaagaaactgagtagtataatgttgttagaacaaaggtagtcatttcacccaggaagctcctcctttgtgcttccagtaccccaggtccatatacctctagaacagtacttaccatgtttcatattgaaatattctgcttctgtttctcttcctcacttcagggcaaggatctcacattatcagtctttgaccgacacagaatgcctggcatttgataaatgtttgttgaacttgaagagacatatggacaatgaatctgcaaaggtgagttgaaaccagattgtgaattttgttgaatggtaagccaaggaattctgactttttccaataggcaatgggaagccatttgatttaagttttaaaaagagtaagtctagcagcagtgtagagaatagatgacatacaaagagagattggaggaagggataccagttagaaggcagcagaaatctctcacgttctatatgtcaaaagttgaaagcataatgccatttagattaatggttcataaatttttccaccaggatcatgcctaagacacacagagtaagaaccacttcttattatctttaaccctactagtttttctcctattgatccagcacagatgtatcaagataccttatcatgccttgcttattgttcaggattgagcgtgatggtagttctggtaatgagttagtgagtgagatgggaaatagggatactagagctccagatgctgttgtagctattggtccactaatgacccaaattctaccctgtggttcagtgtagtaggaattgtcatagtatgacaataaccagcatctaacagttacatttctcttaatttatttagggagaacacctttggtcctacagttttgctgacactgacatttttctaagtggtcacaaatagcctactttttacataaataactggctagacctcgtatttttcactacagaagcctataatctaaagttgccaggatttaaacacattacttttaggttattgtctacatttatcctgagacctcttctcttcttattccaaaatgttgagatactggggagagataccaatatcatcaagccagaccaacagaagttccttcgatttgctcccacgggagttccgtctggtggaagtccatgacccacccctgcaccaaccctcagccaacaagccgaagccccccactatgctggacatcccctcagagccatgtagtctcaccatccatacgattcagttgattcagcacaaccgacgtcttcgcaaccttattgccacagctcaggcccagaatcagcagcagacagaaggtgtaaaaactgaagagagtgaacctcttccctcgtgccctgggtcacctcctctccctgatgacctcctgcctttagattgtaagaatcccaatgcaccattccagatccggcacagtgacccagagagtgacttttatcggtaaggcaaggctttgctgtatcttacttttctcaagtcatcttcccaacaaccctgttaagcctataatagcatttccattttcatgcgaggaaactgaggataagagtaattgacttggccaaggtttctccaggtaattagtgggatatctaagttttgaatgccagtcttcagaattcagggtctgtattttttaattttttgagtgcttactatgtgccaagcactttactaggagcagggtaatacactggtatgtaaaaaaggccatggcctcatagttcttaggatctagtctttctatttaatataaaaaaaaattatgggtttagctcgttgtcttcaaattgggattcatggacttattctggtatttttaggaatccgcaagtctacacaagaatctttaaattgtgtgttttcattttgataacatagttcaagaaataataatataagctgagcacagtggttcatgcctgtaaccccaagactttgggaagccacggtgggtggatcacttgaggccaggagttcaaaatcaacctggccaacatggcgaaaccccatctgtactaaaaatacaaaaattagtcaggtgtagtggcgcacatctgtagtcccagctactcgggaggctgaggcacgagaatcacttgaacccaggggaggcagagattgcagatcactccactgcactccagcctgggtgactgagtgagaccctgtctggaaaaaaaaaaaaagaaataataatataaaaatgttattgatccctgctactcaatatctggtccaagatctgcagcatcaacatcacctggcagttttttagatatgcagaatctcaggcctcacccagtcctgctgaatcagaatctgcattataacaagatctccaggagatttgtatgtgcatttaagtttgagaagctctgctccacatcctctgaacgtgactgccttataacctagagctgctactagatgtcagtgtgcaagttgtatttaatgccaattacttttttattttcattttgaaatttgccaaacctacagaaatgtgtaatagtcaacaaacatccaaataccttcaccatgactcactaatgtttaacattttgccacatttactttctcacatatgtgtgtgtatacacatatatacacacatatacaaacatacatatatgcatacttgtatatgcacacattttttcccccattttaaagtaagttgcagacatcaccatatttcacccctaaattcctcagcatgcatatcctaagaataaggaaattttcctgcataatcataataccattaccaaagtaaatgaacattaagtaccatttaataagttcatattcacattcttccaattatcttttgtaagtatatttacaaaatatcttttgtaaatgtcttttccctcgaatccaggatctaacaaagattcatgcattgtacctggttgttatgcctctttagagtcttttatgagttcaggtcgcttgtagaatgtcccaattactggatttgctgattatttcctcaagattagattcagattaaatatgttcggcaagaatactacagaagtgatattatatgttatttattacatctacctgttgctggtaatactattttagtggttcccaaactaatgagaaaagtacagaaatagactaaatacacaggggttgcattgcagttgggccaggtgaaggccagattatatcaaggtccattgtaatcaaaggttctgaagtcactggaataatgaaaaggggaggcataactgtgttattacatgcacagcatatgctagcatagacacgcccaactcaaaaaacttgctctgtggtgatcaatactgtattcacatattgagggcaatttaatttcaacaatataatgttatctatcatattaaattgatgctgtttattcatttttagttttgtatcaaatttatatagtaagagccatgaccatcaaaagtttgtacctggttttattttatacatatttaggaaactgtataacaaaaataatttgcatcagttatgggggcaccaaaaaattactttcctttgaaagaggtccagatattattctaggaaagtgatattggtttagttgtctctgtttattaggtacttatgaggcctttagcttttggcccagagacactggccatggaaatgatgaagatagtaaatgaaaagttacttggcaattagttatcttattgtcaaactattatgtaaactgcaatagttgctattgaacaggtcagagtttagtgggtggataaccactcaggcacttttgtacagtgcgtgatgacacatgccaagtacgaaccaaggaaaaatgattttctgtgctctattttatttttattggtaaaataaattcctttgtcaggggtaggcagaagccagtaggaaatttcaagagacaggtaaattattaaaagcttcttaagttatttttagatcaaatagctttcttaatttttttcttggaaaattaagatttctgcagtagtgattaggggcaaaatggtgtattatgcaggatacggtttctggagtcagaagctttaccacttactaattatatgtaaacaaattttggcaagtcagcccttctaaacctgtttcctctcctggcaaatagaaataataataatacagaccctacccattgcacaacacaggataggatgaaaatgctttgtaagctatatatgttttaaattgcttttataaaattgagttgacttccctgttttgaaatggtcccttgtaactttataagaatctaagaatcttaaactcctgggaactgtgaagaatctctttattggaactgtgaatttctaaaagtttgtattaatatattgcccagcatgtatgaaaactaggttatggtaaaataattagagcatcattgagcagtgtctgggctatactgttaaacttaatcctaaaagtgatcaaaattgaacagttgctagaaggaaactttcttttcactagatatccttttggattgtgtattatagacatgtattgcctattcaaactatgtctttggaggagctcaaagatatgaccatgggttgctaagacatgcccagatagcagcaggatgaaactgagctatgtaacttggatggaatttccctggaaagctaggccagtggcttgactggaattgtaaaactcctggggaagacaggaggggtcacccctttgcaagaacattaataacaccaccgtatctccactttcagtgggaaaggggaacctgtgactgaactcagctggcactcctgtcggcagctcctctaccaggcagtggccacaatcctggcccacgcgggctttgactgtgctaatgagagtgtcctggagaccctaactgatgtggcacatgagtattgccttaagtttaccaagttgctgcgttttgctgtggaccgggaggcccggctgggacagactccttttcctgatgtgatggagcaggtattccatgaagtgggtattggcagtgtgctctccctccagaagttctggcagcaccgcatcaaggactatcacagttacatgctacaggtgaggcgaccctgttgaaaagtgggcacagatgtctgtgcaatctcggagtgttcagcaggatcccacaacacttggtctagagtgcagagcacagagtcttggaacagagtgaacttaacatacttttatgatggccctagcgatgttcctggccaaataccatgggtctcctttagtcagtgaatggccacattcactgatacttcctctggaagaaactatccacaagtatatggaatctgagagaatgcagttagtctgattttattcaacaagtatttattgagtgcctgttgagagtcgagcattgtgggattcagcagttactaagttacctgagtttacattgtttttgaagggagacaaacacaagtcaataaataacaatcaaaacaatttcaggagctgggcatgatggcacatgcctgtaatcccagctacttgggaagctgaggtgggaggattgcttgaggccaggagttcaagaccagcctggacaatatagtgagaccccatctctacagaaaattaaaaaataaaaattagctggacatggtagctcatgcctgtggtctcagctacttgggagtgtgaggtgggaaggtcacttgagaccaggaagttaaggctgctgtgagccatgattgtgccattgcactccaacctgggtgacagagcaagaccctgtctgaaaaaaaaaaaaagagaacacagacctactgacaatcctcctgcctcagcctctcaagcagctaatataatggtttgactggaattgtaatatatatatctaatatagctgcttgggaggctgaggtgggaggattgtttgaggccagaagtttaagaccagcctgggcaacatagcaagaccctgtctctaagcacatacacaaaaaaatacaattttggataatgttaagtgctatgaaaaaaacagagtaaaatgatattgcctggaggatgggttggtggggggtgatgattttgcttggaaccagaaatatctaatctcttcagcccttgtgctcttaagtcatttgttcactgtttcagtttctgcaggtctaaaatatgattaggaatttttaacacccaagaaaaaagtctttgctaagtgatccagatttcccacaccattgattattcacctaggatacatatgtcaacttttttttccctttttttagacagggttgcctgggctggagtgcagtggcacaatcacagctcactacaagcgatccttccacctcagccttccaagtagctgagaccacagatgtgaaccaccatgcccagcttttttttttttttggtagagatggggtctcactagatactgcccaagctggtctcagactccgaggctcaagttgtcctcccaccttggcctcccaaagtactgggatgacaggtgtgaatgaccgtgcccagcctactgttaatttttatagccaaaaaaatgtaatcttttgtcccagttctaacacatttttttacctttatgtaacttttaattaatgacatacacattctctgccaaaccaattttctttacatatctctatcactcataaatgcaaactcagcaccttaaacaaatccctcccattggcagtgaatgttttaaaattctgttattcatgttctgttggcttttccatgggacgtcacaagctgactatccaacttgcttttaacatttccttggaaaattgactcttgcttgccaacagattagtaagcaactctctgaagaatatgaaaggattgtcaatcctgagaaggccacagaggacgctaaacctgtgaagatcaaggaggaacctgtgagcgacatcacttttcctgtcagtgaggagctggaggctgaccttgcttctggagaccagtcactgcctatgggagtgcttggggctcagagcgaacgcttcccatctaacctggaggttgaagcttcaccacaggcttcaagtaagacaaataaacttactcactttgattctgggagatctgccaatttcagtactttttgctttttggaatcaagctcaagaggtagaagaacaaaagcagcagtgggcagaatggaaagtcctaaaacgaatacagtttcacctatctagagatcccagcattcttctctttctaattagtgaagagaggattagcacagctttacaggcattctttaaaataatccctagttaagatgtagatgcaatgtgttgtcacgttgattaccaaggctgattcagctgatccagctggttgggaagatatccccttcctcctttagtattttatttttagtattctgtattggtccttcctgatgcttgtacttcattgaataagacagctgccagatagatgggggagtgttaattgctcaaggatgttctcagagtttggcttccctgctagagtattctaacaaactgaagatgaaagacattgaaatagggcttccggctgggcgcagtggctcacgcctgtaatctcagcactttgggaggctgaggcgggcgaatcacgaggtcaggagatcgagaacatcctggctaacacagtgaaatcctgtctctactaaaaatacaaaaaatatgctgggcgtggtggtgggcacccgtagtcccagctactcaggaggctgaggcaggagaatggcatgaacccaggaggcggagcttgcagtgagccgagattgcaccactgcactccagcctgggcaacagagcaagactccgtctcaaaaaaaaagaaatagggcttcccagttagaggtagctggcttctttttccagactctgtgattaccttaggagccaggacaactgactggttacgtgtcagttaggttgcaaattagtctggacactcagttgtttacaagtataaattgtcatcaatgcacaaatgactcaaatagcaaatcctcaaatgtggtctaaatggaattaggtcatacttttaaaagtgttgggcagagagcctttcactatggaagaataaccataagagaacagcattgctagaatacatagagagatgcgagggccaaagagaaattgttgcggacttcgggaccatgtctcttcaaagaagaccaggtagagaactgctgttagcattatgtagtgaccattaacttttcataatgcaagagatgaccagagacccaaacaaaaggcaggaaaacaagatggccccataaaagaaggaaggaaggacaggcaaactaaacaactgaacaagtcctgtggttgtgcatgtctttgggctgtgagacaggggatctttccacctgcctagtttcacttccctggtttaggggaaatgggggtgggtgaggtagaggaaagaaaggtagaagaaatggaaaagaagataatcagagctggtaattttttgggatggttaactttttgaagcagagagtaacaaccatattctccagccaagtacagaatcagagtgaaaactgagctcaaagcatattagttggttctgagtgatatatttactctttgttctacacttggctacacatatacacttggtgtatgtccatctttcctctgtttctaggtgcagaggtaaatgcttctcctctttggaatctggcccatgtgaaaatggagcctcaagaaagtgaagaaggcaatgtctctgggcatggtgtgctgggcagtgatgtcttcgaggagcctatgtcaggcatgagtgaagctgggattcctcagagccctgatgactcagatagcagctatggttcccactccactgacagcctcatggggtcctcccctgttttcaaccagcgctgcaagaagaggatgaggaaaatataaaaggaaaagagggagatgttttgtccagacctactagacccaacagaaaaggtttttgtattagaatctgtttccttaaaaattgatttgactcctgttcttaaacacaagtggtttttcctaattccagaggaactggacgtcaccaaacaaggttgcattttacttttgcatccagtttttatagttttccacaaccaagccacccttcacagataaaatatgatgctggcatggcaatcagaccaaagcactgtccccaattgttgtcttaactatgactagacatgttatacagccatttatcttgtacaactgagaagaatcatactttgacctaccttgtagagatgtgaggatttagatgtttgctaacttcaaaactgtgcttgaatagactaataatatatgctcatatcagatgtcagttttcatttaacttgattcatttttggctcaggtcattgggaacccattactaatacctaacaggaaatagctaaacacaacacaccttatctattagtcaccttcttaaaactgtttttgctacttttgaagtgtcttatttataagatcagaggtctgacaccttttttgcttagacagctctctatctcatccatttattttcttctctagacttactccatctctcctcatccttttgcctttgttatttctgctcggactcacatactttcaccatatacatattttcaattgtttctttccttttctcctttgtgagcaaagcaaacaagtactgtccaaggacagccttgtgcatatttcatttgttgcatttgcttggtcatcagaggacagcagtccattaagcacactttgctgcttctactgtaaaggcagcctttaaaacatagcaatatgcacctttcaactttacatcatgtcctgaacaacatcactgtggttactcatccatcagactatctgtatatataagtactgaatcagtatttattaagtaaatgatgtagcactgtagtgattaggaatcattagcaaatgtgttgcttcatgccttggtgatggatgccagcatgttaaactgctgaagtttgattttctgatgcaaaatatatcttgtaaaatttagaccactcctttaatgcagaccaaaataaggcacagctttaattcattattgaatgccttaaatgtcccaggtattgagaataaatgaatatgatacaaatgaggttatagtttaacatataattttaaatttgccaattgtaactctttagcacatttctctaaaccctttctgtcacagtcttttttttaatttatttatttatttatttatttttgagatggagtcttgctctgtcacccaggctggagtgcaatggtgcaatttcgactcactgcaacctctgcctcccaggttcaagcgattctcctgcctcagccacctgagtagctgggattacacgcacatgccaccacacccagctaatttttgcatttttagtagagatgaggtttcaccgtgttggccaggctggtctcaaaactcctgacctcaagtgatctgcccgcctcgggctcccaaagtgctgggattacaggcgtgagccactgcacctggcctctgttgcagtcttatcttcattttcctttgtttataatgaaagtggcgattaggcagttagtttccataaagtggccgtatgggaatttagttcattcatccagcaaacattgagtaccaattatttgctaggtcctgtgcaaggaatacaaaaatgattaagacttcttccttacccttttggagcttgaagcataaggaagacaagttattctgtaaggaagataaagcattcaaaagtactacagagaaaaaccaagtatgcttgagttttgcgaatgttctcctcttaaagaatagcttcaaattttgagaccagtggttcccactaagtatagaacattaaaattaatactttataataaaacacttttattgctgcagaatgttaaactgcataacaggcaccagatggtcaagacgagggaaatatgagaaggcaaatgatgtgaggattagtatcttgagattcacctggtctggaattatgtcataggctactatgcatcagaatcacatggagggctttctaaaacagactgctcagcccacccccagggtttctgagttcataggttataagaggtaagttgaacaattccccagatgatgctgatgctcctggtccacaatgtgagaaccactaagttggagtactgactcatagagataaaattctttgaaagaaatgtactgttttaagatactgtaaaatgtggaggcagggcaaacgtttataagggctgttatgtatgaaatgtgcctctgacccaaatccacggactttgcgaaaatcaccaaggagactttgcattaagttcagagtacaatacaaactgggcctagctctgtatttagtcagtatgtgcacgtgggaaactttagtaaaatatcacctccttattgagacaagtttggacatctggccttaagcctctgttgaacaggagaagtgaagctgtttgcaattatataattttctaatttgaaatcatgacaagcagtcttagaacaaagttaaaattaaaaagtctttatccaagtcaccaatgaa

SEQ ID NO: 689 - DNA, 32742 bp, Homo sapiens
  source 1..32742: mol_type = other DNA
gcggccgcccagagcggcggcgggggcggcggggcgcggggcgcgggggcccagctgagccggccgtcggagtgagaccctgcggcagagacgacggaggcggaagcaacccgatcccggaggcggcggcggcggggggagccggagccgcctgggatgttcagtgagtgccgggagcacgggcggggagggccgggagggtcgcgaggcgcgcgcgcgcgcgggcgggcgggggccggggcggtggggcctcggcggggcgcgccttggctcccgccggcgggcggtgggggtggggcgcgggaggcggggctggggggcggcgggcggctctgcgcgggcgcgacggccgcgcctccgccctcggcctcccgagtcccgggctgcggccggcggcgtggcctgcagtcggcggctacacctggactggcgtcgcgttcctgcgcaggggtgggtcctgcgggttggatgccgggctcggggaggaggtggcgggcgcccgcggggaaggtatcccagtgcccgacagccaagcagggagcacggctccacagctcctttgcatgtaggggaaaaggaaatgtctttgcggcgaagtcgggattcaactttgcacatggtgatcgtgcgtgggtgggtgtggagtcgatctccgcgtgtgacacgggggagccagagttagactagctgctgcaggagagtgcttacctgcaagggtgtctctcggggctcgttgcctcatgacagcaaggtaaggttggtgcgcccatggtgtgggacgggttcaccacctccagctcgcgaagctgccaggcttttgaaaatgtattcgataaggcgttggtccgaagtgagtggatggttagaaacagtggtgtcattttagacttagcggaagtggagtgcaggaacgctacatgcagttctcccatcagttgtgaaagtcgttgtaatgcggatctcgcagtctttgtggttctgggatcagaaggtaagtgccagtcccatgcagtgtctgtcttaaattactgtacctaaactgaccttgcagattggaatctcggaatggtgactcctgctaacaagcagttgggagctgtgctgagaggaacattaagtgcggagcgtgtcttatatcaggcgattcaagtgtgccaacacctgagttggggatgtaggggaggacacggaggctgtgccccagttcctggtcacagctctacttggaagggggagtaggaaagggagttttgtgcttaataggttaaatgcatctggccacatctttaaactttggaacagcataatgtagtggatagagcttggtgacagtagacctaggatggaaaccatgtagccatctgcataacctctctgaactgtagtttcctcatctataaaatgcgatgataaggaataacttaaacgtggatttttttttatctttaagagacagggtgcctctatgttgcccaggcctgggctcaagcagtcctcccgcctcagcctcccaaaaaacgacctttttaaaggtacccagaaaaagaatgatgtgtatgaaaatagctaaatgttagctattatcgtttcctttttggcaaaataccttctaggttccctgtagtcctaagtttttgcgttaaatggaatatatgctaattttttaatgaatcgtaaattcttcctgccttaaaaatcagcgctaagctagaaaattaaaaggtgggcttgttttgagtatttttctttgtcatcaacaacaaattaaattagtgtatcttggaatagttttgttgctcctgcctgtaaatgtgaggcttatgtgagcttctgtcactgtgaaactaggtaaaggcctcacttaactactcagtaactggtttttggttttgcaagcaatatattagcacctgtgaaggacatctctggggaaagaaagggggttttgtttctgctaatttgttttgctggaagggagctctaggggtcatctgttaaaccagtattactcagtggacagtactagaagtcacgtttccagcctgtcttgtatgtgactggtggcttctcaggtagtaagtgttctgatcattctctcagcaagcttctagtaagcattcattgttgtgctccctcaggaagcccctggtcacatgtagaatcctttgagcagcaagatgctgtagaaggtgagagctcagacccttcagccaggtgtcctgagttcccatcctggcactgtgtaacttctttgcgcctcagctttcccatctgaagaacgttacctacctcataggtttgttgtgagcttaaagaaggcagtctatgtaaagcacttaattttaaatgctttaagtgtcttagcgtcgagtatgctcagtgttaagtattcgtagtggtagtgtatgaaacagacaagaatagggtaagttctgtgacagatttgttcctgggttcgtgtgtggaagggattgtgatcaaggaagcttttgggaggaagacatggctaagctgagctgcgaagtgcgggtgggatttagccaaaccaggttgtagtgccagtgtggcagtgcctccaactactggagggcccctgaggggagaaggtggagtgggacccaccagtagagtaagaagaaccaaggattggtccagtgaggtaaacaggcagattagagcaacctggaaatgacacagtagacactcaatttttctatccttcacactagtggaggcagtagaaagtattttgttttgttttgttttgtttttggagacggagttccactcttgttgcccaggctggagtgcaatggcgtgatcttggctcactgcaacctccgccttccgggttcaagcgattctcctgcctcagcctccccagtacctgggactacaggcatgcaccaccatgcctggctaatttttgtattagtggagatgggatttcaccatgttgaccaggctggtcttgaactcctgacctcgggtgatccacccacctcagcctcccaaagtgctgagattacaggcccgagccaccgtgcccggcggcagtaaatgtttttaagcttagcagagataacatcagattagctccttggaaagattgtgcctatagtagtatagtattatgtttaaagtagggccaggtgtggtggctcatgccgataatcccagcactttcggaggatcacttgagcacaggagtttgagatcaacctgggcagcgtagtgagactccgtctctacaaaaaaaaattttttttttaactaaccaggtgtgatggtgggcatgcctgtagccccagctgctgaggaggctgactcaggaagatctttgagctcagtcaaggctgcagtgagctgtgattgtgccactgcactccagcctcggtgacagagcaagaccttatttcaaaattaaaaagaaagacttttatttttattttattttacttttattttttattaagataaagtcttggcagttccctatctgcccgtgatttcaaaaggaaaatggtagtagagttgggcattttattccaaatctcaaagcttagacagcacttacagaaagcatgaagaaaccaggcagccttccctcttaaaaattatcttcaagtatgtattgtatatgcttgatcacaagcaaggttttcccccaaaagtctcatgtttggggctcccctgttacagggcactctttctcagtctattttgaacaacaaggtgctgtttgggaaggacataatgggctggaacaactggagcaacctcagctggtgctagtttgggatatttattcaatcttaccaaataagtgaaacaaaaaaataggaaagattcagtcattaagtcattcttcctgatgggggtggggggtatcacaaagtgcaagtgttaaatgcaaaacataatgtatgtataatatatatacacacacatatctgtatatctatatatatctatctgtatagatagatagatagatagatagatagatagatagatagatagatagatgatgatgaatgaaaagaagttctgctcacccgaacaggcattgatggcttgggttgagatttccagcaggagtatatggatttaagacgtgctttattgtaactgatttagtagatgggaaaggtaaagtgctctggaaatggaatttgatgattcatagtggcttaattcatcacagacactggtgtttaagatattcatgaacagttggagtgaatttctttagtgaattaatatattgccttatatattttagatatgtgtaaattaatagagattatagttagacatttgattttcatctgtaaccctcagagtttctctttttttaaattaaagttgactaaaatgttttctttttaattttcttattggtatggtaaggtagtcataggtttgggcttaccttttagttggacattttacagaaagaaattagctgctgtttctccactgaagcaaattgtctttttccttcctattttttaatttacagaagatttgaagagtgttgtatattgtcagtgtttagaaaacactataaaatacttccatttataattgtttagtagtcaaagaagatatcctcccagtaaggtgtatcaaggtggatgggtatgttaataacttcacaatgtttggcaataataaaaggtagctgtgtttttaaaacaaaatactaacttttggagactttgtcattagtaagcagaagtgttatgcaaaactttgtgaattaacttttttaagccaagatgctgatgcattagtttcaccaggtaatgtcattctgtagaactctgttgtccaatacagtaatcattggccacttatgactacttaaattaaaattagttaaaacaattcagttccttagttgcactagtcatattttcattgcccaattgccctgtgtggccagtgactactgttgtgaacagtgcagacttacaacacctccgtcgtttgccaaaagtcctcttggacagtactgctctggaatgaaaaattgaagatcattccatccactttgagacacacacacacacacacacacacacataaatgttttaatgaagcgtcttcaaatcctcatgtactgcatttgaattcagtttcaggaacagtgataagcatgggaaaacgtcttatcccttattttgagaacaggacatcctatttctgtctgcagtggtgtttgcaaatagagcatttgtgaaagttttctttatgtagtcaagcatagtaagtaatgtaaagagccattctgtagattgtgccacactcttccatgttaataagattttgtatagaaaagcagtttttctgtgctgtaaaacagtattaaagtagaaattcaaaaagatcacgagcttaaaataaactctcaagaattccaagaagctagatagcactcacgttatttttatgatgagtttcaaagataaggcctgtcctcagggaactctccatctgtttaggggaactgaggaagagtgatggcaagaggggacaacctgcatgagggttggggtgatttaggcttggttgtaacatcattagatttgtcatgtactttggctgcttttcaaagggccatatgaggagggcctaaaggtggaagaatattggaatagtccagttgagaagtgatttgtagagtcgggcatagtggcatacacctgtaatcctagctacctgggaggctgagctgggaggatcatgagcccagaggatggagaccagcctgggcaatatagccagaccacttctctaaagagagcgagaagcaatttgtgctgtcaaatagcaaacagtcaagatggggtagcagaaatggttgagttgcactagccgcaattttttttttttaagttgagagagaattcccatttagaataggagttggtggcctctttgaagtaagggagagagagaacagaattttatcatgactggctttttggttgttttgttttcttttgttttgtttttgctttaatggtggatagtggcaccattaagccggctaagaaaaccgggagaaggaagaggtattgcaggtggaaatgtctgttaattgactgagttgaggaaggtggtctgactgtaagtcttgcatggtggtgtggtgaagccgggaatgtgaagaagcagtggcagacagtaatgggagggcagagccacaagagaggcttgcagtgggagggaccaagagagtttcaagtaggaggtgagttcagcagcatcacatccagctgagagatcgtgaagggtggtgctggaaagtgactggttagatcaaaaagttaaggaatcccaagtctcagtagcccactgaggtcagaagcagggtcagctggctgggtgaggagactggtgaaggtttagaatagcgtaggtggaaggctgtagggtaagtagttgatgaaacaagacttctggaacatcatggaggtcccagctgatgttggagaaaatctacttctcatgacatctgtttgctggatttcgtgatttccacctactttctaccactgctgccatccccaccaaaacgccacattcttcactgcgtcctgagcccagctacggccttatccatgtgccattttatttcttaggacaccatgggaaaaaacacagcttctagttcaagtgtatttatgtcagtctgagcaaagattgaatatgaaaggctatcataatttttaaattatatgaggtatgactgaaactgaaagtagtatggctcatttatttttcagttgtgatttatattttcacaaagcttattgaatacactttatcatgatgattaatgcaaagctagggctttaggtcctacttagactgatcttttgatgttacaaccatttagttgctgtgagtgaagagaactaataacttgagttacctagtagacactttacaaaaaaatgcaaaaaaataatttttttcttctgttataaacataaatttgccattggaaaaaagatacaattactcaaaagccaacagtcagaagtctcagttgaagagctgatttgaggattgtgtagtgagtttgcctgaatttatcttgaactcacccctactcaaaactgccaccttattggggcagggggagggatgggggagccaggtagtactcttttggcatttcgtggaactgtgtagtactttaacctgtgatatggtggatgagggtgcctcccagccctcctctaccgaccgtgtacattagagcctaacgggggtgggggtggagggataggatgcagcgtgtaaccactgaagggattgaccagactagagttccacactgacagcatcttaagaggatgcctgggttccatgtatctccacctccccatgtttctgtagttgaatgttaagtgtggctgtggttttccctgcagagttgttacattgaaatgatcatgtgggattttatatagcaacttggttgaagtatctggcaactgttgatacatgagaatagatatacattgtgtcaaaatcctccagaaatttttgatttccagaaataccaatctggcaactgttgatacatgagaatagatatacattgtgtcaaaatcctccagaaatttttgatttccagaaatatcaataatgtgatatgaagagcagagtatttgacatctgtttttacctctgaaagttaagtattttatataaattgaaaatgatgagaaattctgaaatgttaacaaagagtataattatatttaaatccaatttcagtttgaaagattttataattataggaaaagctaggcaggtaacgaaactgcactgttcgtctcatgtatgagtctctccagagacttaggtctagtttaaggagagttttttttcttcacttgtccctttttggatattagtactctggaaatcagtctgggtggaggggaccgatttatctcaggttcattaattatccatgtcacttgaaatatatgtacattggaataaaacccagctgagttgattgggtcgtgtctctagtatttgagtttagcgtggttatgcaagagagtcattgccagaattcctgcccttaagatccatggccatacagttgattcaccacccaccctcagggaagcgcccttatcataaatggtagtttggactcagagaaattgctatttggggcagctaatttaagcatatttgttagaatcagtattacagactagtttctagcaatcttaaatatggtcagtgttgactatcattcattcttactccgttctgtttactctttcctaacttcacatcttttcccttcctcctcagacacataggtatattgtcgcaccttgaggacactgtgtcattgcagagcctgttctccagatcagtcattcacatgtctttcacatgcagagttttttcctgtcagaggtgatctaagagatcgaggcccatctgcctggaatgctcacggatgtgcatcaatatttgcatgcattcccaagtcagcaaaagatcggcagtgtggaagccggaaagatttcagtctcagctagagtagggaattgggctgctttgggaaagcccgcagagtaggagatcttgaagttagatgaaaagcagctgtagcaagtgataggaagaggcactggttggattgactcgtcttgactttgggccacacgggaaaggacagtactgtcacagcctccgtgtgcatttaacttttttactctaaatataacacaaccagaatctgcagggctgaaattatttatatacatatccacacactcatgggattcttatgtatagccaggttggaggatcactgatagagcagtgctgatcagtggccacagagaatgggagcagggaccccactctcagagtatcagaatccctgtattagcaatttaaaaaaacagcttaattaaaaagtaacctaagtcatcaatacagtgagagaataatacaccatacccaagcaaggtaaatttcatagtgagaagagagttcagtatttggaaatttattattgtgtttcattatgtcactgattcacaaccatagtgttccttctttttaacaatcacacacctagtaccccttctttgtaacaaatattttgaactctttggcaacctagaaataaaatgcacagataatgtaatctttctgggcatatagtttaatatatatataatgtcctaacattttatatttacatgtatatatacttgtgagtatgtctctagccttcacagtttgctctgttgtatgacttgtagggaattgaaaagtaggtcttcagagtatatttttaaagggctcccacaaatcagtttagaaggaaataattacttgcaaatggtattgggacagtgtgttagctacagtcactgggcaaaacatttgtttggttattcaccacacatacactaaaagaaactgcagatggacgaaaattagatacaaataatttttttatgtttaaagaaaaataagaccaggcatggtagctcatgcctgtaatcccaacaatttgggagactaaggaaggagaattgcttaagcccaggagtttgagaccaccctggacaacatagcaaaaccccttctctactaaaaaaaaaaatataaataaataaatagacttccggaaaaggtggaattttacatcttaaaaaagaatggaagagcaggcacggtggttcgcacctgtaatcccagcactttgagaggccaaggcaggcaagtcacttgaggtcaggagttcgagaccagcctggccaacatggtgaaaccccatctctactaaaaatttaataattagccaagtgtggtagcgtgggcctgtaatcccagctactcgggagtctaaggcagggaatcacttgaacccaggaggtggaggctgcagtgagctgagatcatgccattgcactccagtctgggtgacagagcaagacactgtctcaaaaaaaataaaacaaaatgaaagaatggtagaactctcaaaggaaaatactaatgcatgtaactgaaactgagaacttaaaacacatccaaataaatgatcaaaaacagatctcccacacaaaacaactgggaaaccttgatttagagaatgttactttggttgggatgattgtgtgtgtatgcgtacatgaaatgcattccaaaatggacacaatattttggtcctggaggggaaagtatgttttacatgacagaagtgaaccccaaaattcatccagctgtcattggtcatctggactgcagtatttatttctggcaaagtagtgtttgaggccatggcaatactaggggttcctgtcattgttgataataaactcaatagtcaaaggaaacagtgcctcttttttttttttctttttcccttttctttttatttttgtgaacctacaaattagcttgaattattcaaaaataatttacttctgttcaggtcacttcctaccactttcctttcttacaggaatttatgagacatatgctaacacatatacataccctcttagtgttgtgctgcctttctatacctgtggtttaaataaagagcaaaaaaggtaaataatattatacaattaaaatgaaaacacggccaggcgcggtggctcacgcctgtaatcccagcactttgagaggccaagccgggcagatcacaatgtcaggagattgagaccatcctggctaacacggtgaaaccccgtctctactaaaaatacaaaaaattagctgggcgtggtggtgggtgcctgtagtcccagctacttgggaggctgagacaggagaatggcgtgaacccaggaggcagagcttgcagtgagctgagatcgcaccaatgcactccagcctgggcgacagagcgagactctgtctcaaaataaataaataaataaaatgaaataaaataaaatgaaaacacattttgcaaatccctaacttagagctggcagtcttttcctggctattaagcaaaaatatcacaatccccttcaccattgttaacttcatgctttgttaacatctatttatccagtttctgtggtctttgatttggcactgcctcctgcctgcttttttggctagttcactgctaattaacgcctctctcacagagtaggcaggagaaatcaaaggccctaaatttcagactggccctgtttgctctttgttagcttctctaatgaaaagtttcatggggctgattggaatcttggtattaaacagagtttgggggtgatctaaggactttattatcgatgcttttcctattttctgtaattgaagttggctgtattgtcattggagaaacagacaaaatggaagagtataccacgttggtattagggaacttagatttgcgtcttaactaggccacttagccacatggctggtctttctctcccatgtgtcctacccatctgcgatggtgcagttagataggttgctctcccaggcccctgatgtctctgtatcctgtcgttgcctcccttgaaggtcatgaaacgagtgcgtaccgagcagattcagatggcagtgtcctgctacctcaaacgccggcagtacgtggactcagatggtcccctgaagcaaggactgcggctgtcacagactgctgaagagatggcggccaatctaacaggtaatggtgggggctcgtctggtggggtgagcctggagcaggagaactcacgtcaatatccatgtggaattacttctcctcttctcaagacagtgccagagagagcagactgaccaaaaacctcagtgagctacgttaagtgaatgatgttggcctcagagaccctgtctgtcatttagagcggtgctcacattgtcacttctgataacctctgtgattcccctggctaaagtcatttccttcctcaggacttctcagttactttatctgtacctgaaagtacgtgcaactttttccttctgtaaacaattaacctacaagacccttagggacagggtctccctctgtccccttcttgcacaggtcccctctcctccagcatggagcctcacatgtagaagtcaggtttgttgaataaattggtacttcaggatctgtagttggaaatattattattattatagacacattcctgaagtttttttaatttgtttttgttttttaatgttttgaaatccgattctattttagaaaaacttgagttgactccatctggattaataagtatagtcatccctcagtatccataaaggattggttccaggacccctccatgaataccaaaatccacggatactcaagttcctgcctgataagatgtggtataatatttggcatagcaggttacatctacagacatcctcctgtattctttaaattgtctttagattacttataattcctaatacagcctacatatcacctcattcacatggattcatcatagtattcagcacctggtaaattcaaaatttgcttcttgggactttggtggtttttttccccaaatatttttgacttgcagttgtttgaatccatgaatgtgaaacccacagatacagagggccgactgtaattgttagctattttgtgagttcatgtttttatgtaatatgactttatgactttcttcttcttcttcttctttcttctttttttttttttttttttgagacagagtctctctccatcacccagactggaatgcagtgatgcagtcacagctcactgcagcctcaacttcccaggctcaagtgatcctccatctcagcctaccaagtagcttggaccacagtcatgcacaaccacctggctaatttttttttttttttgcttgttattcttgttagaggtggggtcttaccatgttgtccaggctagtcatgacctcctggcctcaagtgatcctcccaccttggcctcccaaagtgctgggattacaggtgtgagccactgtgtaacaggactttcttttactgaacttatttactagtgattctgggggaaaaaaattgctgggatactttagggtgattataaactacttcaatggctgtgtgtggaggtggagttagcagtgatttctgcagctcagccctggttccctttcttatatgctcaggctacattcttctctcttctttgttcctgggctttctgtgatcttccaaatatctttcaccacgtgctccatttcttaatggtttcatcctccatcctagtagccgcagttacctcagctccctcttttcatataccttcaaagtcaaggacccagggttcattgccataggaagagagtgctaggacagtaacaacctgaggatgctctcaaaggagtggttcctgacttcctctgaaacactaacagaagcccagtcagcagcctgccatcacgtatttcagggttggatccacccattattccttgccttcaaactcctcagagatacccttgaccaaaacagggccagatgatggccttggtatagaatactaagtgccttattgtttgaataggggagtccatttacaaggcctctgtcccattgtagagtaattccttctgaacatgccatcctagccatttaaaaaatctgctgccctgcatcctttggaaccagagagcagtaattcttgctgttgttgatagaaagtaggaatgaacaatattaaacagacttccagaactttgctcgtctaagttgtcttagtttcaatagaatagcttattaggagaaagtgttattgctggaaaaccaccaggaaaagtgagaaacatgaaatatgattatcagaagattttgtcctagatttttccattaattgagtaatctgaagaattcttttttcagcagacatttagtgaacatctgctataggccaagtgctgaaaagttctagagatagctacgatttgaccctagctctgagaagctaagtgttctaattgggaagtgaggcaggtaagtcagtgattgtagaagagcatgaggtagtaagttctgtgagggggaggttcagtggtagcagaaaagatcatccaaattaggctggcaagccaaggaaggatccccaaaaggccttgtgattcctgacatatagttgggggtcactaaatagttgaaagagtgagctgagttgcaaaggaaccattagatgtttaccagggaacaaattggaggagggtatccaggttttcaaatgtgaattttagaaaactcagtctggtggcagtattgataaggcagcccagattagaatcgaggaaactagttaaaagacgcagtccagtgagaagtgaggacagcctcagttgaggaagtggtaatgggagtggagaggagaggatatattttaggaatctgtaggacttagtgacagagtaactaagcggggggcaagaagaaggaggaggagtccctcccttgcatgcaggcttgcagcaggtcctctcttctgactgtctcttccttctcctggagtaggttggctttcctctcacctgtgtttccctttctacgtatttcctgttatggcgccctcagtcctgccacattcatcaccatttctccatccatattccattgacaaaatgcattcatgtttcattcaggacgcggttaaaggtggcttcccttggtttttagccaccttctttccccggtgttccccactcctcttgtaaacaggaggagaatggtttttgttttttgtttttagaaagcataaactcacagattggagattaagtgtgtgtttacatactgaatattgagactccagccttgtttcccctgcaccaattcatatgcccggaatactgcagccaggcacacatgctccaggaaggcaagtaaacaatccttccctggtgagtccaacttgcccaagaagaaagacgaaaagacagtgatgttgggacattgctcaccctggtcaccctggaggatgagcctcaccacccagagtgcctcaccgtaagacagccaggggccattgaaccctagaagaaacatatctcataagaagggcagatggaaagaaacagaagaaaacttcaaaaataccttgttttaaatacttaagattcaaaaagcatagcgtgtttaggggaaaagagaatgttgagaatgaaaaaagttaccaattagatacatgatagtaaaaaataaaaactcattaggtattataagtaatgtagggggaaatagtagaagggctgaagggtgaggaaggctttcagaaagtagagcaaaaagacaaagaaatggagtaataggagaaaaaaattaaaggattggttcaggatatccgaccttgaaattgtaggagtcttggaagatagggaattatcaaaatgattccagaaaacttcacagaactagaagacatgaatttccagattgaaagggcccactaagtgcccagcacagtgattgacaatgaacccacaccaaggcacctgtgaaatgtcagaacataggatcaaacatttcctgatgaatctcatggattgatgtacctgtcctctctcattcaccttatcctgtgctttatgcctttccttccctggccttcattttattgggcttcaggagggaggggagagaaacaagtgtcatcagtctgtcatgtttaaccaggacccagcatgctttggaaacctgctgaaatgtcagttgctgtgcgtgtgtgcacaacaccctccttcacccatcctgccacgtactgggttaataatcgtctctctgtttcccgccctgacttgtgtatcttctcctctttagtgcaatcagaatctggttgtgccaacatagtgtctgcagccccttgccaggcagaaccccagcaatatgaagtacagtttggacgactgcggaattttctcactggtaagtactcagctctagaaccttttctttttaagaaaacagagtaatacagaccaactttgggcacactgcttgtgagttagccctgctccacaaggagcggtaaaaagaaaaattaaaaaatagagtaatgcagatttccctcagaaccaactatattccacaattggtttgaggtactagggattcgaaggtactcttaacacagttcttgcattcaaacttatggtctattggaattcctgaagagttcaatcacgaggtttaagtttacaagggcagagctctgggtgtttattcactgttttattcatggccttcagcacagtgacttgtgacttgtattgaataagtaaaaactgtcagctatgcagagaagcatccttaaatacagcacatttgaaatgtacatgacatctctactaataatatagtacatttcacaatggtctttgccccgtatttccaaaagtgcaagtaaatagtccttatgaatgaacaggcaaaaatgctagaagttgtcatttagaccagtttttgagtggcagaatgaccacttgagataagaataaaaaagatactgtagaacattaggaagaaaaacattaagagccccagaagataaatcggaaagggatgtgaacataaaaatttacaccaggataactcactttagcaatcaaccgagtgtattaatacttcactgcaaaaatcattacagttctgtagcaataaaattatgccattgagtttattttattatacacctatgcttcagtgattaaaaaaatacaaaaatgtatgtaatgtcattagggtcatctgagtgtcactcataatagaaataagtcatgaccatgacaagagccatctcactgtcatgagtcagaatataccactattaaaattatacatttggtgatttacttttgtgtctgttttcctcattagactatatgctccatgagggcggggaccatatcaatatatcttaggacaatatctatcctggcatgtagtcagcacttaacataaatacaggctgaacgaatgaaggagacaggctcaaagaagccagataatttgcttctttttcttttttttgagacggtattgttctgttgcccaggcaggagtgcagtggcatgatcacggctcactgcagccttgaccttctgagatcaagtgatcctcccatctcggcctcctgagtagctgggaccacaagcatgtgccacaacacctggctaatttttttaaatttttttgtagagacagggtctcactgtgttgcccaggctggtttcaaactccaggcctcaagcagtcctcccatcttggcctcccaaagtgctgagattgtaggcacaagccaccacacccagccaagacatttgtttctaaaccagcttccccaccactagtatggtgaaaataaatctgtcatggagagattaatatcatatttttttaactgagtaaaataactttctaaaaactgagttaaatttttctgcaagttgcttaaagcctcagaaaccaatgccaatgataaaaaatatctctaagttcttacctctcaatgaaagaaacccttattataaattcggtttttctttttttatccttagtggaaattgatcactgcactgaaatatttaagatttatatgatatgcagaattaatggaacttcctttttttcaaacataatagagtcattttactaaagccttaattttcatgatttttcgtttttgtaactattaaacagactattctctacttatgaattctgtcacccaacaaccatgaaactgataagataaccccactagagggttttattttgtaacccttatttcctgtaatattttgaccattttctccaactgtagactatagtaaatatagattctttgctttaaaataccattatgggggccaggtaaaactaggataattctatgcgtgtgtaaggccaggtgtattattttggtttatatattgattactgtatactcgtcgtttaccattaaaaattattaccacaaggattgtttggccagaactttacatttcaaaagattatagtctatcaaccatttcctttaagttcttactttatttctgaactgagaaagttgtctgttattttgtctgtaatttgattctttaatcctttggtttaaaggatcattattttaaaggggttaatatatattgatcactttggactgctgctcctggaatatttttctctaccctcaggtctctgaagagcagttaaccaaatcaaatgaatagttatttcctgatcaccaagataaagtgtaagatatactcattaatctattttagaagcagtcctagcataaaaacactataggtaaaagtttttacataaaatttgaatatcacagaagcactttcacagaccagcatgagatcaattgctgaatcatataggaattgcattcagaatgaaaggagaaagtgatttggttggcggtagtcagagaaggctttactgagcaggaggtaggctttaagtcagcacttgaaggatggattgagtttcagtagactggaagaggaggaggaagaggagtaatttgggtaagaaataacatgagcaaaaaggcaggcttgacgactgtacaggaacaactaaggctttgttgtgaatgggggtttcaggctggagatcaatgaatattagtctgaaagcagtttgtaaaattatttgtaagaggaatggcagggagactgactgtgaattaaagtgcttggcaatcttgagaaatgaggtgagaaaggaccagaatttgacagcattgtggaactggaaggcaggagctttatttcatagttaaattaccaaggtggaatctccaaggctcaggagtaaaggaggaagaagaggtgacgatggctcaggctttaagactggagtggagatgaagatttattgaaaataaataagtcagaagggtttatgtttgttaaattgtcatgacagtggcatcctactgcatagcttgcagtgggaaatttgaggctaggatttaggagaaagataaagacttgtaataaagaacatgtagcatcagctacatggagatgcaaattaaagtcttaagaagtgataaaatctcaaaggaagatactagggaaagatataagagtatctatgtctatatccacctgaatgtatttttcctccacaggttgtctgtagatgagagattctgtgagctcacctattgccgtaggtcctattcttcaggaggtgtagtgggaagaacacagcctttggagtcaagcaacctctggatttgaaccagggccagctgtgactcttaaacatgatcatggatgcaaagtacctggctcctaagaggcacacacccagtgttaattctttaaagtgaaatgagcatttgaggattgacaggaggaagaggaaccaaaaagggagtgacgacaggaccaagtagtgtgggctttcagaataaaggacagaggagtgctagtcaatagagccaaaccttgaagaaaggtagaggagaatgaggaccgacaggattagttttgtttaatttagtatcctttttactactaatttccatgaactcatgaaaaactccattgttctctcatttaccgccagtagagttgggcaccaggtaggcattcattacatttcagtgggtagatagaaggaagaaaaagtgtactttcagaggatatgtttgttacttttgcagttagaaaaaaatatattttaagtgagtacactttcagtaaaatacagagtatgttagattgcaagggaataatttaaaatgggagttagaattctgaatctcaccttcttccaaattgatcagtttttttgttttatacccagcatactgttctcttcagacaagagagagcaattaagcaattttgaacctatgagctgaagcaacagtgaatttcagtaagttttaaagtagtacatcactatttcttgatagctaggtttttttctaaacttactcaattgaaatgcctctcattttagaaaaggagcctgaaattttgtttctaaggaattgaaaacaatccttcatcccaataaaaaacaaagggaaaagaaaaaccaaaatctagtcacagttctcgaaagaaacagccaagagccaacaggatggatatgtagaggtttactttaaggaattgttccatgcaattgtggaggcttggcacattcaaaatcagggcgggccagcaggctggagacccaggaaagagttagtgttgcagttcaaatccaaaggctctctgctggcagaattccttctactaggggaagataagtctttttctattaaagcctaaactgattgattgattgattggatgaggcccacactttatggaaggtaatctgctttactcaaagtctactgacttaaatgtgttaatctcatctaaaaaaaaaaataccttcacagaaacatttaaaataatgtttgactgaatatctgtgtgccgtgggcccccccacagtttgacatgtaaaagtaacctcacaagtccactccttattaacttggcacctgtatgcatctccttattccatacttaatctccaaataaagagaataacaagttcatacttccacctaacctaataaaattatcctgtgtacaaccaaaaaacacactaaccttttccccggaggagaatgcaaagtccttggatgatgtttactcctctccgtgatattccataattttgatacggtgaggtaaagttaacaatacttaaatactatgatatggagtcagtaatctggccaggcacagtggctcacacccttaatcccagcacttcagaaggctgagatgggtatatcacttaaagtcaggagctcaagaccaacctggccaccatgatgaaacctcatctctactaaaaaaaaaatacatatatatatatatatacatacaaaaattagctgagcgtggtgtcacacgcctgtagctactcaataggctgaggcaggacaatcacttgaacccaggaggcagaggatgcaatgagccgagatcgcgccactgtactccagcctgggtgacggagcgagactccatctcaaaaaaataaagtcagtaatccgatgttccatgataagggaacgagaaaggaaagaatgcgaagatattttctttttatatatctatatatagatattcacaccaaaacattcgtaacaaaacaagaaatacaacaattacagtcctcgtttctgtagctggtcacatggtggttgctggtattcatggttgcctctttccactacccattctgtattccctttgcactcatctcgcaagctgatcgtggtttacctggtggggtgacccaaaccttcattcttcaggggtgtgggccattcatagtcctgtatggattgttgtcatttttatcgactgtaatcacagggcagggtacagagatgtcctaagggatctccttaagccagacatactcctccttacctccattgtgtagcagttccagttcctcttgggcaggatcaattaccccagccaacactgtaactcccttccttgcctattgattcagaggtgtgaggagcccaaagtggctgggtggctgtcttaacttccagttcagtggaatgattgtaatttttcatcctctaaataatgagtagggatacatttattctaaaatgcatattatgaatattatgcagcagattcattcaccttgtgataaagtgaaatagggtgttaagcagaaataacatgcagatatcttttatcatcaaattagggagcaagattctctgatgcagtattcctcagtcttaaaccctgtattgatgccttttcatgaaaaaaaaaaaaaatgctaccagaacataagtgctgacttaaaacatttttattttaatttatttaaatatgtacaaacattacactagatctaaaacctttatgcttattatatttctttatgaaacccagactcattacagataagggacaagcaaaaccccaaaggcagtcaagttgaaaataacactgagtgaatgtaacggatggattttgccagaactaccttgctactgcaagcaggcatctggacagcactggtgactgtgacacgggctggtctcagctccttggggggcttctgccctgcagtggccctgctgtctccccactgtgtatgaatcacatcgaaacctttgctccctcacagcatgccttaagcacttatttaggtgtcaattatacctctgttcttttctcattcacccatgaattcaagctgtacaccttttaaataacattctctgtcttacagtttcatggcgctaaactcccaagttagtaagtagttgagtcttaatgacgtaaaatggtcttatttgtaaattatcactgcaaaagagaatttaacttgttaaccaacaaaatcagaatgaatatgctgatgagacaattgttaatgaaggctgtcatgttaacacaggacacgccagcctgtataaccagacatgttaatgagcccactaaaataagtgctttgattttacttgagacaatggatgccaaaagtaatcacaaaacacaaactagagcactaaaatcacttgtcagtacttacttgttaagcggacatccagataattctgaatatactgtgtgttgattattttttatattatcatcacattaaaaaattgtgaagaactcaatcttccaagaatatgtctaagtaccctcagatatctgaggtccccaatttgaagaaacactaacatattgggaaaaaatactaaatcttgaagacctgggtacaagccactgtattgttgtgaactctggcaagtcacttaaccactctgggcattaagttcctgcgttgtgcccaacttcaggccctgatttgctggacttcagagttcatgctctttcttcaatcaaaaggcctttgaaattccagaatcctgtgttgggcttatagttcaatcagtactcttaaaaaatggggtcctggcaagaaagcattatatgatggtggtgatccccaggagggatcacgttattctgtaagattatgctgattataaagccttctttttctttcattatagattctgattcccagcatagccacgaagtgatgcctctcctctatcctctctttgtctacctccatctcaacctggtccaaaacagtccgaagagcacagtggaaagtttttacagccgcttccatggaatgtttctgcagaatgctagccagaaggatgtcattgagcagctacagaccactcaaaccatccaggacatcctatctaacttcaagcttcgagcattcctagataacaagtacgtggtccgtctccaagaagacagctacaactaccttatccgctacctccaaagtgacaacaatactgccctgtgcaaagtcctcaccttacatattcatcttgacgtgcagcctgccaagagaacagactatcagctgtatgccagtggcagctcctcccgcagtgagaacaacggtttggagccccccgacatgcccagccctattctgcagaacgaggctgccctagaggtcttacaggagagcattaagcgagtcaaggatgggcctccctccctcactaccatctgcttctatgccttctataacacagagcagctgttgaacactgcagaaatctcccccgatagcaagctgcttgctgctgggtttgacaactcctgtataaaactttggagtttacgatccaagaagttaaaatcagagccccaccaagtagacgtgtcccgcatccatttggcttgtgatattctggaggaggaggtatgaataccatttttttcttccctgcacccgccttcctaatttccttagaatgtccttaccaaacacgacatatcttagaatggacttcctagtttccctcatcatatagctaaagccagactaatgacatgttacctgtagccattgaattcctgcacatgcctaacctaagatgcaaaaacaatttttagcagcattaacttcttattaatgaatggtcagtatttatactatgtgaaatgtggatagcaacactaagcctaatgaaagacctttagctaatattgactttagctgagatttgcagtaaatatacacttatgtgtgtgcacatttgctcaggtacaaataatcggtagtaggataactgagtcgaagggcctccattgtcaactgtaatgaatattattttccccacagaaggttgtgccatttcacagtctcagcaacagtagtaagaatactggcatccctgcaccctcaccacactggatggatggtattggctttctgaggccagtgcatatcctgtggctccatgtaccccggggtgttcccagaccccacttggagaagtaacacaggaagtagagttgccagctcccctccccccgtcagtcagtgttcaatcttgtttggcttgtaaccgtttaggacagtcattgaaaagggcaggcgcagcttgggtttcaggtcaccaaaaatcactaccttagaaaaaatgtgggccaaggaagatagaaattaaacttcacagcattaacttttctttagagtggtcctgaaaaagctgtgggccaaagtatttttgtcttatcaccactgaaattcaggtagctctgcctcacattactttggatggaaaattctttacacaatgttgaataattaaggagcaaaaaaatcactctaattaaattacagttaatgataaggatgtcaagaatattgggtgccctaaattaaaccattgttttcctgttcctgttttctgagtccacttccagttaggatggcctttgaatttttgattcttgcaaccgagacagtataattgaaggatttccttgtgatgagtgaagagtctagattcccatgtagaagctttaatttctagaattttatagtactctccaaaatattttttattacatttgtatttgaattttcaaacatctcttttccttggagacagttccctttttgggagttcttctgataaaactgaggaatactgcctgcatttgctttcgattttctgtaaatacaaaaaaaaattacactgaccttattagctttgatgatacagagtttggagattattctgtgcattaaaaattaatattaaagaagatagcattatgacatctgataacagtagaccaaaataaaacattttaagactctggccactactggtaactagctctgtggcttgtcctatgtttatttccgggtatcagaagtgtatctgaagactcagaagtgaggaaccgcatgcggaattccaggaactgaaagaaattaagtatggctggagttaggagaggggccaagacaggaagtgatgtagtgacactgtcttatatgagcaattatggcggccaaactagggtagtggcagtggcaaaggagacatggatggactagagaagagctcggttattcaattactgtaggggataagggagagcaagcatcaagggtgacgtttgtgtttcaggcttaaacagttggatgtccatcaagaagaaagcaaaagacgtcattggaatggtggttttgtttaagcatttctggctttccatcatggttcatactgaaagtactgtagatgctagctaacctctgccctttttaagaataaaccttttttttaaacttaagaactaaagctgagattctcctattctgttgttgaggggcttcctgcatgcccgcccattttatcacagcaatttgagaagttttctttttggtttctgacaacaagcatttggggagaaagccaggcataaattagttacgatagttggtgtttaatgtttctccagtgaaaatttggacttttctttttcccttatagaatgcataattaaaacagactattattttgaaatgaaatattgaatattaaaaaaaataaaatagagactcttaatacaggagccacaaactcacatacctagagaaaccaaacaggtaaaagcaagtggtgaagccacatggattaatgagatgatagaaagtacaaaatcactatgtaagtcagattaaaaagccagcttgcactctctgctttcatctttttgaagcaataactattacataaatcagtgaatacagtatttctacagtatttgaaacggtgttcacacccagcaattccacttctagacatatatccaagagaatggaaaacatgtgcacacaggcacttgtacatgaatatttatggaagcattattcacaatagccaaaaagtggaaacagtccaaatggccatcaagatgaatgaataaataaaatgtagtgtgtgcatgcagtggaatattatttgcccataaaaagaaatgaagcactgatgcaggctgcaacatggatgaacttgaaagctttatgctacgtgaaagaagccagtcataaaaggtcacctactgttattcctttcataggaaatatccagataggcaagtccatagagacagagaggagaggagtggttgccaggggctgggcaaggagaatgagagtgaccgctaatgggtgtggcatttctttgtgaggtaatgaaaatgttctgtattagatagtggtgatcattgcacaactctgtgaatgtactaaaaatcattgaattgtacactttgaaagaattatatagtatgtaattatatctcagtttaaaaaaaaaaacaggataacagtaaccaaaatcttctatgtaagcttaaaattttctctgttaattatgccaaataaaactgaattcacagcactgtcctgtagcttctgttgtctcccacttaaagatcatctaggttaacctttggaaaggtgttaagtgacatagcagtcccttgctttttaccttggtatgagcagccctcctcctgtttcagacactgagatgaagagtgaaaccttcattctccatcttttgttctatatgaaatggagatagaaatgatatctggctgggtgcggtggctcacgcctgtaatctcagcactttgggaggccgaggcaggtggatcacaaggtcaggagttcaagaccagcctggccaagatggtgaaaccccatctctatgaaaaatacaaaaattagctgggcgtggtggcagacacctgtaatcccagcaactcaggaggctgaggcaggagaatcacttgaacccaggcagcaggggttgcagtgagctgagaccgcgccactgcactccagcctgggcgatagagtgagattctgtctcaaaaaaaaagaaaaaaaaaaaaaaaagagatatccaacccttacccctgttgattgatacctatgtatttttaatatttgagcaacatggcaaaaccacagagataccaaaccaaggatttgctcttctttcttttcagctgtgtgtatgcagctacccttatcactaccagcacccgcctccttaactcagcagtaaaacagctgtgtgcaattcatttatatgtctggtggttttgcccccaatctggtcttctttaggtttgaaaagtaaagaaggcaatattagcagcaatactcaattctataatctgtgtatcaaattgtcatttagattaatgctatccaatgggaatatgatgtgagccatatagtaatttaaatttttctagtagccacatctaaaaaggttaaaaatttgttaattttaatgatgtatttcattcaaactaatatgaacaaattatttcagcatgtaagcaatataaaaaatcattcatgaaacctgttacatacatctcttttggtcctaagttttagaaatctgatatgtattttacatgaacagcacatgtcaattcatgctagccagtatccaacttttctgttctagttcaggctgctgtcatctcccacgtagatagcagtgattcacttgcttccaagtctaatacactcacaagtccagccaaatttaatgtcttcctgttccactgacagctaattagagaatagatggaggctaaattccagaccccaagaaaggacccctggtctgggggaaacgtgagtgtgagctctgaggtagttggagcctcagagtccaggagcagacggccataacaaatctgaggttttagggactccatagtccagagcaggggcagcaaactacagcacaagggtgcatgagatgatacttgatctctttatgtttatttttcttgttaaatttctatttcatgtgtgtttcataatgtatataataagatttattattacatgaatatgctttacaaattaaacatttctatttgggatgcatacccaattactgtggagtattcaggctgaatcgtagggtatggtattatcctgtcggcaggagagagaagtgaaaacccatggcgttgggcccttgtaaatcagctgctcgaccgtgctgaggcccgtgtgggactggttgagccacacagaaaatgtggctgggttattttaagctgtggtcctggcagagggctgacagtgatagccaacaggaacattctggtttctccattccttggtctacagagtcagctggacacgtttccaccagcctgggacaatcatcaagatccctggggagcaccagctggactcccagcccatgctcctagcccatgcaccttcatctccaattgtgatgccttcaccactgaggaggtgaaggccacttccatagcttcttgttccaaatgaagaccacttacacctcagaggcagtaacatgtcctttaattcacagttaactttcacaggatctttgtttaattcatctggtgtcatttttgttcccacagtctttatataaactttctggtgtagagcagtgagtcattcttgaaattttaaagtgttgttgtaacttctttggaaaggaaaattactaatattcttggtagcactcagtagacccttaagctcccaaatacttaatgtatttttaatgttgagtgtttggaatagccattgtgaatattcatggacatcagtgtttattttctctcaactttttcttaaatatgtacacatgggaggcattcattttattttgaatttaactattttcaagtagaaaaaaaaggtgcccttttcttatacaagaacctaaggctgccacaatgaaccaacaaagctgactggtttggggatcttcatcatactcctttcttctggtgtttaattaaaacccattttaattgatgaattctgggacagaagagacagctgtagttttgaggagtttatctatgtgggaataaagggaaatgaattttgaaaacagatggtatacttgtggggagaggaccaggaaagaggactctttctgagtaccattagttgccgtcttttctgtcgtcacacacaggaaattatttcgaagaatcacatgaatcgcttggctttgcttcaagcacttctgaatccacaccttgttttgttacgttgggggagatgttttttgagaccctccagaaagtcactttaaaaacttcattcttatttattttgaaacactaagcagtttgtggctggtcactaggcagggggagctgtgatttactagtaactgtacctttctagcttagtgttaattcttaaacatccaggttttattttggctaaactcctctgatagttctgggttttgtttgtgtttgtttttgttttgggtttttttgggcacagggtcttgctctgtcccccaggctggagtgcagtggtgccatcacagttcactgcaacttcaacttcccaggctcaagtgagcctcctaccttagcctcccaagtgtctgggaccacaggcatgcgccaccatgcccagctaattttttaaatttttttggtaaagaatctccctatgtttcccaggctggtctcccaactccttagctccagtgatcctcctgccttggcctcccaaactgttgggattacagtgcgagccaccatgcctgaaccaatggttgtgtgttaatcttgaagtgaggctgggcgcggtggctcatgcctataattccagcactttgggaggccaaggcgggcggatcacctgaggtcgggagttcaagaccagcctgaccgacatggagaaaccccatctctactaaaaatacaaaattagccaggcgtggtggcacatgcctgtaatcccagctacttgggatgctgaggcaggagaatcgcttgaccccaggagtcggaggttgtggtgagccgagatcacaccattgcactccagcctgggcaacaagagcgaaactccatctgaaaaaaaaaaatcttgaagtgataccacatctgccttcatgtgtcgctgtgtccatcattaacccccatcatgggagtaaggaacatgtcaggacttaacgaaatgttgttgtcagttaaatggagtaaaaacagcagtatggcttataaagcagctaaaactgatggatgaaggcaatgcccatagaatagaacaatctaagagcctcacgtaaattcaaaagtaaatattttcaaatggcacacatcagaattaaccatacaagctatcctcaatcaaagggtaaggtccacagtcattactctgtaatggccttgcatttctgtatcttttaatctgatatagtctgagctgcaaggtgaatttaaggggagcaatttgtaagtcgtaagagacttttattcagttatgagttatcttcctggggtagcgttcaagggcaaggccactgtcatttgctggatagatgctatttcccaagcagtctcagttctctacttttttttctcctggacttgttttccttgtcagaccactgaacattttttgtgtgtgtttcttttcccaccccaccccactgttcccaggatgatgaggatgataatgcaggcacggagatgaagatactgcggggccactgcggaccagtgtacagcacgaggttcctcgcggacagctcagggttgctctcttgttctgaagacatgtccatcagatactgggatctggggagtttcaccaacactgtgttgtaccaaggacatgcctatcctgtgtgggatctggacatcagtccatatagcctgtacttcgccagcgggtcccacgaccgcaccgccaggctgtggtcatttgatcggacgtacccgctgaggatatatgcaggacacctggcagatgtggactgtgtcaaattccaccctaattcaaactacttggccacgggctcaaccgacaagaccgtccggctgtggagcgctcagcaggggaactcggtgaggcttttcacaggccaccgtggccccgtgctttctctcgccttttctcccaacggtaagtacttggcgtctgctggcgaggaccagcggttgaagctgtgggacttggcctctgggaccctttataaagagttgagaggccacacagacaatatcaccagcctcaccttcagtccagacagcggcttgattgcctctgcctccatggacaactcggtgcgcgtctgggacatcaggaacacttactgcagtgcacctgccgacggctcctccagcgagctcgtgggcgtgtacaccgggcagatgagcaacgtcctgagcgtgcagttcatggcctgtaaccttcttctggtgactggaattacacaagaaaatcaggaacattaattttttaactttgttggaacggactggggtaacagtggaaagcctccagttgcaatccttcaatgagctgagattgaatcattgactgtgaaagagccccctcctcccctctctcctgggccctcattccgggcaggtcccccttcactcagccccccagtgtcgaaggccaaggttggggaggggaacaggagagaggcaatgatgagtgatcaagaattagagtgccctggaggtcactcacaagtcctcatggagactctgccgtgacctcgcgcatgcgagcaccttcctgtctctcattttcaccatctgactggggctaggtttggttagagggcggctgtagagcaccctcaggagaagtggcgccgcaggggtcacgcatggtccagccctcaggtgggagggaagtccttgttggcagagggatgtggggcgggaatgaggaaaggggagggcatgatcctggcaaatagtctttccttttccgtaattacagagaaccaggattttttttaattattgttattataattataattattattattattgacatgaggaaacctagcactggcagagggcaccttctctgcttttaatctttcaggtttgactcctggcactggttttgatacttggaattttgaggttcagggaattcagagaatttggtagcacagtgtattgggagaaagggaaatttcgggtgacagattgatcaccctggctgacatgtttctggaagtgggtgggtgggtttgattgagaacactttgggctcctgcagtgatggtgggaaagaaaaattctttccaaagctgcacttctcttaataattctctcccctcaaaagaaagattatgataaagaataatttggagtaataagtaacaagatagaattagaaaaatgttgaatttctgaatgaccattcagaggtgtggctttttccacgtctttttctcctgcaatgaactgctcccac

SEQ ID NO: 690 - DNA, 32744 bp, Homo sapiens
  source 1..32744: mol_type = other DNA
tggcgcgagcttctgaaactaggcggcagaggcggagccgctgtggcactgctgcgcctctgctgcgcctcgggtgtcttttgcggcggtgggtcgccgccgggagaagcgtgaggggacagatttgtgaccggcgcggtttttgtcagcttactccggccaaaaaagaactgcacctctggagcgggttagtggtggtggtagtgggttgggacgagcgcgtcttccgcagtcccagtccagcgtggcgggggagcgcctcacgccccgggtcgctgccgcggcttcttgcccttttgtctctgccaacccccacccatgcctgagagaaaggtccttgcccgaaggcagattttcgccaagcaaattcgagccccgccccttccctgggtctccatttcccgcctccggcccggcctttgggctccgccttcagctcaagacttaacttccctcccagctgtcccagatgacgccatctgaaatttcttggaaacacgatcactttaacggaatattgctgttttggggaagtgttttacagctgctgggcacgctgtatttgccttacttaagcccctggtaattgctgtattccgaagacatgctgatgggaattaccaggcggcgttggtctctaactggagccctctgtccccactagccacgcgtcactggttagcgtgattgaaactaaatcgtatgaaaatcctcttctctagtcgcactagccacgtttcgagtgcttaatgtggctagtggcaccggtttggacagcacagctgtaaaatgttcccatcctcacagtaagctgttaccgttccaggagatgggactgaattagaattcaaacaaattttccagcgcttctgagttttacctcagtcacataataaggaatgcatccctgtgtaagtgcattttggtcttctgttttgcagacttatttaccaagcattggaggaatatcgtaggtaaaaatgcctattggatccaaagagaggccaacattttttgaaatttttaagacacgctgcaacaaagcaggtattgacaaattttatataactttataaattacaccgagaaagtgttttctaaaaaatgcttgctaaaaacccagtacgtcacagtgttgcttagaaccataaactgttccttatgtgtgtataaatccagttaacaacataatcatcgtttgcaggttaaccacatgataaatatagaacgtctagtggataaagaggaaactggccccttgactagcagtaggaacaattactaacaaatcagaagcattaatgttactttatggcagaagttgtccaactttttggtttcagtactccttatactcttaaaaatgatctaggacccccggagtgcttttgtttatgtagcttaccatattagaaatttaaaactaagaatttaaggctgggcgtggtggctcacgcctgtaatcccagcactttgggaggccgaggtgggcggatcacttgaggccagaagtttgagaccagcctggccaacatggtgaaaccctatctctactaaaaatacaaaaaatgtgctgcgtgtggtggtgcgtgcctgtaatcccagctacacgggaggtggaggcaggagaatcgcttgaaccctggaggcagaggttgcagtgagccaagatcatgccactgcactctagcctgggccacatagcatgactctgtctcaaaacaaacaaacaaacaaaaaactaagaatttaaagttaatttacttaaaaataatgaaagctaacccattgcatattatcacaacattcttaggaaaaataactttttgaaaacaagtgagtggaatagtttttacatttttgcagttctctttaatgtctggctaaatagagatagctggattcacttatctgtgtctaatctgttattttggtagaagtatgtgaaaaaaaattaacctcacgttgaaaaaaggaatattttaatagttttcagttactttttggtatttttccttgtactttgcatagatttttcaaagatctaatagatataccataggtctttcccatgtcgcaacatcatgcagtgattatttggaagatagtggtgttctgaattatacaaagtttccaaatattgataaattgcattaaactattttaaaaatctcattcattaataccaccatggatgtcagaaaagtcttttaagattgggtagaaatgagccactggaaattctaattttcatttgaaagttcacattttgtcattgacaacaaactgttttccttgcagcaacaagatcacttcattgatttgtgagaaaatgtctaccaaattatttaagttgaaataactttgtcagctgttctttcaagtaaaaatgacttttcattgaaaaaattgcttgttcagatcacagctcaacatgagtgcttttctaggcagtattgtacttcagtatgcagaagtgctttatgtatgcttcctattttgtcagagattattaaaagaagtgctaaagcattgagcttcgaaattaatttttactgcttcattaggacattcttacattaaactggcattattattactattatttttaacaaggacactcagtggtaaggaatataatggctactagtattagtttggtgccactgccataactcatgcaaatgtgccagcagttttacccagcatcatctttgcactgttgatacaaatgtcaacatcatgaaaaagggaaatgattccatagcgttattatgaaagtagttttgaactgtaatggtagaggatgaatagctcacaatacaaatttgtcatttccctttaagagagaattcccattttatgtgagagtccacatgttcctcatacccatagtttgccacatcttgagtactcttcagaattatttgaattttttgaattttatctgtggaatgtatttttttttttttcttttttgagacacagtcttgctctgttgcccaggctggaatgcagtggcgtgatctcggctcactgcaaccaccgcctcctgggttcaagtgattctcctgtggcagcctccggagtagctgggactacaggcgtgtgccaccatgcttggctaattttttgtgtttttagtaaagatggggtttcaacgtgttagcaaggttggtctcgatctgacctcgtgatctgctcgcctcagcctcccaaagtgttgggattacaggcgtgagcccccgcacctggccgaattttatcgtggaatgtattcttaatgtgaatagtttttgattccgaaccatgaataataagaaaataaataaaatttaaatgaaaataaaagctaatatatacagcttttaataatatagttaaatgccatcttgtaacttttgtgaactcttgttacacctttctatagattcgcaagagaatggattaatgatcttgtttaattaatatgccttaacaaaagtaatccatagtcaagatcttaagcatttttttccttatgatctttaactgttctgggtcacaaatttgtctgtcactggttaaaactaaggtgggattttttttttaaatagatttaggaccaataagtcttaattggtttgaagaactttcttcagaagctccaccctataattctgaacctgcagaagaatctgaacataaaaacaacaattacgaaccaaacctatttaaaactccacaaaggaaaccatcttataatcagctggcttcaactccaataatattcaaagagcaagggctgactctgccgctgtaccaatctcctgtaaaagaattagataaattcaaattagacttaggtaagtaatgcaatatggtagactggggagaactacaaactaggaatttaggcaaacctgtgttaaaatcttagctcattcattaattgtgtcatgctgggcaaatcagtctctctggcctctttttcctcactcgaaaaatggagacgatgaaaataatgtctcataggtttggattaaattaaataatgtaggtacttagtaaatgttctctttcatccctcctttgataaatttgccaactgagatttgctgaattacgtctttcttatgccaaaaaaacctaggacttgttttgatgttaattaaactaaactatatttctgcaagctatcacagaggacagagattattttaccgatatactataagtatcatgatttggaaggagtttccctggcgtaggtgccgcatgtttctaagcaattatgtaataagattatatattcagtcattcaaataattattacctacttgacataagtaatgaactttcccttttcttcagagtgttaatctctagtaaggggaataaagagtacacagataaagtatagtgtaaggttgaatgtagtatgtgctaagagaaaaatataaaaaagtataatgagagttgagaagaaagagcaaatagtattgggcaaagttaggcaattattcctttgagctaaaccttgaaggataggtgagagattaagaaatttgaagatgtggtagagtgataatgttctaggcagagggaacaacatgaggaagaatatgtagtgtgttcaggaaatagcaagtaattcaggttggctttggttgttttgtgtctgaaagggaccaatagacaaggcaaaaaggcagactaaaggcaggcattgaatgccaagctaaagaaattgaatttgtttggttggttggtgagcagagaaatcacatgcaaatttcatcatgctacttattgtgtcaaaccttagatcacctccctttgtccttatagcaaaatctaaacttgatatggctttcaagttcctttgtgatcaggcccctgatttacactcttggctcagcttgccatattcatcctctcacctatcttcatttgccattcattcctactgaatttcttttcgttaccaaaaccacaatgctctctggctctttattaaacatattgttacctctacccacaacctactttttccctactttttgtctagctaatttgcgtgctcgtctttcagatcttggcttatttctgcttctgagaaatacttcctgtctgccctcgttgagcttctagtgaaggagacatacataagcaattatagtgtgatacatgctttgaaagaaattcatggctatagggagtgcatatacaaagggaatataggtaatgggcaaatatttacatgtatgttattggataccaaatggtatacataggattcagtaaatatttgtagagtgagtattagtattatttgctttagaaagcctaatgatcaaacagcagtctttggagataacgtttttcaaaatgtcatgtctgtgccattagaatcttctagactgctcattgaaaggacagattccaggccccactctgaatctcttaatttataatttttggaaatgatgcccatgagtctacattttaaactacctgaatgatccctatagaaagagaaaactggaggtaggaagatcagttaggggatgtgtaatggtctaggtgatagagacaagtgcctgaattacagtaataacagtgaaagtaaatatggaacataaaactataggaccttgcagtagtctagatatggaggattcaaaaaaaggaacaaatgacagggcaaagcatatgcagaacacagtagtaacagtcatagaaatggataagggagtcatccattctgcaaatacttagtgcttacttgtgtctggcaacctgctcggcattaaggatacaaatatgaataagatgtcctttgacctctaagtactcagtctcgtaagcacgtcttgtaagcacatcttggttgcttccataaaaataaatacactagtgtgatatgttataagagcatgtaccaagtgcatgaaaagtgagcagccatctctggttggtcagaaaaagctccataaagcagtttttgctgaatcttgaaagatatacctaaggtcaaatggttaattctttaatcataacctgctagaattgatctataaccaaggaaggatagtaaggaattaataaggccactctcaactcactgcaaaggagttaactttttgaaggctgtaatacataaatctgctgactagtctcttgagaccttttgcttttacgtttactttagattcagtattgaaaagtaagagtaatggacttaagctgtgtttttcaacctgttttgttcagttctaacatgtaatattttttaaaaaattattcctaaagttctatgaggaattgtgctgtttctgcctctcagcagtccttccttttgcattaaatcataggcatttctgttaccattcttcagcttattaatgagatcctcaggttatttgggaaatgtttatttggtaattaactctttttcacctagttcatttttttaacttttttttttaaatagccgagtttcttttcattgctgaactaaaatggatgtgttattattagctgaactccttagtttactttagagttcaccctttgtatggttctatggattttgacaaattgtataatgtcgtatatctgccattatggcattatacagaataattttgctgccctaaaaatctcccgagttccacctgctcacccatccctcctcctgagcccctggcagccactgatctttttactgtctgtatagttttgccttttccagaatgtcatgtagttggaatcatacagaatatagcattttcagactggcttctttcacttagcaatatgccgagaccagctcgattgtagagaccctaacccagcggcactagaggaattaaaggcacacagaaatatagcggtgtggagtgggaaatcaggggtctcacagccttttgacagcaagccagtgataagcattgtttctatagattatagattaactgaaagtattccttaggggaaataaagggctgggccgaagtaaagggatgggtctggctagttatctgcagcaggagaatgtccttaaggcacaggtcgctcatgatagtttgtggtttaagaacgcctttaagcggttttctgccccgggtgggccaggtgttccttgccctcattccggtaaacccacaagcttccagcgtgggtgtcatggccatcacgaacatgtcacagtgctgcagagattttgtttatggccagttttggggccagttcccaacagcaatatgtgtttaaggttcttccatgtcttttaatgatttcatgctgaataatattccatcgtattgatgtaccacagcttgtttatccattcatctattgaaggacatcttgattgcttccaaattttggcaattatgaataaagctggtataaatattcacatacaggtttgtgtgtgaatatattttcaactcattttggttcacaccaaagagcacgattgtgggatcatatagtaagagtatgtttagttttatgagaaactacaagctttcttccaaagtagctgttgcattttgtattcccaccagcagtgaatgagagttcttgttgctcacatcctcaccagcatttggtgtgtcagtgttttgaattctagccattctaacaagtgtgtagtggtacctcattgtttgttttatttaattttttttttttttttttggagatgaaatctcgctttgtcgcccaggctggagtgcagtggcgtgatcttggctcactgcaagctccgcctcccaggttcacgccattctcctgccttagcctcctgagtagctgggactacaggcacccgccaccacacctggctgatttttttgtatttttagtagagacggggtttcactgtgttagccaggatggtcttgatctcctgacctcgtgatccgctcgcctcggcctcccaaagtgctgggattacaggcgtgagccatcatgcccggcctgttttattttttaaagtcaattttctttcaagaattagctactttttagtatctttaattaaaaatctcattagagaaggaggttggatattttgttgaagtggggtttttaagttacacatccatttgctttattagtgattatgtctagtccatgttaacttgaaaaatgagactataatgagacattttatttaggctgctacaaacagttttaaatttggtcttcactttattttagtaacattgatagagcttatttttcccaaaagctaagttagagattataggaccaaccgaagcaactattttctaagagtaataataagtgactcaggtgccaaatttgtagttaccatcaactattggaaccatatgagtacttaatgccctggagagtcaaatataatctactctaatacagaaaatagaaatattgaaaaactgtaaattggatttcatattgttaaagccacctatagctttagaaactctgaacattattttcttagaaaatggatgtgttcaataagaatagaaattatgtattactgtctgcaactcactttgtctaattatatccaatttattcatccagtcaatatttcaggagtgactaatataccagacatttttgtagttgctagggatacagtgacaaataagacaaaatctctacctcagattgctcacagcctagtagggggaaaaagaacagtgtatgatcaaactcttcagggaacacataggggggcaaacacttaatcttaccttagggatcactacagttttctggaggaggtagtttctaaatggaagcctgaaagagttgttccaggtcaagaaaagcaaagaaggggaaacagcttgtacaaagtcctagaggttaaagaaaacattctttcaggatatgcaaatggttgggtatgggtaaaaagtagactgtaaaagaatggcatcataaaaattaagtaaattgtcacataaatatatatatttcttatgtacccacaaaaattaaaaatgaagaaattaagtaaattgtgaaaggccttcatactatggagtttgacttgatcttgaaaagtaagatcttgaaaggtttttagcacaagtgatattgtcagatctggtacattggtaggttttcagtaaatgtcttcccttactccttttttctctttccttctgcttttgtttaaagcgacaagatgttgctcttttcccaggctggaatacagtggcatgatcatagctcaagctcctgggctcaagtgatcctcccgcctcagcctctcaagtagctaggactacaggcatatcaccacaccagcgttttctttgtagaggcagagtctcactctgttgctcaggcaggtgttgaactcctgcctcaagcaatcctcccacctcagcctcccagagccctcaaattataagccactgtgctcggggcatcctttttggggggtaatcagcaaactgaaaaacctcttcttacaactccctatacattctcattcccagtatagaggagactttttgtttttaaacacttccaaagaatgcaaatttataatccagagtatatacattctcactgaattattgtactgtttcaggaaggaatgttcccaatagtagacataaaagtcttcgcacagtgaaaactaaaatggatcaagcagatgatgtttcctgtccacttctaaattcttgtcttagtgaaaggtatgatgaagctattatattaaaatatttaaatgaaacattttcctacatatatttgttctataaagatgaatctgatttttatgctaatattttggctaagagcctggtagaagatcttacatttttaaataatcttttaggttgagtcctttaatagaatagtttttacattagaaacatgtaagttgttgttcttgtgatgttgaattggctggttttctgtatattctgtgattttttaagtaacaaaaataacagtggtgaaaagcagtaagtcagtccttgaattatcaatttaaaataaattgtgtacttttcatctttggagagaatatgatttactttacaaattttttttttgttttttttttttttgagatggagtctctgtcacccaggctgtagtgcagtggtgcgatctcagctcactgcaagctccgcctcccgggttcacgccattctcctgcctcagcctcccaagtagctgggactacaggcgcccgccaccatgcccggctaattttttgtatttttagtagagacggggtttcaccgtgttagctaggatggtctcgatttcctgacctcgtgatccgcccgcctcagcctcccagactgctgggattacaggcgtgaaccactgtgcccggcctactttacaaaatttttgagtttaaaatacacggtttccagcagctgaaatttgtgagtacatatgtgttggcattttaaacatcacttgatgattatttaatgcttcatgagagatttactttttaaaatgtaatataaaatatctaaaagtagtattccaacaatttatatgaatgagaatcttcttttaaaaataagataaactagtttttgccagttttttaaaataacctaagggatttgctttgttttattttagtcctgttgttctacaatgtacacatgtaacaccacaaagagataagtcaggtatgattaaaaacaatgctttttattcttagaatactagaaatgttaataaaaataaaacttaacaattttcccctttttttacccccagtggtatgtgggagtttgtttcatacaccaaagtttgtgaaggtaaatattctacctggtttatttttatgacttagtaattgagaatttgacaatagcgttatacctttgccctgagatttacaaatctgtacctagcattctgcctcatacaggcaattcagtaaacgttaagtgaaataaagagtgaatgaaaaaataatatccttaatgatcagggcatttctataaaaaataaactattttctttcctcccagggtcgtcagacaccaaaacatatttctgaaagtctaggagctgaggtggatcctgatatgtcttggtcaagttctttagctacaccacccacccttagttctactgtgctcataggtaataatagcaaatgtgtatttacaagaaagagcagatgaggttgataattgtcatctctaatacttctgttaaaaggaaatatgaaaagaaaatattagataatgtctttgataagtgtgttagtaactgacaataattttattctattaagtgtagattggaataaatacaaatacatttagtggtagtccagtggtgtcaagcattatgttttagtacgatgtgattaacgtagaatagcttacaaatattcctttactggcctatataagcgtttaagaggcagtatttggtgtgactgaattctttttacaaatgattgtggtaattggggcattaaagcagcattaaataagcttttgttttctctacttaaatgtgttctaaggtctgtattgccagtagtactgaattgaggtcttaaattccacaagtgtaattacacaactatgtgataaactgcaatatttatccattcattaaactgtaaactctttgcagtctcaccacagtttctcttactaggatctagaaatatttcctattgtaggctggttgcagtggctcacgcctgtaatcccaacactttgggaggctgagaagggtggatcacgtgaggccaggagtttgagagcagcctgtacaacgtggtgaaaccctgtctctactaaaaataaaaaaattggccaggtgtggtaacacacacctgtaatcccagctacctgggggctgaggcatgggaattgcttgaacctgggaggcagagggtgcagtgagccgagattgtgccactgcactccagcctgggtgacagggaggctgaggtgggaggatcacgaggtcaggagatcgagaccatcctggctaacgtggtgaaaccctgtctctattaaaatagaaaaaattagctgggcgtggtggcagacacctgtagtcccagctactcaggaggctgaggcaggagaatggcatgaacccgggaggcggatcttgtagtgatctgagatcatcacgccactgcactccagcctgggcaacagagcaagactctgtctcaaaaaaaaaaaaaaatcctgttataaaactacttaaaaatctctgagtagctgagatttggctaatcatgacttagtatttgaaaagttgtgactattttttttttttttaattgagacaaggttcttctctgttgcccaggctggagtgcagtggcaccgtcgcagttcactgcagcctcaacctcccaggctcaattaatctttcttcctcttagccttccaagtatctgggactacaggtaccatgccaccagtatactaccagtcctggctaattttttttgtattttttgtagagatgggtcccgccatgttgcccacacttgtctcaaattcctgagctcaagcagccaccacacccacctgtgaccattcttttttatttttatgagataataaacatacaagtttaaagaaatgtctgtacataaatgtgattatagtacaaacaagtatttggaagttcatctaaacaaatgcatcacagtttataggcaaaacatgaaagattggataataatgggaaaaaaagtaaatattcaccaacattctttctcttttttctttttcgttttttttttttttgaggcggagtcttgcccttttgcccaggctggagtacagtggcaccatctcggctcacagcaacctctgccttctgggttcaggcgattctcctgccttagactcccgagtagctgggattacaggcacccaccaccacgcctgactaatttttgtatttttagtggagaggaggtttcactgggttggccagggtggtcttgaactcctgacctcaagtgattcgtttgtctcagccacattttttttgtctaagaagatactgggccagatcattgtttctcaaattgcagattatgacctgttcatagttgtgaaacttattttgtgagtcgtatatgctctttttaaatgaaatgaaaattctgagtacatcacatgtagttagggtttagaaaataaaaaatacaatatatctagttaaatttggacttcaggtaaacagcgaataattttgagatatacttaacactaaaaaattattcattgtttatctgaaattcaaatttaatgaggtgtcctgtattttatccagaagtcctacacacagtaaagtttgttttgtaaaacttttttacttaacctttgtgtgcccatgtgtgtgtgcagtcataaagtgtgtgtgtgtgtgtgtatttaaaaaactaggttgtactcaaagcctgagcttaatttattcccaaaccagtattacattttgtttattctagcaaaatagcattctgttttgattcctctttagctgggagtaagttaaccctattctgttgcttagatgaaataatatggataaaatcattttgaaaatatgtatttaatatatagtatgcctttaggctgtagtgttgtctaaatgaatgctaaagtctccaagctttagcttttaagtcataacctcacagcatcatctgactttccaactcattgtggacagtattaccataaagtaatgatcaccaagccatatcttaccaccttgtgagtagtactaaggaagtaagtatagtttattcactgtgttgattgacctttctaattactatacttaagtacttgaatcaattcattttgtttcaaatgtgtcatgtaatcaaatagtagatgtgctttttgatgtctgacaaaaaataagtttttgcattctagtgataatatacaatacacataaatttttatcttacagtcagaaatgaagaagcatctgaaactgtatttcctcatgatactactgctgtaagtaaatatgacattgattagactgttgaaattgctaacaattttggaatgccttgttaaattatttatcttacatttttaatttcctaatctgtaatttatctaagcctttgagaaagtctctaaacctggtcctatatgtgattttaacttcctgtgaaactctgctgtctctctgttaaagttgcatatatacaatatataccgtagtcccctattcatggggtatacattccaatatcccccagtgaatgcttgaaaccttagatagtaccgaaccctatatatatatattaaaaatgtgtagtatttatatatatatacctataatctttttttctataagcacataccctgtgataaagtttaattcataaattaggcacagtaagagattaacaagaactaataataaaataggacaattataacaaaataccgtaataaaagttatgtgaatgttgtctctctgtctcaaaatatcttattgttctgtactcatgtggcagcagcttcatcagcagatgtggcctctccagtaatttttatatttttcagtccaaacctattcttgaatctgtgtaaccaaccatcccttacttgcagtaaatggcttggtgtcattcatttcaggggatcccttactgaagttttcgtttaggctctatgctttctggcgtaatatgtagctgtcaatcaaaacaacctgttcatgttttctacccacaaatgtaataccttttctacttctatggtgcactgtgtggccacaacatttgcagtttgaggtgtgacagcaaaaccagctcatatgtctttctccttcacaatctcacagatagatttgttcttaccatagatgtcgcagtacaatttttttcctttccttaagtcgagaactttcactgtttcaattaaaggaagcactttatggcttctttttggcatatttgaattgccagcatcattatacttgtgctttggggccattgttaagtaaaataagggtgacttgaacacaagcactgtggtaccacaatagccgatctgataaccaagacaactactaagtgactaataggtgggtaccatatacagcctggatacgctggacaaagggatgattcatgtcccaagtgggatggagcaagatggtgcaagtttttttttctccatttccattttcctttcctaagatttccacatcctagtggtgcaagatttcatcacactactcaggatgacacacaatttaaaacttactaattgcttacttctggaattttccattaaaaatttttggacctaggttgattgcagataactgaaatcaccaaaagtgaaaccatggataaggggggactactactatatgtgcattgagagtttttatactagtgattttaaactataatttttgcagaatgtgaaaagctatttttccaatcatgatgaaagtctgaagaaaaatgatagatttatcgcttctgtgacagacagtgaaaacacaaatcaaagagaagctgcaagtcatggtaagtcctctgtttagttgaactacaggtttttttgttgttgttgttttgattttttttttttgaggtggagtcttgctctgtcacccgtgatctcggtttaccgcaacctctgcctcccgtgctcaagcgatcctgcctcagcttgccaagtagctgagattacaagcatgcaccaccatgcccaactattgtatttttagtagagatggcatttcaccatgttggccaggctggtctcaaatggtcgtgagccaccatgcccagcctgaactactctttttaattggcaccattgaaggattgctcctcttttcttaaagagaaaatatattacctttcctttcttgactactgaagtagtattttatctcaaagtattgagagtagaaactaacttggtgtgcctgtgatcccagctactcaggaggctgaggtgggaggatcgcttaagcccaggcggtcaaggttgcagtgagctgtgtgtgtgccactgcactcccacctgggcaacagagtgagaccgtgtctcaatggaaaaaaagagaaactaatttgatttcgatgacagtatttaaatactgtgtaagacagtactatttaatatgtggttgtgacacaaaaacaaagcctattgaaaattttcagagacaataagatatataattaacaaaatctgagctttttttttttctaattagaaagtaaatgtggtttagatataccatagtttacctaatcaggtcatggaatattgcatttttcttagtatgtgtgtatgtctgtataactgtgtaggatttgatatctgtttttgtctgtgtggtatcatgtacgtatgtatatgcatatgtaaaatcagatttacccttgttatagggccacagaattgatttggaacatctgttttgataggtcttagaatatttaattgtatatatagtaagattaggtgagttttaattgtgtagaactgctaaagaaaggtttttagggattgttgtatgaataaaaggctttaggttcattggaatcaggggaatcaggctttactagaagaacaggagaaggggtgactgaccgaaaaataaaatgccaagtactcagaataaccctttaaatactgatatgtaatatttagcacattctacataaactgtttctatgagaaaggttgtgagaataatataaattatatggcttataaaatattaatgtgcttctgttttatactttaacaggatttggaaaaacatcagggaattcatttaaagtaaatagctgcaaagaccacattggaaagtcaatgccaaatgtcctagaagatgaagtatatgaaacagttgtagatacctctgaagaagatagtttttcattatgtttttctaaatgtagaacaaaaaatctacaaaaagtaagaactagcaagactaggaaaaaaattttccatgaagcaaacgctgatgaatgtgaaaaatctaaaaaccaagtgaaagaaaaatactcatttgtatctgaagtggaaccaaatgatactgatccattagattcaaatgtagcaaatcagaagccctttgagagtggaagtgacaaaatctccaaggaagttgtaccgtctttggcctgtgaatggtctcaactaaccctttcaggtctaaatggagcccagatggagaaaatacccctattgcatatttcttcatgtgaccaaaatatttcagaaaaagacctattagacacagagaacaaaagaaagaaagattttcttacttcagagaattctttgccacgtatttctagcctaccaaaatcagagaagccattaaatgaggaaacagtggtaaataagagagatgaagagcagcatcttgaatctcatacagactgcattcttgcagtaaagcaggcaatatctggaacttctccagtggcttcttcatttcagggtatcaaaaagtctatattcagaataagagaatcacctaaagagactttcaatgcaagtttttcaggtcatatgactgatccaaactttaaaaaagaaactgaagcctctgaaagtggactggaaatacatactgtttgctcacagaaggaggactccttatgtccaaatttaattgataatggaagctggccagccaccaccacacagaattctgtagctttgaagaatgcaggtttaatatccactttgaaaaagaaaacaaataagtttatttatgctatacatgatgaaacatcttataaaggaaaaaaaataccgaaagaccaaaaatcagaactaattaactgttcagcccagtttgaagcaaatgcttttgaagcaccacttacatttgcaaatgctgattcaggtacctctgtctttttttttttgtaaatagtacatatagttttatagatgacgattccttctgtgtttttttctgctttttaaaatcttcatatcttatatttaatcttaggcatcatctgtatacatgattgtttaggtctttaattaccagtgtttagaatcaggtcactcaaacatggtagataagtttgcatagtttgtgtatatccatcactcttgagacagttttattttaagttccggggtacatgtgcaggatgtgcaggtttgttacataagtaaacgtatgccatgttggtttgctgcacctgtcaacccttcacctgagtattaagcccagcatgcattagctatttttcctggtgctctccttccccccacacacccccacctcctgacagaccctagtgtgtgttgttcccctccctgtgtccgtgtgttctcattgttcagctcccacttatgagtgagaacatgtgatgtttagttttctgttcctgcattagtttgcttaggataatggcttccagctccatctgtgtccctgcaaaggacgtgatcttgttcctttttatggctacatggtattccatggtgtatagttccacattttatttatccagtctatcattgatgggcatttgggttgattccatgtctgtgctattgtgaatagtgctgcagtgaatgtacaggtggatgtatctttataatacaatgatttatcttcctttgggtatataccccgtaatgggattgctgagtcagatggtatttttggttctaggtctttgaggaattgccacactgtcttccacaacggttgaactaatttacattccagccaacaacttgagacagtttttgactcataaacattcagagcttggctagctaattcctgctttaatttaaaaagtgtttattatatgcaaattggacaactcatataaatatgtggtgctacttactatgtattttctctaaagcatgttaaaaaaataggctagatatagtggctcatgcctgtaatcttagcactttgggaggctaaggcaggaggatcacttatggtcaggagtttaagaacaccctgggcaacatagcgagaccccatctctacaaaaaatttaaaatacccaggcatggtggcatgcttctgatgttgtagctactcaggatgctcagacaggaggatcacttgagcccaagtgactgaggctgcagtgaaccaaaattgtaccagtgcactccagcctgggccacaaaatgagaccttgtccctgaaaaaaaaaaaagaaaaaaaaaatttaaatagaggaaatactagctaagtttaatgtaggccagttctaaaataatgatttattgctgctgttgttacataattttcttaaatattttaaagattgcatactgttactgctctatttctgcatctccgtggtgtaactctgtcctctttgttgttgcaacagttcacttagcaactaaactgtatgtttacaaagtgattttatctccctatgagaagactttagtgaatagctcagtgaatagtagagttggtgagaccacagtacagaactgtttgaagtttgggttaaatttttagaggaaaatgtttgatactatgcatatcatagttaaagccaatgaaaaagctaatataggccaggcgcagtggctcacgcctataatcccagcactttgggaggccaaggcaggcagatcacttaaggtcaagagttcaagaccagcctggccaacatggtaaaaccccatctctatgaaaaaaaacaaaaattatccagatgtggtggcatgtgcctgtaatcccagctactcgggacgctaaggcaggagaatcacttgaacctgggagatggaggttgcaatgagctgagatcacgccactgcactccagcctgggtgacagaacgagactccatctcaaaaaaaaaaaaaaaaaaagctaatacatgtgatcactgatgaaatgcaattaagaactggttagtagaaaattcagagggtcaagaaatttaacagagcagttgaactcatttgcctttatcgttgagattagatcatctttcaggctgttagtatatggaccctgtttttaaaaattgtggttttgtttttttcaatgtgaaagaattaagaaaattgttacttttctaattccttttctgtgccttgcttttctgttcacaccagtattaacagcaatgaaattttttcaattttattttccaataaaaattactttgagttttttttatggtagctagctacttccttgacctagatactaattttgattgagttggtaactattattaaaaaaacaacttaggtctaatttatcttgagctaaaaaatgtaataactgaaaaatagagcatatttaggattctttctgctttaaatttgacattcagttattttcatgtaatttgtgttttgagcactaccttttaattaatttatttatttttattttttagagactgtctcattctgttacctagtctggagtgcactagtgtgatctcagctcaccgtagcctcaccctcctgggctcaagcagtccttgcacctcaccctcctgagtaactggcaccacaggcatacaccaccacacccagctaatttttatttttcatagagtcatggtctcactatgttgcccaggctagtctcgaactcctgggctcaagcagtcttcctgcctcagcctcccaaaagtgctgagattacaggcatgagccactgtgcccaaacactacctttttaacttagtgaaaaatatttagtgaatgtgattgatggtactttaattttgtcactttgtgtttttatgtttaggtttattgcattcttctgtgaaaagaagctgttcacagaatgattctgaagaaccaactttgtccttaactagctcttttgggacaattctgaggaaatgttctagaaatgaaacatgttctaataatacagtaatctctcaggatcttgattataaagaagcaaaatgtaataaggaaaaactacagttatttattaccccagaagctgattctctgtcatgcctgcaggaaggacagtgtgaaaatgatccaaaaagcaaaaaagtttcagatataaaagaagaggtcttggctgcagcatgtcacccagtacaacattcaaaagtggaatacagtgatactgactttcaatcccagaaaagtcttttatatgatcatgaaaatgccagcactcttattttaactcctacttccaaggatgttctgtcaaacctagtcatgatttctagaggcaaagaatcatacaaaatgtcagacaagctcaaaggtaacaattatgaatctgatgttgaattaaccaaaaatattcccatggaaaagaatcaagatgtatgtgctttaaatgaaaattataaaaacgttgagctgttgccacctgaaaaatacatgagagtagcatcaccttcaagaaaggtacaattcaaccaaaacacaaatctaagagtaatccaaaaaaatcaagaagaaactacttcaatttcaaaaataactgtcaatccagactctgaagaacttttctcagacaatgagaataattttgtcttccaagtagctaatgaaaggaataatcttgctttaggaaatactaaggaacttcatgaaacagacttgacttgtgtaaacgaacccattttcaagaactctaccatggttttatatggagacacaggtgataaacaagcaacccaagtgtcaattaaaaaagatttggtttatgttcttgcagaggagaacaaaaatagtgtaaagcagcatataaaaatgactctaggtcaagatttaaaatcggacatctccttgaatatagataaaataccagaaaaaaataatgattacatgaacaaatgggcaggactcttaggtccaatttcaaatcacagttttggaggtagcttcagaacagcttcaaataaggaaatcaagctctctgaacataacattaagaagagcaaaatgttcttcaaagatattgaagaacaatatcctactagtttagcttgtgttgaaattgtaaataccttggcattagataatcaaaagaaactgagcaagcctcagtcaattaatactgtatctgcacatttacagagtagtgtagttgtttctgattgtaaaaatagtcatataacccctcagatgttattttccaagcaggattttaattcaaaccataatttaacacctagccaaaaggcagaaattacagaactttctactatattagaagaatcaggaagtcagtttgaatttactcagtttagaaaaccaagctacatattgcagaagagtacatttgaagtgcctgaaaaccagatgactatcttaaagaccacttctgaggaatgcagagatgctgatcttcatgtcataatgaatgccccatcgattggtcaggtagacagcagcaagcaatttgaaggtacagttgaaattaaacggaagtttgctggcctgttgaaaaatgactgtaacaaaagtgcttctggttatttaacagatgaaaatgaagtggggtttaggggcttttattctgctcatggcacaaaactgaatgtttctactgaagctctgcaaaaagctgtgaaactgtttagtgatattgagaatattagtgaggaaacttctgcagaggtacatccaataagtttatcttcaagtaaatgtcatgattctgttgtttcaatgtttaagatagaaaatcataatgataaaactgtaagtgaaaaaaataataaatgccaactgatattacaaaataatattgaaatgactactggcacttttgttgaagaaattactgaaaattacaagagaaatactgaaaatgaagataacaaatatactgctgccagtagaaattctcataacttagaatttgatggcagtgattcaagtaaaaatgatactgtttgtattcataaagatgaaacggacttgctatttactgatcagcacaacatatgtcttaaattatctggccagtttatgaaggagggaaacactcagattaaagaagatttgtcagatttaacttttttggaagttgcgaaagctcaagaagcatgtcatggtaatacttcaaataaagaacagttaactgctactaaaacggagcaaaatataaaagattttgagacttctgatacattttttcagactgcaagtgggaaaaatattagtgtcgccaaagagtcatttaataaaattgtaaatttctttgatcagaaaccagaagaattgcataacttttccttaaattctgaattacattctgacataagaaagaacaaaatggacattctaagttatgaggaaacagacatagttaaacacaaaatactgaaagaaagtgtcccagttggtactggaaatcaactagtgaccttccagggacaacccgaacgtgatgaaaagatcaaagaacctactctattgggttttcatacagctagcgggaaaaaagttaaaattgcaaaggaatctttggacaaagtgaaaaacctttttgatgaaaaagagcaaggtactagtgaaatcaccagttttagccatcaatgggcaaagaccctaaagtacagagaggcctgtaaagaccttgaattagcatgtgagaccattgagatcacagctgccccaaagtgtaaagaaatgcagaattctctcaataatgataaaaaccttgtttctattgagactgtggtgccacctaagctcttaagtgataatttatgtagacaaactgaaaatctcaaaacatcaaaaagtatctttttgaaagttaaagtacatgaaaatgtagaaaaagaaacagcaaaaagtcctgcaacttgttacacaaatcagtccccttattcagtcattgaaaattcagccttagctttttacacaagttgtagtagaaaaacttctgtgagtcagacttcattacttgaagcaaaaaaatggcttagagaaggaatatttgatggtcaaccagaaagaataaatactgcagattatgtaggaaattatttgtatgaaaataattcaaacagtactatagctgaaaatgacaaaaatcatctctccgaaaaacaagatacttatttaagtaacagtagcatgtctaacagctattcctaccattctgatgaggtatataatgattcaggatatctctcaaaaaataaacttgattctggtattgagccagtattgaagaatgttgaagatcaaaaaaacactagtttttccaaagtaatatccaatgtaaaagatgcaaatgcatacccacaaactgtaaatgaagatatttgcgttgaggaacttgtgactagctcttcaccctgcaaaaataaaaatgcagccattaaattgtccatatctaatagtaataattttgaggtagggccacctgcatttaggatagccagtggtaaaatcgtttgtgtttcacatgaaacaattaaaaaagtgaaagacatatttacagacagtttcagtaaagtaattaaggaaaacaacgagaataaatcaaaaatttgccaaacgaaaattatggcaggttgttacgaggcattggatgattcagaggatattcttcataactctctagataatgatgaatgtagcacgcattcacataaggtttttgctgacattcagagtgaagaaattttacaacataaccaaaatatgtctggattggagaaagtttctaaaatatcaccttgtgatgttagtttggaaacttcagatatatgtaaatgtagtatagggaagcttcataagtcagtctcatctgcaaatacttgtgggatttttagcacagcaagtggaaaatctgtccaggtatcagatgcttcattacaaaacgcaagacaagtgttttctgaaatagaagatagtaccaagcaagtcttttccaaagtattgtttaaaagtaacgaacattcagaccagctcacaagagaagaaaatactgctatacgtactccagaacatttaatatcccaaaaaggcttttcatataatgtggtaaattcatctgctttctctggatttagtacagcaagtggaaagcaagtttccattttagaaagttccttacacaaagttaagggagtgttagaggaatttgatttaatcagaactgagcatagtcttcactattcacctacgtctagacaaaatgtatcaaaaatacttcctcgtgttgataagagaaacccagagcactgtgtaaactcagaaatggaaaaaacctgcagtaaagaatttaaattatcaaataacttaaatgttgaaggtggttcttcagaaaataatcactctattaaagtttctccatatctctctcaatttcaacaagacaaacaacagttggtattaggaaccaaagtgtcacttgttgagaacattcatgttttgggaaaagaacaggcttcacctaaaaacgtaaaaatggaaattggtaaaactgaaactttttctgatgttcctgtgaaaacaaatatagaagtttgttctacttactccaaagattcagaaaactactttgaaacagaagcagtagaaattgctaaagcttttatggaagatgatgaactgacagattctaaactgccaagtcatgccacacattctctttttacatgtcccgaaaatgaggaaatggttttgtcaaattcaagaattggaaaaagaagaggagagccccttatcttagtgggtaagtgttcatttttacctttcgtgttgccaatcactatttttaaagtgtttattcagtagacttggtatgctaacaattaagagtgttataaactatgtcttttcagccatttttgtgtagtcagtttgggggagtatggtttgatatacagatacacagattcagtattcgtatacagatttgatatcttggtatacagattcgatatctctgaatctgtataccaagaaatcatgttttaagggtctcaatatattttcaaaaagattattagtataataattgagaaattactgttaaaaagttttgagtttctctagaaaatttgaaactcttaacaaaacctgcataatactaacttaactgttttcatatacatagcaagttcagactctgacttatatgaactttaaaagttggtttccgggaggccgaggcgggcggatcacgaggtcaggagatcgagaccatcccggctaaaacggtgaaaccccgtctctactaaaaaaatacaaaaaattagccgggcgtagtggcgggcgcctgtagtcccagctacttgggaggctgaggcaggagaatggcgtgaacctgggaggcggagcttgcagtgagccgagatcccgccactgcactccagcctgggcgacagagcgagactccgtctcaaaaaaaaaaaaaaagttggtttccgattataccatttactgggtaatatatactacttagttacactacttacatagcttcagtttccttatctataaaatgcaaataacacctcccatgagggctgggcgtggcgctcatgcctgtaatcccagcactttgggaggccgaggtgggtggatcacctgaggtcaggagtttgagaccagcctgaccaacatggtgaaaccccatctttactaaaaatacaaaaaattagccaagcgtggtggcgcgcacctataatcccaactactccagaagctgaggcaggagaatcacctgaacctgggaggtggagggtgcagtgagctgacatcacaccactgctctccagcctgggcaacagagcgagactgtctcaaaaaaaaaaaaaaaaaagtgtatttaaagcacttagcagtgaacttgacatatagtaggcagagagcattcagtaagtgttggcttgctccctttttttcatttaggaagtgatctaaaaacagtattgttagtaaatggtatcttgatcttaatgttatgtggactattttaacttcccttttaaatgtatatatatctaacaacttagttcaactacagtcatgtgtcatttgacagggatatatgttctgagaaatagattgttagatttcatcattgtgggaacatcatagagtatacttacacaaacctaggtggtatagcctactatatacctaggctgtatggtatagcttattgctcctaggctgcaaacctatacagcatgttactgtcctgaatactctaggcagttttaacacagtggcaagcatttgtgtatgtgaacatagaaaaggtacagtaaaaatacggtattaaaatcttatggggctgggctcagtggctcatgcctgtaatcccagcactttgggaggctgaggcaggcggatcacctgaggtcaggagtttgagaccagcctggccaacatggtaaaaccttgtctctactaaaaatataaaaattagctgggcatggtggtggcacacgcctgtaatcccagctactagggaagttgaagcaggagaatcacttgaaccctggaggcagagatttcagtgagccaagatcgcaccactgcactcctgcctgggcgacagagcaagactccatctgaaaaaaaaaaaaaatcttatgggaccactattaaagtcttataggatgaccattgcatatgtggtctattgttgaccaaaatgtcattatgtggcaaatgactgcattaggttaaccttatacatacctatattaggtatgtatttggttttgtttttttgtgtgtgtttttttctattagtgtatctgactggtaataatcttaaataattgaatctgtttgttagttgcaattaaagcaaatgccaaaactccaacatttcagtggataatcttaaataactagttcctttttaaaaaacctataaactcataaaaatattttagttattagaactcttcctgtctagaccccatgtattacagagagacaccgaagttagtctcctcattcaaaaagtgccttttgcccctaagtcattctggtggatacagatttacttaatcaagtgttgtccaggtcacattcaatataggatttactttatggacaaagtagtacgtttatagtacttaaactatttgctgtcctttagtgtgaaattctgaggtatatatgcttaaagatatttgtaattcttttgtggaaaataatggctttatttatagcaacccattctgttcttgtgcatactgaagtatattgactttccacctagggaaaaaaaaaacaataactcagacttgtaaatgctttcaacggtgttactacttaatttccctcatttctgtaacatataagtgtataacttagtcagcttctggttactggaacagtacaggtcactgttaaacaattaaaccacttttataataatctaacacctcctaaagccttgcatggacatttttacttattaaattatacaaatttattccctgtaataaagcatcaaaaagcaaagtacctgttatatattatctcagcatgacatggaaatgcctaccttgaattatggtttaatcttaccctcttagcctctgtagaatttttaaataagaattgtttctattactagtactttaatgtaatttgataattgtaaaaagcctcttaactctaattcaaggacctacataataaattactccttcagttaatggctgcccccgtgctgaaaaaaaaaaaaaaaaagagagaaaaagtttatttgaagaaattttgttaggccttattgccagtaaacctagagttatatttagtgtcagtttttcaaaaagtagcttatctgtggtatctggtagcatctgtttatcctatttaggatttatcctgtttagaccctgttaaatagtggtgttttaaagtggtcaaaacagaacaaaaatgtaattgacattgaagactgactttactctttcaaacattaggtcactatttgttgtaagtatttttgtttaacatttaaagagtcaatactttagctttaaaaaaatggtctatagacttttgagaaataaaactgatattatttgccttaaaaacatatatgaaatatttctttttaggagaaccctcaatcaaaagaaacttattaaatgaatttgacaggataatagaaaatcaagaaaaatccttaaaggcttcaaaaagcactccagatggtaaaattagctttttatttatatctgttctccctctataggtatggtatataatattctgacctcaggtgatccacctgcctctcaaagtgctgggattacagacatgagccactgtgcctaatcaaggacctctttatactcttaaaaattactgaggacctaaaagagcatttgtttatgtggaatatatctattgatatttaccatattagaaatgtaaattgattaatgttaaaattagtaatattatgcgttggtcatttggaagatatgagttcactgagttatgcggatcttccgaaagttgacagttttattatgcagtattaaacaatcactttcattgatgccattaccgatcagaaaagtttaagtagtagaaagctgtcaagcttacagagccagatacaagcttcccaaaaattctgattttcatctaaaagcttgaatttttccccggcaataagtattgtcacttatttttcttgtaggtgacaagcttattttcattcatttttgaaaagatgtctgccgaatacccaagtctgaataactatagtttgttggttattctttcaagtaaaaggtatttcatgaaaaaatagctagtatagctcacaactcaatcatttaagtgtgttttcttgagaaacgcactgaagtatgcaagcataatataccaacagtacaaatatcaacagtgaaaaggacatacataacattttactaataagacagttttgacagcttggattccctaaaatggttgtagatacctaacaggattccactgatcatttcttgagaatcattgtcctataatatatacataataatctaaatttacaatatcagtattaactactgacaataaaactactaaggaaaatgtaagaattgtttgcagtttttgtccttagagtatataggttgagtatccctatctgaaatgcttgggaccaggactatttcagatttcagattttttcagattttgaaatgcttgcatatacaatacataatgagatatctggggataggactcaagtctaaacacgaaatttatttaagtttcataaacaccttatacatataacttaaatgtaattttatacaatattttaaataatttttgcataagacaatttaaattgtgatccatcacatgaggtcagatgtggaattttctactggcctcatgttggcactcaaaaagtttcaggtttgtgaccattttggattttcagattagggatactcaacccatatattattaagaatgtttagtcaaaatactgtgttcaaatgtcactcaaaataattcttccggatgtggttaccaatttgataattaggttacattcctttttttccatttgttttcaattttaggatttgtcttttcttatttaattttacatttgaataaataaaacattacatagttcattcatcagaactacaaaaaggtatacttagagtttttattcacccacctcttgcttactataggtaatcttttttagtgtttttttttcaggattctgtttaataaaaataagcaaatacatgtatatactcattaccctttcttactcaaaagatacagtatatacaccattttgcaccttgtttattggttgttgtttacttaagaattatttggagatgactccttaatgagtatatagagatcgtcctcattcttttttgtggttacatagtagttgatcatctggctgtgtcagtgtttcctagtttatttaaccaatttccaactagtggacttattgaagatttaattaggttccagttacatactgagaatgaacaatatctaaagcttagcttttaaaccttcataagactaaattttaaatttggtatttgcatcagaaattagctaacacctttgagttatgatggttaacatcaactgactaaatttatgctgatttctgttgtatgcttgtactgtgagttatttggtgcatagtcattatcaatttgtgaatcaatttattttcatagttaacatttattgagcatctgttacattcactgaaaattgtaaagcctataattgtctcaaattttttgtgtatttacagtaacatggatattctcttagattttaactaatatgtaatataaaataattgtttcctaggcacaataaaagatcgaagattgtttatgcatcatgtttctttagagccgattacctgtgtaccctttcggtaagacatgtttaaatttttctaaattctaatacagtatgagaaaagtctcgtttttataaatgaacatttctaaaaataatgacactaacgttaagaagttaacacttcccgttttataaaatttataaaatactttggtagtattttatagtgctgttcatatcattattttattttttaattttatgacagctttgtaaagtagacagattttattctaattttatggatgaagtactaaggttgagaggaattaaggaaattgctccgaatcagttaacaaaaagattgcagatattaaaaatatccttttatctctcctctctaaacctttaaaaaagtactaagatagtttttttaatgtataattcccaaggacaatgatgagaagaaacaacaaaagtttggaagccaaaaacataaaggatttagtaagcatgagaaagctaaaacctgacactagagcaaacagagatgctttcccctaaaaaacctgaaaaagattcaaattggcagcaacaggtacttctgaaggtgaagtagaaaataggaagattagttgaaattctttttaagaaacatctatatttcctcccccactgcaaataggcggttatccttcttctgccaggaaatcagaaggttgttcttgaaaaagatgaattgagaggattctgaattgaaggtgggctggagggaggggacaccaggcacaattgagggaaagatactaaaatgaaagatcagatacaaatctgtatgtcaagcagtgagacctagctccttcccacacttggttcccaaatgcaggccctctaggcatgagactggaagatttttttttcctagggaatatgcctgacccaatagaaaagaccaaaaaatactgacagttgaggatactcagatgaaacagtatagccagtcaccagaccaggaagttaactgttgacatgcacagagcttccaggaagctacttagtgcttcacttttaaataagaaaagatagtcaaagataactagtcattggaagaaagctactatgaaacatagtcaccaaagtacaaaatccatagcagaaaggaacctagaggaaatcgactatgaaaacttcataaaaacctactaatattctcaggtaagaaaagaaaaaatggccgtaaaataagaacaagttgctataaaaagctcttagaaattaaaaatatgatagcacaaataaattaactcagtagaaataatggaagaatcatgaaagttcccagaatacagaataaaatgaaaaaaggtatgaaaagtcaattctgtggatctatcatctgaa

SEQ ID NO: 691 - DNA, 32744 bp, Homo sapiens; identical to SEQ ID NO: 6
  source 1..32744: mol_type = other DNA

SEQ ID NO: 692 - DNA, 32742 bp, Homo sapiens
  source 1..32742: mol_type = other DNA
aagaggactgcgagcacagcggcggccgggtggcgggggtgagtggggccagcggggctggacagcagcgggccccgggcgccgccgccgcgatccctccccgcgcccgccgagcacatcgccgccgccgagatgggccctccgcggcacccccaggccggcgagatagaagcgggcggtgcgggcggcgggcggcggctacaggtaaagaggcacagtgctcgtcttgtggtcgggtccccagatcgcccgtccgcacccccaccccggagacgggggtctcacactccgaggtgtctggaaaccggcgtcctccggtctcagcgggggcttcgcggtggggtggggttgcgggcgaatcgggagatcgcttggctcctgagggaaaagtggggggcgattttagggaagatggagaaggtgtagggtcctctggctctgtgaggggatctgtggaagagaaggaaaaggaaatccgtaaatggaggcctttgccgaaaagcattggagaattccttttgcatcgggtctggatgtaagatatcggatcttttcttagggctggatatcttcctccgaatgttcctatgacatactaatcacagttctgttcaccttggtgtgagatttgagtgtttcaaagagacatgccattttccataaaactttacacagagaaatacacatgcattgtggtaatacctgtcatgtgactcttgtacaggattcaatggtgatttttttagcatagcaatccacaagtatttatggagggtcatagtacccgccagctccgtataaacaatatttgtagaaaacttaggtagtttagataatgtctgcatttatattgatcccaagttattgtttttaaataaatgatgcagcatttgcttttccaagggactatctcataggtactaaagatgctttaatttctcagtattgattcagatctcagaatctagtaataaccatataactgtatgtactacaggtggaaatgagttctcaacagtttcctcggttaggagccccttctaccgggctgagccaggccccttctcagattgcaaacagtggttctgctggattgataaacccagctgctacaggtgagatatgtaatattctaatatattttttcctactttaagaatattaccagttttctaacttaaaaattagcagattcttctaggattttagtaaattcttgtttcttgaatttgaagaaagggtatattactattctaatttaaacaaggctttttttccttcctgttttaaccacttcattcacatagagtacacatgcaacttatagcaaagcgtgcctgtaagaactgtttttgaaatgcattaatatattcttgtttaattaatgtccaggagtatagcattagtgctgtgagggagcccagaggtgtttaaggaacagatcttgtcttttaggggtttattatctaggaaaagaagtggaaaacaaaggatatgcggtttccctatggtgtctgtgggggattgtttccaggacccaccttagataccaaaatccatgatgctccactttctgatgtaaaatggtatagtgtttgcatattacctatacctatcctccagtatattttaaatcatctctagattacttgtaatacctcctacaatgtaaatggtatgtaaatagttgttatactgtattgctaagggaataatgacaagagaaaaaagtctgtatgtgcttagtacagatgcaagcagggtttttttccccccctgaatatttaacatccaaagttggttgaattcacatcagggaacccatggatacagagggctgattgtatacacatagataaaacttggtttttagtcttataccctttgagtggtagaaattagtggttctcagtgacaggtgtttggggaggtgatttttcctccaggggagtacttggcaatatctaaagacagtttggttgtcacaactaaagagtactattggcatctgataggtagaggccagggatactgcttaacatcctgcaaggtaatgggaagccccccacaacagagaagtatccagtccagtcagcagtgctgaagttgaggaattccttcaaatactctttttctctatgtattaagtaaatatatgacattgcaaagtgaaataaatgcttttctattcctttttcttcaccactggattctggtgttccttatggtaaatgataccactgtctactcattgctcaaaccagtagctgaggcttttttttttttttttttgcgcaatagggtctcactctgtcactcaagcggcagtacagtggcataatcacagctcactgcagcctcgatcttttgggctccccagctaattttattttattttttatttttttaatttttttgagacagagtgtcactctgtggcccaggctggagtgcagtggtgcgatctcagctcactgcagtctctgcctcctgggtttaagtgattcttgtgcctcagcctctgagtagctgggattacaggcatgcgctaccatgcctgggtaattttttttttttttttcgcatttttagtagagacagggtttcaccatgttggccaggctgatctcggactccggactccagacttcaagtgatccaccctccttggcctcccaaagtgctgggattacaggcatgagccaccacacccagccacatgttcagctaattttaaatttttttgtaaagaggggatctcacaatgttgccgaagctggtctcaaactcctggactcaagtaatcctccgttctcagcctcccaaagtgttaggatcacaggtgtgagtcactgtgctgagctggaagcatctttaattgctctgcgttttcttatgagctatggcccttgtctaatgttccagcctcatttcttactatttagccttcctcctgccaacctaattttttttttttccaatggagatggagtcttgctatgttgaccaggcttgtctcaaactcctggcctcaaggaatcctcccgcctaggcctcccaaaattctgggattacaggtgtgagccacttgggtggccgccaacttagtttttgttataaatttattttagttctctttagacttgaagtgactttaagctacttatgactcctgctcgatggtatctactcatatttctaaataaatgattaaaaaattcccaatttcacgactttgggactttgcacattcttttccttttgccatagtcttccttgtttctttccatatacttacttatttggctaattccttcttttttcaagtttcaacttagatgttattttctctagaatattctagagaatattattattctctagaataacagaagactctatcttccataacaactcaggtagagaatctagaaatagaaccagatatatatagccaattgatttttgataaaagttcctaagtaattcaatagggaaatgatagtcttctttttttctgagacggagtctcactctgtctcccaggctggagtgcagtagcatgatctcggctcactgcaagctctgcctcccaggttcacaccattctgcctcagcctcctgagtagctgggactacaggcgcccaccaccgtgcccggctaattttttgtattttttagtagagacggtgtttcactgtgttagccaggatagtctcgatctcctgacctcttgatctgcccgcctcagcctcccaaagtgctgagattacaggcatgagccactgcgcctgatggtcttttcagtaaaatagtgctggaagatcataacatcattatgggggaataaaggctgtgtgcagtaggctcatgcctgttatcccagcaccatgggaggccaaggcaggtggatcgctttgagctcaggagtttgagataagcctgggcaacatggcaaatccccgtttctacagcaaatacaaaaattagccgaggccaggctaattgtacagtggctcatgcctgtaatcctagcattttggaaggctgaggtgggcagatcacctgaggccaggagttcgagaccagcttggccaacatggtgaaacctgtctctactaaaaatacaaaaattagctgggcgtggtggtgggtgccggtaatcccggctaatcgggaggctgaggcaggacagtcacttgaactttgggaggcagagcttgcagtgagccaagatagcgccactgcacttcagcctgggcaacaaagcaagattccgtctcaaaaaaaaaaaaaaattagccaggtgtgatggctcatgcctatagtcccagctacttgagaggctgaggtgggaggatcgcttgagcctgggaagcggaggttgcagtgacctgagatcttaccaatgcaccccagcctgggtgacggagtgagatcttgtctccaggaaaaaaaaaaacaagaacttataactcagtagtaaaaagacaaacaacctgattttttttaagacgggaaaatatttgagtacagaagagctagataagtgccaaagaagcacatgagaagatgctcaccattattaatcctcagggcagtgcacattaaaaccactgtgagaaactactgcacatccagtagaaagactgaaattacaaagactgacaataccaagtgttggaatggttgtagcgcaaatagaactcatactttattgttgggaatgcaaaatggctagccacttcaagaaacaatttggcaatatcttataaaattaaatatacacttaccacaccactgagcaatctcattccataggtatttatcaaaggtaaatgaaaatatatgtttatacaaggacttatattcacatgttcgtagaaactgtattcataatagccaaaacagggttctcaccaaatgtctatcagatggtgacaggataagcaaattgttgtgtgtccatccgtgcagtggaatgctacttggcaataaaaaggaccagactaccagtatacacaacattatggataaccctcagtaacattacactaaggagagaatccagatacataggactacagatggtatgattgtgttatgtgaaattccagaaaagactatgccatagtgacagaaagcagatcagtggtttctggagaatagaggttgtggggagggaattgactgcaaaggggtgtgaatgaactcactggagtaacaggaaatgatctgtatcatgattgtgttataccgctgtatacttttgcgaacacttatctaatgttacacaaagaattagtgaattttatatgtaaattgtacctcagtaaagctaattgattaaaatggacaaaagataaacatgcacttcactaaagaagatatatatgaatgggctgggatcacataaaaagatgttcaacattactagtcatcatggaaatgctaattaaaactacagtgagacacacactacaacccactagaatggctgtatatcaagcaatgagtaaggaagaggagcagcttgtatactgctaatgggaacaggcaatgctacaatcactttggaaatgacttcggcaaagttaaacatatacttaccatttgacccaaccattctgctccttggtgttgctgaggatatttgtaaaaaaattattgaacttttcttgtaaaccagtggtggtattctatgtaatctattccccaataaagaggttttatagatcaaaattttaaaaattctgaatgacctgggagaaaagtcaatatatagtgaaaaagaaaacgtatatcagtcttttctttcctctctgtttttttgtttttttttttttttgagatggagtcttgttctgtcgcccaggctgtagtgcagtggcgcgatctcgactcactgcaacctccacctcccgggttcaagcaattctgctgcctcggcctcccaagtagctgggactataggcgcccgccaccatgcccagctaatttttgtatttttagtagagacagggtttcaccatattgtccaggctggtctcaaactcctgactttgtgatccgcccgccttggcctcccaaagtgctgggattacaggcttgagccaccacgcccggccacatcactcttttcatccagcacttgtacttttaggaattttttcctgaagagatcattggacaagattgttgataaaagcaaaaatttggaaataacctaaaagcccatcaatgatacagtgattttaaaagctatagtacatctatacaatagaatcccatttcactttttttttgagacagagtcttgcttcgttgcccaggctggagtgcacagtcttggctcgctgcaacctctgcctcctgggttcaagtgattcttccgcctcagcctcccgagtaggtgggattacaggcaaccgccatcatgcccagctaatttttgtatttttgtggagacggggtttcaccatgttggatgatggtcttgaactcctgacctcaggtgatccacctgcctcagcctcccaaagtgctgggattatagacatgagccactgtgcccggccccatttcacctttaaaaaatgatgcagtattctctacccagtagttctaatcctaggtatatattgagtagaagtggtacatatgttcaccaaaagacacgtacaagaacattactagcactattcaaaataggaacaaactgaaaactaaagtgcctcttaagagtaaaatggataatttgtacgttactcgtgtgtcgtactatatacagcattgagaatgaaagatctacagctgtgtacactaatgtgaatgaatctcatacctgtaagtgaaagaggcaaagcacaatagggtgtatttgttataagtctgtttacgtaaagttaaaaaacagacaatactaatctatagtgttacaaggtagaagattgatttccttcggaggatagtggctagaatagggccaaactaagggtctctgggggaccaataatgttttctatcttgagctgggtgctatttactcaggtttattcagtttgtgaaagtccattgagctgcacagctaacatttgtgcacttatctttatgaaaatcatacttcaagaaaaaaaagtcaaatgaataaaaacccaaaatttaaaagaagcgagaactgtcaccaaaactttaagtgttggtgcctttgtggggtaagtttgggggcaacattactttgtttatggtactccaaataatttaaattctctacataagtaaatattatctttatgctcagaaaaaaaattattttggaaaaattatagacaaatatgagttaatattttcacaagctcttcctttattacatcagtattgttctctgatttttttccacttaattttttttttttgacacagagttttgctcttgtcccccaggctggagtgcagtggcaggatctcccaacctccacctcccgggctcaagcaattctctggcctcagcctcctgagtatctgggattacaggtgtgcaccatcacacctggctatttttttgtatttttagtagagacagggtttcaccatgttggacaggctgatctcgaactcctgacctcaagtgatctccccaccttggcctcccaaagtgctgggattacaggcgtgaaccaccacgcccggcctccactgaatttttaaatacttaatttttaaataggccaggtgcagtggctcacacctgtaatctcagcactttgggaggccagaggtgggaggaacactcgatcccaggtattcaagaccagaccaggcaacatagtggaactctttcttcataaaaaaataaaagaattagccaggtgtggtggcatgtgcctgtagtcttagctgcttgggcagcggaggcagaggctcacttgagtccaagagtttgaagctgcagtgagctgatatcctgtgacttcgttacagcctgggagacagagtgagaccttgtctcaaaaaaaaaattttttttaattaaaaaaaatttttaaatagattgtcttctggtagaccaaaacaccaaaagaaaaagagcatacattggaaaatatctctcctatctctgtccctcagttttgaaaaattatatgttcttaaagttaggaaccgtacttaaaatatcttttttttttcttttttttgagatggagcctcactcttgttacccaggtaggagtgcagtggcgcaatctcagctcactgcagcctcccatctcctgggttcaagtgattctcctgcctcatcttccctagtagctgagattataggtgtgtaccaccacgcccggctaatttttttgtatttttagtagagacggggtttcaccacgttggtcaggctggcctggaactcctgacttcaaatgatccacctgccttggtttcccaaagtgctaggattacaggctgtgctcagcccccaaccaccttttttttttttttttgagacaaagtctcactgtgtcatccaagctggagtgcagtggcacaatcatggcttggctcactgcagccttgacctcccagggttaagtgatcctcctccctctgcctccaatatagctgggattacgggtgcatgccaccatgcccatttaattttaaaattttttgcagagatggagtcttactgtgttgccaaggctggtcttgaactcctgggttcaagggatctgtttgccttggcctctcaaaatgctaggattgcaggtgcaagccactgcaccagccatcctttttttttttttttttttttttggagacaatcttcctctctcgcccaggctagagtgcagtgacggaatcttggctcactgcaacctctgccttttgggctcaggtgatcctcccaccttagcctcccaagtagctgggattacaaaaaaacgtggtttttggtttttggtttgttttttttttttttttttgtatttttagtagagatagggttttgccatgttggccagcataaaatatctttttaatgtcaggcttttataactttctaagaggatgttttaaatgaaattgtcttacatcctgtattgtacttttaactatttcagctcattttagatgattttcaggtagtttgttcataaggctacaatatccagaataaattctatattccacagttgtggctcttttgtctgatgtccatcaggagaatccagtgcccatattgaccttgttaagaaaacatcacaaggaaatggccactttgtcaatcctgagatttaacttcaggtaccactcttgtctgtgctgctatcttacactgggagactgtgacatactgtctcactcttaatgtctttactagtcaatgatgaatctggtcgagattctgaagtcagtgccagggagcacatgagttccagcagctccctccagtcccgggaggagaagcaagagcctgttgtggtaaggccctatccacaggtgcagatgttgtcgacacaccatgctgtcgcatcagccacacctgttgcagtgacagccccgccagcacacctgacgccagcagtgccactttcattttcggagggacttatgaaggtaatggagagggttaaaacttcacactgaaccagagctcgagactggctaatgtttgtaacaatttgtataaaatcttaggctgtatcttaggatcacatttcattttttctttatgacatatgagttcagctcctttctgtaactcagccctgattttctgcagtgccttgtcttgtgctgctgggcagttggcatcataggatctttgctgttatccattttgatactgatattattcaacttatgggcatgttaagttagatacaatcttgaagggaccctcttttttttttaagccagtcagatttagcagtgggggcttaatgacattaatgttttgtttctgtttttatttgagacggagtctttctctgtcatccaggctggagtgcagtggtgcgatcttggctcactgcaacttccacctccaaggttcaagcggttctgcagcctcagcctcccaagtagctggtattacaggcgcacgtcactacgcctggctaatttttgtatttttagtagagatggcgtttcaccatgtcggccaggctggtctcaaactcctggcctcaagtggtctgcccgccttagcttcccagattgctgggattacaggcgtgagccactgtgcccagctgacagtaatgttataagttcagataacccagtaccatgggaccaagtggagtggcactcttctttaaggtttgttttaataactggttaatttgggggtttctgagaatattgcctgtgtattaccttggggttgtgtttcagttactgggagttttgttcaatccacccaaacttgggaggcagcatcatgtagaagaaagggtgtgggctgtgagccatacagctctgggctttattcccagttctacttcttactgtgtgtgtggctttgagcaagtcagttagccttgctttgtatgtttctttatctgtgaaatagaaatgctagtacttcagtggaaacactgtgatgataatagataaaatgtataaagcttacggcatctttcctggcactttccaggttcgatttgtgcactcttaattgtggattgaaatgcatcaccagtatgaggccattgatatgttttgtgtggttttctgtttgcagccgcccccgaagcccaccatgcctagccgtcccattgctcctgctccaccttctaccctgtcacttccccccaaggttccagggcaggttaccgttaccatggagagtagcatccctcaagcttcagccattcctgtggcaacaatcagtggacaacaggtttttcttccttttaatttgctgattttcaaactgaaatgccaaactgttgatcatgatttattgaatgctagcagtacattagtcacggtaataaaaaaagatcaaacagtcactgatacctgcaagtgaagatagtaggtttgagagagaaggataactgtaaagggagtagaagccagtgtccatagtggtcatttagctagaatttattgagcagctactagatgctcgattcgaccctagtgtgatatataaatctagataaaacagtccgtgtccttgaggagtccggagtccggttcgtgtttggttttagcgtcaagaactgccttccgggggtaggcagtgctgctctgtggtttctctgaggagagcagatgtgcatctcttgggataggttacctcaagcagctctctagttccaaacttttttttttttttttttgagacagaatctcacggtgtcacccaagctggagtgtagtggtgcagtcttggctcacagcaacgtccacgtcccgtgttcgagccattctcttgcctcagcctcccgagtagctaggattacaagcgggcaccaccacccccagctaatttttttattttaatagagacggggtttcaccatgttggccaggctggtctccaactcctgacctcaaatgatctgcccgcctcggcctcccaaagtgctgggattacaggcatgagccaccgcacccagccttagttgcgaacatttattctgaagtcttctgttttaaggtttttttgtgaaattttgcaatcctactctgctgtgtacctgattaattaaatattttacattttttacctggggaaaaaaactaaatctaaaaactttcccttcacattttcaagaaaaatttatatcccaaagaggtgtactgtgttttttccttttgtcatactgctgagtactctcagaagtaccagaacccttagctgagaagccctgaactctgtggtttgggagaatgtaagggacatttcagggttgagctgaagaactggtagggagcacctgttggataccaactgacatttacttagaaacaaaaaagcttaaagaatggatggatgcagtggtatgtaaaggaaatagtgagaatgggaaaaaaaataagcatttggccagaacagggaaaacaagtgtgaaaggtaatatcgcagatgagagtttctaaacgtagatatcgaagtatattatctgtaattatgtgggcctgcagcagttgtggggtcctcatacttctcacatgcctgttagcacagttcattgtacggtatggcatgtaaaagtagctcaagctgaatgtccttagccctttctcttgggatactcactatctaaaaaacaacctgacccacatttggaggcaggtgacttcctagaggcaatggctaagagcaaacatgtaaaaataacgttctatcctctttctttcagggccatcccagtaacctgcatcacatcatgactacaaatgtgcaaatgtctatcatccgcagcaatgctcctgggccccctcttcacattggagcttctcatttacctcgaggtaacgacttgcaagttttgttcaaactctcaaaatgtagtagtagatatacatttggtaaaatacgtaacacagaatgtatctagaatcagcttgttaaagttgcagaacaacagtctgcagaaccgtgaaccaaataaacctcttttatttaaaaagaaaaaaaggccaggtgctgcggttcatgtctataaacccaacactttgggaggctgaggtggtaggttcacttgagtccaggaatttgagaccagcctgggcaacatggcgaaaccctgtctctacaaaaatacaaaaaattagccaggtgtggtggcatgcgtctgtagtcccatctactcaggaggctgagatgggaggatggcactcaggaggctgagatgggaggatggcactcaggaggctgagataggaggatggcactcaggaggctgagatgggaggatggcactcaggaggctgagatgggaggatggcttgagctcgggaggcagaggttgaaatgagttgagattgcgccgctgcactccagcctgggtgacagagcgagaacctgtctcaagaaaaagaaaaaaaatcgcaagacagtagaaataaacttagagcaatccatgtttttagcatggtttaatatgtgcttattatagttgtattacaagtgtgtatatttatgcaattaaagtgtttaatatggtctaaaattgtcctatatattgaggaactgcccaagctttgataatctcaacatggtctttattattagactgcttatctgcaacatggtctttatttttaatacataagtcacaaatattaatactgaatatttttaaagttcagtgatgatctttactcagttttttaacttatgtaacaataaaatgatgatgataattattttttgagatggggcctcactgggttacccaggctggtttcagatttctggggcacaagcgatcttcccactttagcctcctgagtggctgggactacaggtgtgagccaccacatggctaagattaatttatttttacccttaagttctaataggttgtgaggtaataaatgaattttgactagaaatttttaccttttattggagactttacaacaattggagattgttggcaaaatcaagttagcaaacgcaagaccaggtttgcttggttatagcataactcagcagttctccaaatgtggttcacaggcccttatgggggtctgcagggtgaaaagtgcagggttaggtttaaggttaaggttcataatgtgtccctttggcaatgtcgacgtctgctctaatggaacaaagactggaaggcaaagtgtccgagcctcgtcagagctgaggcagtggcatcacactgctgttccctgtgtgctttaccactgtgcacacttgcagttaacagaaacaaaaaacagcagctagtttcacttaaggttgtctgtgaagaggcaatataaattattattaaatctcttgaatacacattttctttgttttctctgtgatgaaatgggaagtatacataccatacttcagctcgatattgacatgctatctgagttttgggaaacatactgattattttcccagggaatataactagaataaatataataaacactttttttttttcaggtgcagctgctgctgctgtgatgtccagttctaaagtaaccacagtcctgaggccgacctcacagctgccaaatgctgctactgctcagccagcagtacagcacatcattcaccaaccaatccaggcacgtcggagcctggggtgcattaagggcctcattggagttattcattctgccaggcactaggcacatccttgacctcagggactttccatctagttgccaagacatagggaagtttgaaagatgcacagtgtcatgtggcaagctgtaagaatgcagaggagagatggtgggaagccttcctgttggaaaggctgtgctaacgaggaatcagagaagtgaagaggaagtgaagggggaaatgaacagtggcaaggaagggagtgatggttgtagacagcagttagtaaaggctagctaggattgagggattttaatttggattggggggatctgtggactcctaaaagttaggtgtatatctatgtatattccaagaacatggtccatgccattcagctttttcttaaggaaatctatgacctcattattactgaagtataatatatttgcaggaaatatagtatctataaattgggttctctaggatatggagtataaactagactttatatacagtagagagccactgcgtttttttgtttatttgtttttgttttttgagacagtctcactctgttgcccaggctgaagtgcagtggtgcgatcccagctcactgcaacctctgcttcctgggttcaagcgattctcctgcctcagccttccaagtacttgggactacaggtgtgcaccaccatgcccggctaatttttatacttttagtagagacaggatttcaccctgttggccaggctggtctcgaactcctgacctcaagtgatctgcctgcctcggcctcctgaagtgctaggattacaggcgtgagctactgtgcccggccaaaaatcatttttgtctttttaacacaatggctctgtgtatcattaaagtaatactgttgaaagatgagattaggccaggcgcagtggctcacacctgtaattcccagcattttgggaggccaaggcgggcggattgtctgagatcaggagtttgaaaccgccttgggcaacatggtgaaaccctgtctctactaaaatgccaaaaaattagctgggcatggtggtgcgtgcctgtaatcccagctacctgggaggctgaggtgggagaatcacttgagtccgagaggcagaggttgcagtgagccaagatcgtgccactgcactctagctgggacgagagagtgagactccatctcacaaaaaataagaaagataagattaatctagctgaatcacatacaggaggtctgtccccttaagcactttcaggggacagacagatgtatgaaacaactgggtttaagataataaggaagtcttgattatgatactgggtagtatctgtctagcctacagctttcaagataaatacttttctggccaagaaaacagagtcggaggagtattaggcctctagtagtatatgtgatacatatgaagggttggaggaagacgagaaccaagacaaggagctcccgagtgaggaagctggtgctgtagccctagtgtgagacacgcacctgcacatggtagaagcggcaggtaaaagggctgtagatgaaaagcaaggatgaggaatgggcagagctcggccatttagatgcatgtttcagggttaagagcaagggaagaatcagaactcaggtgattcgaagaataatggtgggtatgtggatgaagcccagtgtggagcttattttttagaggaagatttcacacgtaagtgtgataagggcactctgtccatgtgaaaacatccagaaaggatatgggcaccctgaacgattacctagaaaagaatactgttaccttgagttgcccttgtactcactaacgtagatggcctgagagccaacagctctattcagcagctgagtaggccctctgtggaggtgctgggttggatggcagcgtaaaatgtctacaccaggaccaacaacagacctgtggcaactctagattgaagggtgagatcccattggtaccaatagtagggcagaattttgactccaatcacatttgtacaggagggactcatgtactgttcaatcaaaatgggatttttttttttttttcaaaacacttgtcagtggtatcttaagggattttttttttttaataattctgactcttagtcttttttttttttcttttctattttttcaagacagtttctctcttgttgctcaagctggagcgcaatggtgcggtcttggctcactgcaacctctgcctcccaggttcaagcgattctcctgcctcaacctcctgagtagctgggattacaggcgcgtgccaccacacccggctaattttttttgtatttttagtcaagacagggttttactgtgttagccaggctggtcttttaactcctgatctcagttgatctgcccacctcagcctcccaaagtgctgggaattacaggcgtgagccaccgtgcccggcctggctcttggtcttataacaacctatctgaaaagagaattccttaattggaatggtgagaatttatttttacttgggcagaaacatgcttatctgtaggctcaagtttcaaattacacatttagtatttgacttcctctattttatttttgttttaaatgaactgttttttctcttttggtagtctcggccacctgtgaccacctccaatgccatccctcctgctgtggtagcaactgtctcagccaccagagctcagtctccagtcatcactacgacagcggcgcatgctactgattcagcacttaggtatacatggggagtatgaagtttgaaccttcctgccatcctcctccttcactcttttttctttcgttccttcatttaagtaaatatttattgagtggctttttttttttataatgagctatgtagtgttctaaatcctggggctaaagctgtgaacaaagaaattgctgcccacacagagcttctgtttttacaggctggagacgcgataaatatgtagctttttagatggtgaaaagtgctttggaaaaaaataagggtaaaagggattgggagtgacagggtgggtggtgcaggggacttacagtttcatgtaatgtggtcggagagggctttgttgataagaatacatttcagtagaaaatgaaaagatataatgaagtgagtgagctatatggttatcggagagaagagtattctaggcagtgggaacagtgagcgcaaaggctctgagacaggattgtgtttgccacttataaggaccaccagtgaggccaaggtggcaagagttagatttggggaggtagcagggtctccagatcacataggcccttaggagccacactaaggacatggactcggctggggcatgatggaaagccttagtggagtttttagcagaccgatgcaatgatctgaagtttcagttggttcagcctggttgctggatagaataggctctggagaggccaagttagaagcagagttgggtagaagggtatagccagcatgtaggagagatgaaaatggatgtagaaagacatgattagattctgggtagattattattattttttggagacagggtctcactctgtcacccaggctggagtatagtggcacgatcatggctcactgcagcctcaaactctcaggctcaagtgatcctcttgcctcagcctcccaagtagctggaactccagatgtgcaccaccatgcctaactaatttttttattttcttgtagagacaggttctcactttgttgcccaggttggtcgtgaactcctgggctcaagtgatcctcgcatcgccctaagtgctgggattataggcatgagccagccaccacacctggccctgggtagattttgaaggatagagtcaagaagatttctgaggaatcactggggcaggcggtgggggtgtgggagtgtgaaagaaggagaggagtcacgattatttgccagtgctagttggcctgtatacctaacagggtggaggacagtgggaggtttaggaaaggagttttatactttgattttaggcattttaagattgtgatggcaagatataatggctcatgcatgtaatctcagcactttgggaggctgaggcaggaggatcaccggagtccaggagtttgagaccagcctgggcaacatagggagaccccatctctttaaaaaataaaaaagtagccaggcatggtggtgtgtacctatggtcccagctacatgggaagctgaggtgggaggatgacttgagccctggagattgagtctatagtgagctgtgatcatgtcactgcattccagctggggcaacagagcgagaccccatctccaccaaaaaaaaaacaaacaggaaaaggatttaggctaggtgcagtggctcgtgcccgtaaccccagtgcttttggaggccaaggtgggagaatcacttgaggccaggaattcaagaccagccccagcaacataccaagatcccatttcaacaaattaaaaaaaaaaaaaaaaaaggtaagcgtggtggcatgtacctatagccctaggtacttggagacggaagtgggaggatcatgtgaccacaggagtttgagattactaggagctatgattgtgccactactctctagtctgggcaacagagcgagatcctgactctgaaaaaaaagaagcaagaaagatttgtagagccatacagggataaagtgtggttgatgagggatgatcttaaaggctttttgtgagtgacacaatcagggatgacatcatgctgtttttcctcatgatctccaagtcacattacagggaggttagggagggcagttgattcttgccattggttatgttgagggaagggagcctttggcaatagtgcagacaagaagagattcactgaatcaaagcaaggatagtaggtgtggagagaggaattgttagaagctggcggggcaccactaggacctgtcagctaaaagcagggcagagtggtgaggaagaaagaggaatcggagatgcctctttgatttcctccttacttgtccgagtaaatgaaaatcaaaacaagggaaggaaagcaggttttagaaaagcttgagctttgggatactgagtttatctgtgtaacaaccaagtggctgttgtcagtatgtggttgaagagatgtctgtgctagagataatgggtttaggagtgatcaatgtgtgggccacaatgaaagccttcaggtgtctatccaggggtactagagagtgagaagagggcctagaacagaactctgaagaaaattatgtttaaatgaacagcaatacctggaacttatcttaagccattagctctgttatctacttgtgtgacattaagcaggttttcaactcccctgatcctttgttctctcttcaataaaagggatactttactttgtggcagttattaataaatatgttgcctgaggtacaaagagacagaactacccaacataaaatagactacttgttgttgctcattttaactttataaaagttaatgtattcagatggtatgaggaaattcacaaggtataaatggatatacagtcatctctatctatggggtcttggctccaggagcccctgcagatgctgaaatccaaggacgctcaagttccttcatataaagtagcatagtatttgcgtataacctacgcacctcctcccatgtactctaaatcatctccaggttacttggagtgcctattatgatgcctgcacatcacttcattcatgtggattccgtatagtacttggtgctcagctaatgcaagttttgctttttggaatttggggaaattgttttcccctttgaatattttcaatccatgcttggttgaatccatagatgtggcacctatgaaactgagggccaactgtatgatgaaaactaggggtaggctttttatttttaatcgttttgtcaaagtatcttttccattgtgttgattgttttaataaaacctggatattgaattttgttgaatgcatttttagcattcactcatataacactagcaatatactacaagtagtgaatgaaacagacaaaaaccctaatcagatgatttttctctttatatctacaactacaataaattcctaatgtctaacttttttggaattaagatagaacttcttcaacagaccaatttccttagaagaaatagaaaaaaattttaagcactatctctcacaaaagcaccagatccagctggtttcatagaattcttttttgagacaacgtcttgctccgccagccaggttggagaacagtggcttgatcacggctcactgcagccttgacctcctaggcccaagtgatccttctacctcagcctcccaaagctgggactacgggcacgtgccaccatgcaccatgcctggctaattttaaaatgttttgtagagacagggtctccctatgttgcccaggctggtgtcaaactcctgggctcaagcgatccatctgcctcagcctcccaaagtgctgggattacaattgtgagccaccacacccagccttggtttcatagaattctaccaaaccttcaaaggggccagataaatcagtgataatgaaattggttcaaggtatagaaaaaaagtaaaattccagaaaaatgtaagtcatatcttaatttttctactaaatacattcagtctgtcagttctttgacccttgtcttttcagtcattacttggttgaatgaaatttattttctatcactttcttcaaaaagggcaaaatttaaagcaccaatattttgaaagtttacgtgctgagaatcatttcccatttatacttaggcaatagtttggctgattgagtgttttattgtttctatattctttccatgattacttgatgggtaatttttcccgtcttctagatctggatgttactggagtctgttttttttttttttaaccgcttacaaaggccttagtctttttgccttattgcctgattctttttcgttgaatatcagcaaatttcatagcatttattttgtaatgaccattatttatggttttgttctaaacatggtgtgccttttcaatctgtagcataaaactattcattggccaggcatggtggctcatgcctctaatcccagcactctgggaggctgaggcaggcagatcacttgaggtcaggagtttgagaccagcctggccaacatggtgaaaccctgtctgtcagctgggcatggggccggatgcctgtaatcccagctacttgggaagctgaggcgggagaatcgcttgaacctgggaggcggaggttgcagtgagccaagatcgcgccactgcgctccagcctgggcaacagagcgagacactgtctcaaaaaaaaaaaaaagaaagaaaaactatatgaacagtttgtttgtttttttttcttttgagacctagtcttgctcaggctggagttcagtggcgcggtctcagctcactgcagtctccaccccccgggttcaagccattctcttgcctcagtcttccgagtagctgggattacagacacccaccaccacccctggctaatttttgtatttttagtagatgggggtttgccatgttggccaggctggtctcgaactcctgacctcaggtgatttacccacctcagccttccagagtgttgggattacaggtgattcccaagtgttgaatctttttgcactcctatgtaatttttttaactgttccctttaatgttgctttcatactcttctccgcccttgactgcattttcagcattgtctctcatgttccacttctaattttgccttcattcttgaaactgctgagcagttgccttctgtttctctctggagctctgcccatatattttgtcttcttctgttgttctctcatcatttccactgagttcttatgtctttgctttgtgtttccatttcatagaagcagttacttcattaagtttttaaattcatggtacagtgttcatctgcgtagtgaaagcacttctggtgtgttttgttccaccttttgtcttttagcatctttaaatagatcctgttttggatcctttctgagtattcatctttgattggattggctttattctggatccccatttgtaattggttcttattgtagcctggactatatactgggtttggataaattttccaaatgactcagtgtcctgtgtttgaattttgttggccattacttcactcctgtcagtgcagatagaccacttaaaatggcaaagcctctcttccctaggtcccccgcacactattccccacagacggggcttatctgtgtctgtgtctgattcctggtttaaccctagatcctttgctttttaacccttggaactggtccaaatgctccttcactgccagcttcatttccactgttacacaaaagattttggttttctctgtcagtttatgctcctcattttggagtattatacttccttactggattttatccccagaattatagccccagaaattctctcttcaggctgggcagggtggctcatgtctgtaatcgtacactttgggaggctgaggcaggaggattgtctgagcctaggaattcaagaccagcctgagcaacatagtgagaatctatcgctttaaaaaaaaaaaaaaaaaaaaaaaaaaaggaaagaaagcaatcctcctttcactggctcctgagtccctgtttggttgtccctacctttggcagttcttctgtcctgtggtttgagatttcagatgtctcctaattttgcgaaaggaggatactgtatttctcttttttgttttccttactatttccttactatcctctgagaggagaaggagaaaataccacactggcagtctctgcctacaatccccttgtcctccaaataagctagtcatacaaggacccatctgaacactggaggataatcacaagtccatttatcatttaacccctgtattttctgtagatgtcagatcactgaattggggctctatccttggagttgcctttcaggctgtcaacaaaaaaaaaaaaaaaaaaaaaaaaaaaaaaaagctgatctgtgggagaactacacagttgggtatccctaaaccaaaatccgtaatatgccaaaatctgaaactgagcactgccatgacactcaaaggaaatgttccttgaagcatttctgctttttggattggggatgctgagtctgtaagtatataattccaaaatctcaaacacttctcatctcaaacgttttagataaggtatactcaacctgtaatatggtgattagacaacagattagggagcactttctgaatgaccttacttactccctctgactgtttttggtacgtgtgggtgagtcactatggacctgtcgatgttaaatattcagactggattttttttgttgtcatttgtttttgtttttgagacaacgtctcactctgtcacccaggctgaatcacatcttgacgcccacctgtagtcccaggtactcaggaggctgaggtgggaggagaccttgaaccccagaagtcaaggttgcagtggcgcagtcacagctcactgcaaccttaacctctgggcttcaagctgtcctcccacctcagcctcctgagtacctgggaccataggtgtatgccaagatgcctggttagttgttttatttttcatagagactgggccttgccatgttgctcaggctggtctcaaattcctgggctcaagcagtcctcctgcctcagctcccaaagtgctagggcttacagatgtgagccactgcgcccagcctcaaaatattttaatcaaagtctctttcttttgctcccagtgccccaaattgggctagtgagaacccctttttgctggctcaagtgtctttttttttttgagaccctctcatgtgtcgcccaggctggagtgcagtggcacagtctcagctcactgtaacctctgcctcctgggctctcaagcgatcctcccacttcggcctcccaagtagctgagactacaggtgtgtggtgccatgcccagctaatttttatatttttagtagaggtggaatttcgccatgttgcctacgccagtcttgaactcctggactcaagcaatctgcctgccttggcctcccaaagtgctgctgggattacaagcgtgagccactgtaccaggcctggcccaagtttccttttgatgactcccgttagcctttgagtactttattgtttttgatacacgatgtctcatgctttctcctgttttttttgtttgttttttgttttttgttttagttttcaaataagccaattctccttggttctttttagtggagagtagaacacccaagttctgggtgttagaagtgttcattgtttctggtgtgtcattgcttttgggctctttctggggacagaggtactcagtatagtaaagatagtcatgtcttcctgctgatattttcctctttatttttttatttatttttttgagacagactcttgcgctgtcacccaggctagagtgcagtggtacaatcttggctcactgcaacctctgcctcccaggttcaagtgattctcctccctcagcctctggagtagttgggactacaggcacgtaccaccgcacccggttaattttgtatttttagtagagatggggttttaccatgttggccaggctggtcttgaacttgatccacttgcctcagcctcccaaaatgctaggattacagacgtgagccaccacctgttttaaaatcttatgttattttaaatcttatgttaattaaaaagttttggccgggcacattggctcatgcctataatcccagcactttgggaggccagggcgggcggatcaagagatcaagaccatcttggccaacattgtgaaaccacgtctctactaaaaatacaaaaattagccaggcattgtggcacgcgcctgtagtcccagctactcaggaggctaaggcaggagaattgcctctgcctgggaggtggaggttgcagtcagctgagatcatgccattgcactccagcctagtgacagagtgagactccatctcaaaaaaaaaaaaagtttttttcactccttctctggtaatggacgcatattggtatttacagatgaaatttaacattacagttttgttttggtttttttttgctttctgaggttttacactcattcattacttaatgatggggatacagtctgagaaatgaatagttaggcagtcttgacatgcaaacatcataagagtatacttacacaaacctagatggtgttacctactacacaccgaggctatgatgctataactattgctcctagtttgtagacctatacagcctgttactgtactgaatactgtaggcagttgtaacactatggtatttgtatatctaaatacagaaaaggtacagtaaaaatacagtgtaaaagattaaaaaagaggcacctgtatcatttgtccatctgacacaaattaacctcttgctatttgtagattactactaacaataagaataccgagtaactaacttcacagttctttttgtcctccagctagatcccactaaccagagtggcaatgtgtttgaatgtcacctgaagtgattctttgcattttattttattggagacagggtctcactctgtcgcccaggctggagagctcactttagccttggcctcccaggcttaagcggtcctcctgctgggattactggtgtgagctgccgcctgtggcctcccctctgatttgaatagccaactttgttatactgtcaaattttcttgccagtgttgccatttcagtagcttgctaccaattaatttggcatcctctgttgatttcccttccaatcctgaggcagccataactaactttttatcattttaggagtgttcttacatttgctaaggaatgatgtaaaattgggaggaaggtccatgcttcaagggtcatagtttaagctgctgttaatccaaattgtctctgatctttcttcaggaaatttgtcaaaaacttacagcatgtaaatttatagtatattttcagatttatccacagagttcagtgcaattattttatttttattttttatgtagacaaggtcttactctgtcccccaggctggagtgcagtggcagtcatcgctcactgtaaccctgacttcctgggcacaagctatccttcagcctttgcgccccccaaaagcactgtgtctacaggtgtgagccaccgcacctgacctgaagtgcaattattataatgatattaactcaagtttgttacggagtgttgattaactacatcaaggattctgagaacaagtaagggttaatttcttcagtttgtggtacaaattgatgccttttaaaacaagacaaactcagtgcaccttttgccacattggtgtgattaaagaccaagtattggtttaactccgaacttcatagacctatgaaaaagtataacttgcatgactaacctaggagaagattgtaaatgaccttgcccatctgcattgtgtctttgttatcttttcagtaggccaaccttgtctatccagcatcctccatctgcagcaatcagtattcagcgtcctgcccagtcacgagatgtcacaacaagaatcacactaccatctcaccctgcattagggacgccaaaacagcagcttcatacaatggctcaggtaaaaccaaaagtggagaaccacctgtgtactttgttgggtaaaaccaaaagtgggcaaaatgtgctgagggcctggtgataccgaaggcattgattgtgtttaccctggacgcagtggataatgttcttataactgtgttgtggggtttccctcacagaaaacaatcttcagtactggcacgccagtggctgcagccacagtagcacctattttggcaaccaacaccattccttcagcgaccacagctggtaagtccacgaccctcctcttccttctactggggaaaaaggaggcaagagtgatgggttaatttttcatttctcaccttcagtcagagaaaaacaacgggctagaaaaattctcttaactttttccaggagatttcccaggtttttgagaatctgtaacgtgtgcagagaagttcttgttaaagaatttccttttttcccctatttcaggatctgtgtcacacacgcaagctcccacaagtaccattgttaccatgacagtaccctcccattcctcccatgctactgctgtgaccacctcaaacatcccagtcggtaagtggcctgctgccttcggacagaagcttaccaggagtgctgtaacccctcagactaggccttcatggtgatggctagtattgatttttaccattgttgatttcctcttttttttttttttcttttctttttctttccttaagtctcactctgttgcccaaactggagtgcagtgacgtgatctcgactcactgcaacctccacctcctgggttcaagcagttctcctgcctcagcctcccaagtagctgagactacaggcacatgccaccatgcctggctaatttttttgtatttttagtagagatggggtttcgctacgttggccaggctggtcttgacctcatgatctgcccgcctcggcctcccaaagtgctgggattacaggcatgagccaccgcactcagctgagataaggcagtttttgtgaagaggacaccctgacatactggtgactggacgtaaagtgtgggttccagcccctctgagcaaactttgaagcccattttctggaataatggtagtacccaggaagtccctactcctgttctagggtgaccagcctacaccagcccttaagtaggtgctcagcctcacagaagtcttttagcacagagggtgctactattgggtcttttctgcatcactgctcaccatgacttgccattggagagaccaaatttttcccgtaaccttctgaatttaattcatatttgtcaaaagaagtttgttttgtttgtatctgtttagcataacacacctgttgaaaaggtagtaaattgtccatattgccatctcagcccatttccttcctctgcctgcgtcatcagctctcctgagtgctatcacggcagagccaagcccagacgcttaacgtttatcaagtcaggagcctcactcgggtatttgtatctatgatcgaaagtcagaccaataaagaggggcccttgtggcccagagggactgtctagtttcctcctgaccctccaccatgaagaattttttagagattggttcttgtgaatgtccttctatcttcctaagagatcccactgtggaagtagactcactaaaaagtaccaggaaacgtacatacatgtattcctatgttccatggggtttatgctgtcattttgtttttctcttttatgctaaccccaatatttctgtattataataggatctctctaagaaaggtagctcagttgagaagggaaacctgatataaccctagaccactgattttcaagttgggaagtaaaacatacatattaaaatcacctaagtgactttttccaagtgagcttgccctctccaggtgatattaaatcgaattcagctattcttattaggaatatgttggctcagaaaaaaagcctaataaatcacaagtataaggtttttgcctctattccaatggaataccattcttattttcttcatgttctggtcaacatatgatcatgttctcagaattatggaaagcaaaatctggtgatcacatcattcagaaaatagggataagttttggagataacattatggcagacttaatgttttctgtgctatatagttccttggtttttatttaactattgagaatgtatggttttttttctttttttttttttgagatggagtctcactctattatgcaggctggagtgcagtggcatgctctcagctcactgcaatctcccaggttcaagtaattctcctgcctcagccttccgagtagctgggatcacaggcacataccaccacgcctggctgatttttgtctttttagtagaaacagggtttcaccatgttggccaggctggtctcgaactcctgacctcagttgatctgctcgcctcggcctcccaaagtgttgggattataggcatgagccactgcatccagcctttatggctttttaaattagaaaacaaagatttaaattaatggctgagtggtggggtatgtctggttaccaaccgctggttagctactctgtcacatggcagcttcattcctactggaagcatcattttcttctacctttcatggggctcagtgaaaaaaacaaggcttagttgccccctgctcaccatccccactgcttacctccctgatggaaaaccctatcatgccaacttctctttgcattggccaatagatgcgatcttcagtggtcagatgggcattcctgttatcaccctgcgaaaacttctccagctgcctcccacaggagctggctgggcatcacagtgggtctgtgcagcttacctttggtgttaaatgttctgcatttagggtaatatgttggcatcctcctagtctagtctctttgttaatgtgcctctcactggtgtaacgggtttttacaaagatggaagctgtctgtctatatttctgatatagatcatggcttttctttctgaattcccaggcatactgttaatagatagatctataaaaaatagtgtcaagtgtattctagttcagctataccttccaaacaaaattggattgcaagttttaaaggagtacacatttggagcctcagattgaatttgaaaactctatggtcattgattttaattttgctctaaagtattatataaaatcgtaggacattcaaaggaccttagaaattattaagtgatctagagaaggtgtccttataggtaaagaaacagacttgggaattaaagtcgttttctcattgctaattagctacattttataattatggacctggagtagaatccaaggttttttgtttgtttgttttttccgttttttaatccaaaattgtgtgtttatttatttattttgagacagggtcccagtctgtgagtgaggctggagtatagtggtgcagtcatggctcactgtagccttgaactcctgaactcaagtgatcctcccgcctcagcctcccacagtgctgagatgacagatgtgagccaccgcatctgtcattaaaaagccaggttgggagaaaagagcctggtcacttctatctttgtttcagtattaatgttgaaccctgctttaataacagtaggagtatatcagtgaatgataggattgaaataattctgttgaactttgtacttatttttcattttttattttgattaaaaatccaggcttattttaattgtttgctttcctaagattgctgctagccaagaatgttttggcatgccaaaaaaaagtgtagaatggtcatggaattggcatttactgtttgcagccaaggtggtgccccagcagatcacgcacacttctcctcggatccagccagactaccctgccgagaggagtagcctgattcccatctccggacatcgggcctctcccaatcctgtggccatggaaacccgaagtgacaacaggtaggaggctgtgtgtcagttattctgcctcactgtgtcattaatcgttctgctttatcagcataaaacaaagtgtcccacaaatatggcctatatttattactcatgttttcagattttcccctgaaagtaacacttcgtataattcctttttttatgtgcgatttttttcaagccagtctccttttgatggatgttttcctagtatccattttttgggttttgtgtgtttaacattttttggccattttgagagtaagggttgcagcattatgaccatttatccgtaagtacctccatttgtagcacggaagagtaaagacattctttgatgtcaccgcggtacagctatctgaaaggattccgagctctcccttctctttcactcatggatatttttaaagagtgtggagaggccagttgttttagggaatttggtactgtcacgttgtttcttcatggttacattcaggttataccaggtaagcagtgtgttcttcccattgcatcagagagctcatgctgtctgtttttcccgtattggttatgttaacattcattacttagtgaaggtgatgtttgctggttttttctactggaaaagcatgtttttctcctttgtaaacaagtaatctgtatggaaatatctgagtataaatatcctgttctccagtaaacattcattcaatagttgtagatctattattaattcctggctgaatcaattattaatatgatagttgcaaaatagtgagtttttctaacgtgttgtctatatatattagctggcattctgacgtaaagaaactttctcttatccacccccatttatttattatgttgagcattttactgttttttaatcggctcggccttgtagatttgcttttattcattattagaatccattgctgtcatctattttggtgctcacatgatctcatttggtctttgggggttctttctgtctgcttctgtggatttcgccccatcccctctattctagcctttccttattttccaatgacgagatattctagattcctattgaactttatctgtctggctgtgaaatctgctgtttctccaaggagccccttgtcatttacaaaccaagatctgggcattagccctgcttgttgctatgggttgtcattcttctaggccctttgagcaggcagaggtagaaagtatataatattttaagaacatttgagttcatgctgatatctctagttcaaccccatcgcttcccccattccatgtttgtatctgcctctcccataaagaaccctatacagtatacacaaagtagtttcaaaaacaggttattgttaagtgttctaatttgatcatttgtgtctaggaatgcttacagattttgatacattgatatgtccatcccccttgttgaatactcctgttagctctaaatgtttatagattctctaaataattctgtaaattagctctaaatgtttatagatttatgaatttcctatgtacatgtttattttgcctacaaataaggacagtttgaggggaaagcaagagggtcttatcattttcatttgtttttatgttttgtttttgagacaggatcttgctctgttgcccaggctggagtgcagtggcaccatcataactcactgcagcctcgacttccgggctcaaatgatcctcccacctcagcctcccgagtagctgggactgcaggcacatgcaatcatgcctggcgaagtttttttattttttgtagagatgaggtctcacactgttgcccaggctgtagtgca

SEQ ID NO: 693 - DNA, 32742 bp, Homo sapiens
  source 1..32742: mol_type = other DNA
actgctccccgcgggccagagccggccgagctgctgcccgccggggctctgaacggcgcggcggggccgggagccagggaccggccgaggagagtggcggccccggacggctgccggaggggcggccgcgcgtggatgcggcgggagctggaagcctcaagcagccggcgccgtctctgcccccgggcgccctatggcttgaaggtaagcaccggccggatggagcggcgggcgactcagtgtcacggggagaggaggagggacctccaaggggagcgaggccaggaccagaagtttgtgcggccactcctggccgcctgctcgggagcgcccgcctgggatccggctctgcatgggctccccgtcgggcgggggcagagggcgtctggagcccgcggctgctatcccctctccctccttctcagtagcctcctcgccacttagaagggaatcctctccccgagcacgagcgggcgcagctggggcagcctccccgcggggcgcccagggcagcacggcggagccgcggcatcggagggcgggagggaggccgctccccacaatctcgggagggcacttcccccagcacccaagcgcgagacccggggctcgcggccagagtttccgacttcttccggaggaagaagggctgtttttggcaactctgtgttggtgcgacctgacccttttcagtttctaaggcagaagctaaggatgggggagaggcagattctggctggattctcccgctcccacggttgccgctgtccttggtcctgaactttcgttctccttcgccttctcttgggttgacacctagtcggggagggaggcttgggtgccagacccgtttctacccggcagtgcaggcgacggtggcggcagtagcggagggtgaccgcccggctctcggcccggctctatgatggaccgagagcccctctagggtggtatgcggagacaagagacacctctaagcaccagacagagcgcttccctatccctgtctgaggcgggcagcccttgagtgcttcctcttgaagagcagaggtaagagggtgcgtgtgcgtctacataacaggcttcaccatggacacaagtcacagcagtgcagctccgtggggacaggcgcttgctctcagccacaaggaagctgtctgagcaagtcactgttgccccacctgacaccccactacttttttttcggtggctcttgaggttgggtgagggggtgagggagtgaggtgcaaggcactttgtggatcccactccagatccttctgcagatccaagcctttctgtattttgaccaggctacaaaccttttaggccaatccttgctcctccttagggagctagatgttcaacgattctccccactcccaccctgcttcaaatgcaaatatgcatgcttatctctgattcatcctgcagcattaggaccacttgaaaaagaaatcatgcttatcgtctttccctcatgcagctgtttgatgagggtggccagatagagagactgtggtcagcatgaccagtttcaagaaaatcagcaagctgctttcctgggtttcagtccctgccttggacttccctccttagtgttcaaaattcctggattatttgttgcagggggttttgatgccatctctgaatgcagacatctgacaaggaagtggtttgggagggttagacctagaaccaaatgagggccagggtagtcccagctcttaaagatcattgagttccttctaccttccctgcacagcctgaggtgcccagaaagtggagaggttctgatttgttgtagaagtccgggcagcatttctctaagggtttttttctttttaatgaattccctgagaagctggttaaaaatgcgtatttttgcttcttccttgaaaaactgctgaatgagaatctcaagcggaggcccaggaaatttatattttaacaatgtttctgagtgattcatgtgtacactgaattagcaaattacctcccaaaaagttgagactccttagagagtctgtatacatttattttattttgaaaatggaaatcaagtttattttacataaaattggtagcaggtattctatctgagaaaatcccttgaagatataaaaatgcatttctaagagttaaaagaatcatgtaccttggcaaccatttgctgatatcttaaatattcctaaatttcatacatttgaaatttataaaattaaggtatttaatctcaccctttgtctcctgctgttatacctgttaaattcttcaagtgtgagactcttggtagaaagaccatccccctgattaaatctttgctgaaattaaggatgcaatccaatctcctctcccccaggatcttcctgggcttttcttctttctaaaatttttggcccttttaaggaatcaccaatatggcttcaggttgacttatgtaaatactaactgtccctctatgggggtcaactcagtgtttccctcctgccctcccctctgggtgagttattgtctttcattatgcatgtgctgtgatctgttaacctaagtgctcctgaaatgccaaggagtgattagttcagcctagtagcacgtcatgctccccaaggctggtagccactcatgccctgctggaagtgacatattgactgtattgatttggttcttttgttccataagcaaggaggcttgtaggggtaaaaaggctagtaatgatgcttgtgggctagttagtcttgtaccttcacctacaaaggtggattatttctgtctagaaaatgcaattatcttgagaatgatataggagaatctgaaattgagacaaacgcttctgttctttctttgatactatgggaaacaaatgggaacttagggtcattagaaatatggcctcacatactcctgagattgtcttgctgaagccggactggtctggggtcaccattctctgaataaacaagtataaggggaaagacgtggggactctgcctggagagaatggtttccatctcccctgcaagtaaaagttacattttagtgttaacaaaaaagtgtggctgtgaagatagcactgtgtgtatgtgtatgtgtttgtgtgtgtttgcatacacgtgcatgcacacatatgagcacatcgcccaggagagacagatatgatgagacttccttgagccaatcctgtgttggcacccaccacttctccccgctttgtggcttaatacctatgaatctccaacagtgaaggtgcctcaacacctaggaagagagaagaatcaagttgaggttttataatgccagaaccctaagtcatatttgtaatatctcccagaatcaagttatatatcagcaggctacagttacctaagagttgaggtcttgaaaatagcttagaacagcagcccagtcatttgcattttcctgggatatagtttataggactttagattcttaggttatcttcttgggctcctcagaggtcatgccagatgcccctgactccaaacagggaagctgtttccttagtccagaaatacaatggtctttcttcttttattaaagttctcctaaacagaactttttccaatgaattttccagtttctgaacaccaggactggactcagcaactggagcttctccatcctaccaggtactctgcttagcagaggagcatcctgcatataggaaacactcggaaaccatgggcagcagaaaggacacaggttgattcaacttctcagcaggcaccctcctttgtaggtagcctcttacttagctgaaccccagcaccattttccctcttctcacctccagtaaggcattttgtggccttggaaggaccttgggattaggtataagcccttctgctctccagaatataccatggagccactaaggatgcacaaattgcttatttaccaatttgagcagtagactaatgttatctctggccttttaaattactctaatggtgttggaatctaatattaatatacttttgcctctcacctgttcccatgaccaatgtaattggagatttctttcctctgtacttaaatggatgcaaaactttcttattttttgacaatagaatcatattatctaaatgtacaggcctggaaaatagcttgattatagtgtcagcacatggggatggaggagtaataaaactataagactcagccacttggttttctttgatttgggtccagagaaaggagagaaatttgccctcagaattgcagatttttcttttctttttcctttcaccttaatctggtaaatgggttaaatcaatacccttggcagctgggatgcccttggaaggcacagcctcttctctccctaggatacatgagagtgtttcactgcagaggggccaaggaccctggtggctctagtgtatagggaggagtcagagatgacacactggggtctgaggcctccctcttcccctggatagaagaaactgtgctgctgcagtgctttgaactcagaagcctggaaactcctaggggcatttgggagagtatgggacagtgtacagaggtgagagcagaggagaagtagactcttaggaggccctgaaagaggctgatgttaaatatgcattgaatataggtatcagcttagtgtagtttgggcaattttgtcataatctgatgtcacctgtaaggatttttactttttccagtaggagatgagggaattctttgctgtctgaagggacagggaggggaaggagggaaaacctctggtttcccctgcagccctctgggtaatgtcagcttgcttccagacagagggcggtaagggaagtcaggcagacctggctcccaggagctccatcaataggcctgcagttagcctgggcagtcctgccttccaggaagctgtcgctcagcacagaactgcagctgtggccccaacgataatcccctgcagatgtctgggagccaaagggagtcctggcgcctgttcatttgttattggtctccttcagaacgtgcctgcccttctcatttccaccccctccttgttgttattgtttgggttctaagtggcccagcaggagaaagacattagaaatgaaattatttttgttacatgctacatcattgcctcctctcctacctgctaccccaggcagcaccatcactagcaactcccaggaactcttgatatgggaaagtggcttagtaccaggcttccctagaatgagaagtggtcctgttcaccagaccctcctttgctggcctcatcatcataacggccagcatttattgtgcacttactgtgtgcagggcgctgtgctcagcacttgacataggttcttcatttaaactcccaatcctgcaacaactctgtgaaataggaacccttgtttttacattttttgtttgtttattatttatttatttatttattattttcatttttagagagaggtcttgctctgtcacccaggctggagtgcagtggtgcaatcatagctcacagcagccttgaactcctgggctcaagtgatcctcctgcttcagccacccgagcagctgggagtacaggtgcatgccagcatgcccaactaattttttaaagaattttttgtagatatagggccttgctttgttgtccagtctggtcttgaactcctggcttcaaacgatcctcctgcctcagagtaacccttattattccattttgcagaggaagaagcataggcttagaaaggtaagtggtttgcacaaggtcacacgtttcatgtgtgagacaaagattcaaaaccagactgtttaaggctaaagcaatagccctctctgatacgtaagtggcataaagaacaagaaaaggaggagaatagggataagaagataattctttagtgaatgaaagggcagtaatctttgtgtatgataccaggaaagtgaagagggagacagcagatggagaaggatgaataaaataactccttgggattcttaaatttgagaaccagcgaggaagtgttctgtacctggatctgggtccctttggatgaaatgcactgggcgtaaacctcagcaagcagtgggagcaggagggagggcggcaggagcaggagggaggcagggtcaactaagccttccaacctgggggaggagctgggaggaggtgtagacggatgttttgtcaagctcttctggaactgtgatgacattaccttctgtcccacatctctttgaggtgaactgaactgtccaaaggatgaaagccagacttctgccaacaattaggtctttgggtttgctttcttattaccatagaaggaaaacttgttatatctccaagactaagcttccacattttacagaaatgtgagggcgggatggcctgggatcctggacagacacaggagtgactcatgagagctgcctttaaaaaatgagctgattagccagacgcggtggctcacgcctgtaatcccatccctttgggaggctgaggtgggcagattgcttgaactcaggagttcacaaccagcctgggcaacacagtgaaaccccatctctactaaaacacacaaaaaaattaggatctggcagcatgcacctgtggtctcagctactcaggaggctgaggcaggaaaattgcttgaacctgggaggtagaggttgcagtgagccagtatcgtgccactgcactccaacctgggtggcagaacgagactccatctcaaaaaacaaacaaacaaacaaacaaaaaacaaaaaaaaccctgatcaatgcttttctgatagacagaggcaggtgaggcctggatgtccctgggcagggcacttaacctgctcatcagttatttcaggcacaaataagggactgtaataatcgtgttcacctcataataagtgagaagactcctctgttgttgagcctcaccatgagttttatgaatgacatatatcaatatttagtcacctatttaaaccctttaaaaacaacaccatatggtagttaaacctgtgggctctggaattagacttccaggatttgaatcctgactctaacacttactagctatgtgaccatgagcaagttaattaacctctatcacctgggggttctcacctgtaagtggatgttaataccaacataattgggtcacagtaattaattaaggtaatagagacaagacatttgaaagagtccctgggaaaagtgagtactctttaaatgttaactgtaatgattgttattgttattattaagatgcttaagtaagaaacaacactttgagctgttgtccttttgcagtaattcagcacctgattttacatttctgaaatcatgtttctaaaacgttcacaaaattcaaggatatacttctttcttacactctccacttatctgcaccaaaattctttggctttcacctgtcagcagctcttgctcattttgagcgagataggggtttgaattgcttgtcatccctttgatttaggtgcagctgaattcatttccatcttacaccacatgagctaggaagaggcataagttatcctggtgatagcttttcatggcctaatttttcttcctggtttcctgggctctgtgtctgctacctcatggttggagcctccctgattggcagtgtcacatggtatgttgctctggcacaggccagtttttattaaaaacaaaaaacaaggagaatgtactggtgtacaaggacaaggtgactttttttcttttcccagattgaaagggccaaagaacttcacatgagcagacccccaaagctggcagaaatatgtgttctgcagcttctggagtcattcttggcaggagcaaatgctatcatgtttttaggtgaagtatggtcctgcctgagaaaggaggatggaaacagtagcttctggtcctgagattccccagtgcataaagataatccctcttgttggcctttttcttggtctatgaatcccttcttggggaggactctcttgtaattgatgtgcatctatttctggccagctacaaatgctcaccatttagctatggtagaatatttcagaaggcactgtaggtattctgttcctgggtcatcttccttggttcatccttttttggactcagccctttcaactctttcactcatttatggcagggtcaataagagacatgtgttgacaagcagaaactaacttccagggtcccaggcagaggatgtcagcaccgcctcccaccgcctgcccccgcaccacggtggatccatgtttccacacactatttttctttagtagtatgtgtagttgaaggtctgggatcactctagagtcacattgtgactaatgacacaaaatctcccttgtggcctgtcttctgtgaggagccaacttaatgcttaatgctaatctctcaattgtgcatttcttgtcttctccaccagaccatgagctccttgaagcagagaatttgtctcatgcttctctaaaatctattataacctaaaatggtgctaggcacttggtagttacttaaattgttgagtgagagtgggtgagtggataagtgatgggtaggtgagagacagcttacttccccatagcgacactctccctctactttacttgcagcttaacaagagtggcagtgtctgaggcatcccccactagaggtatctcataggtcagcaacatacttcatgccttctctctttcatccctaacctgcactatctggccaccctcagccatgaagacattataggttggatggaaatttttcgcagttgtcacagggcatggaagttggggaatattgaatggttggaacctacttcaatcagacacactcatggagaaaatgcactgggggggctgttgaggaaacatacacaggtgtgtttgttcaggtcagcctggggacctgaagacaaaagagctgttattgagggatgccattagtgctttggtgatttctgtgtttagactttggggaattggactagtccttactttaaaaggtacagataagcatgattatacccaagaccctccaaacgcagtaacagtttgaacctatctttccacaaagcacttttaagaagtgggctatgcatcccctgtccctctagttatttagttaaacaaagtggttcagagcactcaaaaaccaggctaatgcaggatcagatctttgttctatcggtcatgagctatgtgacctctatcaagttactatcacccctttgagatgcagttctttatcccttcataaaacaggatgactatatacttacctgattgggttttgtgcaaaggaaatgagtcacgcacataaagtgcttgtctcagtacctgatgcatggtaagctctcagcaaacattcactatcattatccttatcgtaattatcagtgggcagagaagtgtccacagaacccttcccaacctgtgctccaaattttatattctctcttctggagggaagaaagacaccattgcagatgaagacattagaccaggtatgaattggcatagagtgttatacttgaaagaacccaatgttacacagcagagaagtaggagagctggactagaactcacttctgcccagggtttttcctccacacctggctcaggttagaccatggagttttgaagaaactcagtggctaatgaatgggatttgaagtgaagatggtacaaggtaaggccaaaggcttaggcaggggcctgactatgaaccttgaagtcttatgtaggagactggattccatcctgagggaaaaaagaagccaacttgaaggattgggttttaagcacagggacaactccagtgattcaatttgcagtaaaacaaacaaacaaacaaacaaacaaacaaacaacaacaacaacaaaaactggccaggcatggtggctcatgcctgtaatcccagcattttgggaggccaagacaggcagatcacttgaggccaggagtttgagactagcctggccaacatggcaaaagctcatctctactacaaaacttagccggatgtggtggctcacacctgtaatcccagctactggggtggctgaggcacgggaattacctgaacccaggaagcagatggtgcagtgagatcaggccactgcactccagcctaggcaacatagtgagactgtctcaaaaaaaaaaaaaatcacagaggctgctatgtgggggaactgattatagaagattcaagactggaggcagagtacctaggagagtttgcagttgttcaggacagcaatgctggcagcctgatctagggaggggcagtggaggtaggaaggcttgaaagacctgaaaagatatcttaaattcgccagaactcagtgattgatgggctatggaggatgaggggaagagagaagccaaggatgatttaagaacaatgaagcaagggaattaaggatatcggtaaaagtgtatgcatattgggccagaaacctaagctggattgaaagggaagggaagataggctgatagaatcggtggactgatggtgttgatgaaatcagagaactggtatacttggaatcactgagcacttgaactgggctgcagaggcaattgtggtcacacagtggagtaactaaatttgtaacctcagagaggaacacccctggcgatgtcagtgctcagaatgcactcataggagcaggtgactaatgtgaagggtgtgcttggggagtaggaggccaggcatcaagaggccaagctgttggaagttgatttcacctgagttcatggcacaacttgggctggagttgaagacagtgagctagtgccaaagacagtgagggaggggaagtgaccaggaatgtatggatggcagtgacaaagagagatagagtgggcataaatggttggtgggcacctgaaaggaacagagtctttatgagagggtaggggaggtggtaatgaggcacagggatgtggggctgagcactttcctggaagggccgcagcggaagtggtgccctcagttgaggctgggaggggaggggctgctgccgccatgcagtacacacctccagtgtaggtcttctcatcctgcttttctcttccgctccctccgtggctcatggaacccattcctctccatagctacagagaatggaagaaaaacagaagaaaggtgaagacagggtggcaagtgggtataaagatgtggatgagagagctgaaataggtggaagttacagggaataggaaagaaaatggatctgtggacatccattgttcctctgcacccagtgtgccacctgtaaccttctaacatgttgtgttgttttctctgccagaatgctccagcccttaacttataaggttaactcctactcagcttttaaaacagagcccaggtatcacctcttccagggaggcttccccaattttccttcctacactctttcacctacctgggccaagggcctctcttctgtatttctctagcatacagtattgagttatgttgtcattgcttatttactggtctgtttccttccctagatggtaaattcctcaaaggctggaatggagcccttacctctctagctccaggtgcctgcctgctgcactgcacaaagtgggactgtcattgagccccgcccccgcaaacacgcatgcacaccataataagacagcagcaggcactgtcctctgctcatccctgaagtcctccacattattaaggcaggctggaatgctcctccagcaagtgattcagacgagacattccagattgtcaaggctgtaaagaaagggacctacactaactctacacatgaatgagaaaattgtacttggagagggaagtaacgtgttcagggtctcatggctgcttggaagcagaccagtcccagatctgggacccgtccctgacacggcccacttcctaccatgccaaaccccgtgcccaatggccacagatggtgtgcaccacactgtggctgcaggtagccacattaaaagtttccccaatttaaccagctccaaaaatcatcctcttgtcctttcttctcatttctgggttcaaaattgctgatttggtgagccttattattcagctatactccactgcctgggaaatagagataagtgaaatgtaaaagtaggaccaaaatacttatgtattttgaggggttcactttatgtgatggggctacagcaccaccaacattcccgttttctcacagggaagcagattaggcaagtcagtgctcagcgtatcacgtgacgtgcatatgctccttgaatgctgtgctattgtctttaataatactaaccacctaaggtccactgattactcctacatcatcagtcatatcttaggaactgggcagaagggagggggcaggagaagggggagtttctgggtgttccatctagcacatgcgtgggaagtagtaggatgccaataaatacttgttgcatagatgaaggagtgaatgagtgaatattttcctcttgcagagcaggctgagatttgctcagaagcatgtagagcagattggctgcccacctgtgtgggctccctgagacccagggcatccagaaagtctccagagggagagggaaggtgggagaacctctgtagagctcacagccacatgccttaaacactgctcctgcatggagcatgatacctgttcctgcatggccatgcttcctctaaagcctgcaggggaggatactgtcttgtctcttccagctccccatggctcctggcgctccttggcatgtggcagcatcaccccaatctctgcctctgtcttcacatgattgtctctcccccatggctctctgtctcctctctgcttcttataagggtacaccaggtgttgatttagggtccactgtaatccagaatgaacctatcttatccttaactaataatgtctgcaaagaccacttccaaatgaggtcaccttctgagcttccgggtggacatgaattggtggatgttgggggcttgggggtcggaggggaacactctttactcctgtaagggagcttcctgccttggtggatcctgttccttatagacatcttttgtttcctccagagtaggactgttttccttcctagtcacctgtttgggaatagctgcccacttatctaattgaagcctcatctcctgagttagaaggcaaatgaggacaagaaagaaagcaattagtacaactgggagttcaggattaaaaaggattcactgacctgctggcacaatggttggtaaggggggaaagtaaagggagtttggaggaagagaggggaaggaagggggtcccttgaatgttccagcaagggaaggcccatgggaacctggatttctggggcacttgggcacaggccctgtgagggtggtgattgggcgtgcatgttaaatgccttttatagtcataagaaactcaggaattgctccccgtgagggcagctggatgtgcatattaagtgctttatatagtcataaggaactcagggatttgaagttgtttactcaatgttcattctacaagcatttattaaatgcctcctatacaccaggatctcagactaatgctctaatttcacagatgagcacactgaactccggtaggccaagtgaattacccaggatcttttgggggcagagtcaggactaaaatcctagtctttaactctcaccatgcctcacacaaagcaatgttcttctcttatatactccagtctgccttgggggatccctcatctccaccaggtaatagtaataatagtaacaacccctgcttgactgtgcccagggtgtgtttccagaagtcattttactgctgctccctgatgtgtggggtggaggcaggggtaaggagggcttcctgactcctgccattgagttcagctttgctgggggtggtggatgggaggcctgggacctgtactctccatagagaagaagatcaaggacctcttagacaaaactagcgggactcactctctgaaactgggagccccatcattaagtttgcccagctggccagtctgtaaggacataggggatgctgatggtgctagcaaggtgttctgggcccctgtaaatgaggatcctgtggcctcgcagattcatcttccaacaggcctgtcttagcacacaggtggcaacatttggtgctgtctgtaatatctcccagcaggtctgagccttcagagcctgccctcttgggctttccaatctggatgtctctgatgacccggtccatagcttagtaattacttgttgaatgacttgagtaagtctggagaaaaagttaactccttcactgtgataggtgagggaaggtatcagagaaggaggtacaggggatttccaaggagctgttctcaggccagctttgggacttgaggccttggaggctccacctgggacttggcattgggccttcactacctccctgagtgcacaggatgctggagcctcccagtttctctggctttcatctcgtcttcatccctgggcagctccctgccctctgcagcatctccccacaccctgtctccacggtaacgtcacagccacaggagtccataatcctggtgggaggagaggagcaaagggcagggacaggggcacatgtggccagcagtgtccatgtgcctctgagcagccaagctcccacaggccagggagggtgcctgccccaaagcctggcagcaaggaggggccagggcagagggcccccaggcagtgcctctgaacattcttctgtctagaaaaggagccagggagctcttaagcaacaggtggagcctctgaccccaggaagcttttggaggctggcagctcgagtgtctccctaggtcaagatcacagccagtccagcttgaggcagaacccagattctctgtggctcaggaaagtctgcccacctgagtatccccacgtcctccctccctgtcctgcccagtccctgttccatcagcctgtggcagcacacaagtgctgctggggctgggggtgactggggagggcagggcaccaatgccagccaggagagggcagggtccactggcagcttcgaccctggagcagccccactgagggaactggaataatggttgaaatgagcagcttgtctgaagacagtcaatttgatagtgcctctaatcatagccgctgagtttctgtctgccagacacagagatccaggaaaatgtaatagaatggacacaaaaagcaaagaaatgcaaagtagagctggaatcccatagatttctttcttcccagacccacagcactattccttggggcccactgcccagtttctttgaagatttggcaatctgctaatttgctgattagcagtacacacataatagttgtacatattttggaggtacatgtgacaatttgatacgtgcatgcactgtgtaatgaacaaatgagggaaactgggatatctgtcacctcaaacatttatctttcctttatgttgagaatattccaatcttctcttctatctatttttaatgatacaatatgttattgctaattagtcactgtactatactattattggtagatcttattctgtccatctaactgaatttttgtatctattaaccaacctctctccatctccccctccccttcccagcctctggtaactactactattctctgcctccaggagatccaccttttttagttctcactgctcggctttctttctaaggaaaatggactcagatgggtctttatggaggtctctagaattaggagtcttaggttctagtctcagttctgtcatctaactggcagcttaggtatagttaacttttcttgtcctctgattttttattctaaaatgatggtattggattggatgaagtcccttacagactataaccaacaacacccgcacttttctgcctttgtccatccagagctgcattgggggtgacaaaccttgctttaaaacacatattctattaaggtgttcatttttcaagcagatgctttcttgcccacagtacattcaatttatccaagtgaataatatctaccactttcaaatactgactatattatcttccttatatgcatcagctttaatctctgtgacagccataaaagatagaaattattactcccattttacagaggaggaaacggagactcagagatagaaagtaaagtgttaatcaaggccacacaggtggtgagaactgaagctgttatttgagcctagatctgtctgatacaatatttccatgctgccccagatcatattttctacatatgctaggtttatcttcttcactttcattatgatatatatcacaacatatgtgatggcttgcctcttatttccccctgccccatcgctgcccccagcatgtgaggtcgataatgacctcacataagatcttgcccttggtgtttagtgcatagtagaccctgaacatttgtaaagaggatgtacaaataaaggaatgaatatattccaaaattttagaacttgggtaagttggagactgcttttaaatatagaagtatagtccacagtgccaaaatagtgggcattcaataaatcctaatttatatgcaaatgtgtacacacacacacatgcacacacacacaataatcaaagcttgtttgtgatgatatacacacagcataagttgtggtggaccagcattttttcccccagatcaaaactggtacatagcctttcaaataaattagtgctttaatcttagctgatgcatttgaaggaaggagtatatccacatgccagtgccagggtgatcctgtggcctctccaacagaaaccatagagggctgtgttttcagaaagagtaaacacaaccttttctctcatttttttttttctggtgatatttgtaggcccacacctggcatcccatatcacccatgtgggtcagagattacatatgcaataaaaaaggaaatcaaagcacgaaatgaggaaattactgataacagcatttatcaaaaggtgagggcagaaaatcattttaaaatttaaaaacaaaagcccatacactgtgtgttacagggatgtgtgtgtttatatataaaaattgctaaatacccaggttaggcaccatttaaccagcagagctgttgcctcaggcagttgtttttctaattgcaggtctcggctgtgtcaccagctagctgggagcccaaggggagctaagaaagtcttgttctgtcctttgaattccttttcaacagtctggcttccctaccacccaggagggcacagatcttccatgcccctccccagcccaggctgctgctggcctgctgtgtcccacccactggggaacagcccttggaacaagaggctgctgttaggttcagcttccagggctgggacataattggccctggctctaatgagcagggctaaggtggcagagcctatcgctgattgcaactgctacctgcagagggaccaggacaagcatcaagctaacagcttggagagctgccactcggacagcccataatttccaaattagatacttcagaggtctggattttgctgtgcggacagagctcaggggcagctctcgcagaaggtggagaacttagacaaattttcattcatagtcaacagggtcccaggctcccctttcttcgtttttcatttacatgtaaatagtggggggtcgggggggtggtaatggagaggggattctggagctcagttcctggggcaaggggtggcaggagaccttgaagccagtgaggccggttctattgcactctttcaactcggtggaagcagaagtactataaactttgtagattcatccttgagggccctgcccagaaatagaactgtacagtccacaaagcagcactgaacaagagaacagggtcgctttgtattgctgagatctccccttcttgttatttacttgtagctttctgtaattggatgagtggatatttactgagtaaagtgacatctgtactaggcatatgttctttaactacccagacccactggagggagagagaccatctgatgtggccactgcacctcacagaggttgagtgactcctctagggaagcggcacagtcaggattcaaatgcaggtctgtcttcccggccgctacctacgtactgtcatctgtctctcccattgcctccggagctgcttgggtctcctggtgtcagtctcccagcctggtggctcctatggtggtggctgcctctcaaatgctgcacatggaggcccacggtgagcccaggggtccattcattcctttttgctgcaggtcggatgtgtgcatgtgaattccattggggatcacagtttattttcttttactgtggttaaaaaaatacatgatgtgaaatttaccatcttaataattttgacgtgtacagtttgataatgttaagaatatttatgttattgtaaaatagatctccagaactttctcgtcttgaaacactgaagctctatactcattcaacacgaattctccatgttactctctctgcagcctctggccaccaccattttaccttctgtctctatgaatttgactcctttagatacctcacataatgcagtatttgtctttttctgcctggcctatttcccttagcatgctgtcttcaaggttcatccatgttgtagcatgtgacaggattttcttctttttttaaaaaaaattgtatttttattgaaaaataataattgaatgtgtttatagggtacaatgtaatgcttcaatacatgtatgtattgtggaacgagcaaatgaggctaattaacgtacccatcacctcacatacttatcatttttttgtggtgagaacattcaaaattcattcttttagcaattttgaaatagacaacttgtcattactaactatagtcatgttgcaatgcaatggatcaccaaaacttattcctgttgcctaattaaaacttagtcaaccctcattctgccaataggctctggtaaccaccattttaccttctacttctatgagttcaaattcgtagattccacatataagcaagatcatacaatgtctttctgtgcttggcttatttcatttagtgtaatgtcccctagattcacccaagttgtcataaatgacagaatttcattctttgtaaaggctggattgtattccattgtggatatatagatcacgttgtttttttcaatctttatctgttgatgggcacttaggttgtttccaaatcttggctattgtgaataatgccaccataaacatgaggatacagatatctcttcaatgtgctgatcttagttcctttggagacacacccagatgtaagattgctggattatatggtaatgctatttttagttttttgaggaacctgcatattattctccaaaatggctatgttaatttatatttccaccaacggtttataagtgttcccttttctctacatccttgttaccatttgtggtctaccatatttttgataatagccattctatccagcatgaggtgacatctcattgtggttttattttgcatctccctgacgaatagtgatgttgagcatttttaaaaaatatatgttgaccttttgcatgtcttttttttgacaaatgcctattcaggtcctttgcacattcttaaacagggttattttttgtcttggtattgagtagtttgagttccttatatgttttgtatatgagctccttatctgatgtatgatttgcaaatattttctctcaatttattgtttccttcactacgtagaaacattttagtttgatgtaattcagtttgttgatttttcttttgtagactgtgattttggggtcatatgcaaaaaataattgccaaatcgacatcttttttatttattattatttttttgagatggagtcttgctctgtcacccaggctggagtgctgtggtgtgatctcagctcaccgcaacctccacctcccaggttcaagcaattctctgcctcagcctcccaagtagctgggactacaggcgtctgccaccacgcctggctaattttttgtattattttatttaatttttttagtagagacggggtctcaccatgttggccaagatggtctcgaactcctgacctcgtgatccatccacttcggcctcccaaagtgctgagattacatgcatgagccaccgtgcccggcccagatcaacatcttatagcttttcccctatattttcttctagtagttttacagtttcaagtgttacatttaagtatttattttaagttgattcttttataaagggtgagacaagcgtacaatttcattcttcagcatgtggacagccagttttcccaacacctctcattgaagagactgcccttttctcactgtgtgttcttggcctttttgttgagaattgattgactatagatgcatgggtttacttcttggatctctatctgattccattaggatttccttctcttaaggctgaataatatcccattgtatgtggataccacgttttctctatctactcatccattagtagacacttaggttgcttccacttctgctattatgaataatgctgcagtgaacatgggtgtgcctggtccagggagctctgacttttacaaggagactgagtagagagtgaagcttttctgttctgcccttcagccaggacgaagtacagacaatgcactaatctgttcctgatcaagcccactgggacacaagggggatgggtgggtcacaagttacagagggaaaagccagggctttggaatcagatgagtttaagtcccaagtctgccttctatgatctgtgtgacctggagcaaattactcaacctctctgaatcctaattcatatatatatgtatatatataataattattatttttccatgacggagtctcactctattgcccaggctggagtgcagtggggtgacctcagctcactgaaatctccacctcccaggttcaagcgtgaatcctaattccttcacctgtaactagattattgcaagaggaccatatagtgtccgctggtaaatattttaacaactagctctccaaaaataataatgctctaatttgaagcatttaatgattttattgtgtaaagactcaaactgtagctgatttgaagccaccaacctgccttctttaaatgtagagtgaggaagagtgagccacccaccagccccagcacaccactgtccatatataaaatgtctttcccagtatttgggatgtgccaggttctctgttaatactagtttccttcctaatattagttccatcctccccccagccccccatcaaaaggactctgggtaacctagataataagaatgattgctcaattctacacatttatttgactaatatacattgaccttctatcacatacaaagctctgtcctaggagtagagtaaaaggtgcagaggaataaggaggggacttttaaaaaatcatgtgacccagccctgtctttagggagtccagcctggggggacaaccccttccgtgtgccggcatctccgtcatggaacgtgttaatcatctgtggacttgtttctctccctgcactgtggtctcctggaagataatgactctatcttgcttattttgttatctacattgcttagcatttctaaagtattcaataaatagttgtcgaattattttacgaacttgaaatctacctaagaaggcataactaacaaatccaagacagagaagaatacaagaaaacaggcaatcgtaattctaaaacttctcatttgataggcatcttactacttcaaagctttctcagttaaaatagttaacacggactgagtgcgtatggtataccaggcatcagtatcctcactcaacatacattatctcattgaaaatttacaacaactcaatctgtacaactaccccaatggggtagatactgttatcatcacccccacttcctagatgaataaaatgagcagcagcagttaagtgggtttttcagtattttttgttgttgatattgtatgcatggagccaggatgtgaacctaggacttgatgtttactgccccatggagtagagaaagtaggaaactttcttacgtactcatttgataggtgataaaactgtggcttagagagggagatggagattaagtaacttgcccaaagtcactcagctaacaagatgcagaaccccaggactaaaatacaggcctgctaactcctaataaaataaagagcataaagtaaagtatggtgtgaagtactataggcaaaaagggatagtggctgggcagggtggctcacacctgaaatcctagcgctttgggaggccgaggcgggtagatcacctgagttcaggagtttgagaccagcctggccaacatggtgaaaccccgtctctactaaaaaaaaatacaaaaattagctggacatggtggcagaaacctgtgatcccagctactcaagaggctgaggcaggagaattgcttgaacccaggaggaggaggtagcagtgagctgagattgcaccactgcactccagcctggataacaaagcaagaccttatctcagaaaaaaaaaaaaaaaagatggggactggttcagagaagggccatactactgggatatccagtggtcagtggtcagtggtcagggaagaattccagaagatgtgtggtttgagtaggaccctggggaggtgagggtggatctgaatcagcagtgtctcatttcctgtcccccaatgtgcgcgcgcgcgcgcgcgcacacacacacacacacacacacacacacacacacgcatgcacaccagtggccctagcccttgctcctcaacatggaaagcaagggctaaacttcagacaagctttccccatcttctggaaaccacagcttcacagttgctgcttttcttgtgtatttatttttcaagttatttacataaaggatccaccggccccttggctgtcagacaacattgccctttctcctggcttttatctgactcctggagaggttgtcatgctctcaattacctgaaacatgcctgtgtcccaatatgatttggggtcagccacctcttactttgcaagcagtaagtactacaaccacaacggccgaacttgacgcacagatccccattaaaagaagaagcgtgcaggctttcctgcaggcctcttgggctgctggcaggcaggctggggtgtgagttgaatgtgttgggctggagggggccagaggaggggagaagaaatgggacaatggagctcactcagcttcctaatccatcccagctatggaattttcctgtgaatgtttatttttttgagtcatgtacactgttaaagtaatatttttcaaaagattaaaaatctgtttctcaaacaattacatgtcaaagattcatttaactcatgaatgagacaactagcagaatgacaaagctgggtttaagagaggatacaggcctataatcccagcactttgggaggctgaggccagtggatcacttaaggtcaggagtttgagaccagcctggccgacatggtaaaaccccatctctactaaaaatacaaaattagccgggcgtggtagcaggtgcctgtaatcccagttacttgggaggctgaggcaggagaatcacttgaacccggaagcagaggtagcagtgagccaagattgtgccactgcactccagcctgggtgacagagcaagattccatctcaaaataaataaataaataataaataaaagaggatacaggaaaaattatatatatacatatatacgtggaagaaatctggaataagattgctaaattagatgcaaaacttaatgtctcacagggcaacaaaatcataaggctttggacaatcttctctactggatggaaatcactcacatgttaccatcttttctaactgttagcatctatctcataggtttaggccctttgtggatggtaaatagtaaacaaacaaaacagattctcctggagaatcaaagcctgaggtgggcttgctgccttattaacaagttttggatacatattcttaacagcttaaaagaatctagccagtcctgtgcagtggcgattctgcaagttgctgaatatgcctattccaattatgtgttctggaaccagagaggtaactacagggtgggttcacagacccactggacccactgtgagaaggaactgagctaaatctccattgattgcctgacctccagaagtcccacctttgactgggggctacagtgatgttttgggtctccaggaattagtgtcattagagcctggtcagagccctcacctaatctagtaatcctccaaaagtctattttattttcccaatgcatagttaccctggtaaggagtggtccgtttggagaaagctgggagaaatattaacaatgtaaatttttggcaggggtcttcctcaagaggaccaaatctctccttcatttacgggttctgcatctgtcaattggctcaaatctgggaattaatcaggggccataactctctgttttggtgaagaaagttagacttctgatcacttgatatagaactcttctacttaaagagattgagtgagaatgtagtagactgcctatctatttctctgctaaggataccatgatcacctagccaacactgttggtctcagactattttattaactgctttggctctgctgtccattaggctgtggagacaaggtggggtttgggagaggagcctttgaggcagaatgttgagatgtgagttctgatcctgcctttgctactaactagctgagtaatcttgtgcaaatagagaagcctctctgggccagcttcttcaactcctaaagagggagtaataaccctgccctgcttggtcagagggctgtttcgaggccttcaaaaagcacaacaatgttgttagctctggttgcttgtttggcattggtgttttagatggtgtgagtagaggatgcaagctggaagtgctttggctcagctagtgtgatgagttagttgccgggatttcatgatagggagatttcaaataaaagttccaatttctgtcttcttttgaaatattgtttccattctcaaatggcaacaatagactaaggatcccattctctccagtttaccagccacctcccactacttcacttgtgaacattgcattcgtggagggtggcaggtgcagctctggatgctgggaataagtgcatacaaaatggaagagatatgaactgcacagcgagacaagtggaacagcagggctggtgctaatctgaacggtagctcagggagcaatcagttctacccacaactgctcactaaacaccgccccctgatttctttcttggctctcagccattttgctctgactttggggtgaattttcgcttctctggtagtctctctctggctccaattcttggaagacccatccggcttgtctgagtatatccacttgctaggtattcagaccatttctgcactctcttcaactgttactccagcttaaaatcacagcttaactggctaacagtcctcccatggctgacaccgtcttggtgggagcagctccgtgttatggccgtcactctgctagcccagcatttattcatctagaagttttactgtgcacctatgatggcatgtgctcagggggaagcagcattatgcttttccaagcctgcccttggctcacatgatctgctcatgttggaaggacgcctacagttcccaactcacttgtgtagcacaggtgcttgacatgtccaaacgtcatgaatgccaaggccttcctgtctcacctgcccaatttcccagggcatctcagtttccctcctcccccaggggtctgggacatgcctcaactttacaatattaccttggcagagcctcccatatcagactctatgggagcacagcaggaagaagtcttgatgagctcagagggttcagggaaggctattctaggaggtgggcttttccctttgaagagttggaaggatttggacagttgggaatggggaggcaggtggagaaatggcagcattcaaaggaggatgaggggaagcgaggggtacaaaagtcacagactagatcaacgccagctgcagtctagcctgtccacaggaggggccagcaggtaatgtgggaagatcaaagacagagagctaaagaatctggacttttcccttcaggggagtcatagaagatattttgagcgaggcggtgacatgagcctgaagccatggctttgggaggtggacttggtgggcatgtgcaggatggtcaggaaggcaggctaaaggtagggttgagaagaaactcttgaatttggccccctgctgacccctcccatctcctccatcctgcctgggtctgtgggcctggtctcctcttcgcaggcccagtgtggtgcagctcctttagaggtggccaaggagagctacccagctccttaccaatcctttccactctagggaacccgaatgaggcctgaccccagtcccctctcggaagtgacaatgagcttgaggaagagacagaatagactgctgtacccgtgcccttggatgaggacagtgaacaacaccaggccctctggctctgtcttcctcctgttcctctctcatggctggggctgagatgaagacaggtgattaatactgctgtcaagagagcatcacgttgcaattactgagatgccacctccttcagaaggaaaaatattgtagcagtgactcctgggctttttagagtggggagcagctctgacagggagccaggagtctctgtgtttccaagaatagccagggagttcccccggagcttgaggcgtggttttcagccaccgtgcatctgggctgggctgggatgctggaatcacagttgctgcctggttccttccaaggagcggctgccccaggttgaagtcagacccccttacccattgctctgggcttgggtgctctactggcctatggacaagagatctcatcaggacaggaaaagaacgtcattagactcctgcatcttcctgcctcggagctcattatctctggtgactcactcactccctgtttcgtggttccatctcgcagagtgatgatgacttcctagcctgaaggtcctctgactacattctctgctgccagacaccatctagagccccctcagtatccctttgtgggatcttaccttcatcatggcctcagacacctgctttaaccacaatagacagttgtccccagactgacaagcagggagggcctgggcaccctgagctccctccttcagctactggcccctcaacatggacaaggctggagatcgcatcatggcagattagaatcttaggactggtgggaggaagccttgtgtgtcctctgatgtggccacacatgtttgttacaaaaggacatccagggccagaagagggaagccacttgcttgaggtcacatggttggaaatgtggggcagagcaggggccagaagccagatgctgactgcctgtcagaattcagtccctacacaccccgccccatgtctgtctgtcttgcttcatggaccactcacaccccagagttccgcctgccttctctgttgcccaccaaacccgtgtgtgtttgttcgttcatatgcaaggtgagtagtgaatttgctggctggctcgcatcctctgcaggtgctggaacaagcagcactttcttttctttctttctctcctttttttttttttttcagagggtggtatggaagccttgaatcctgtcaaagtttccttgttttgattctcatgggcacttccatctgcccataccaagcattctgtgtaacaggggtgtgccagaaactgcaaattcaattaaaagcccgagagagctcccccaggaaaggcacaggagcggggagaggattttatgatttaaagaacaacatcacggagcctgagcaattccagggcagcagcagcagggacagacatgggcacaacagaacagagtgtggccgtgcagcccagcgggcctcccgactttaccccaggccccggggagggtggggctgctgtctttggaggctggagcagaagtgggcaggtttggacttgcaagggctatgacatgctagaggatcccaagttccctgagggcatctacacagatctgagtttgttcagcatttgtgcagccctcttcttgtctggtgtgagtgctgcttaggagtcaagactgcagatgaagcccacagcagcaagttaggaattctgtcctatcagccatcagctcctgtggcaatggtgtgatggttccttgaagacccctcccactttggaaacacagggaatatgccttactgtcagtgttggcctcatcctcactcgccaccaacactgagttcctaaatggtgctcttacagccacgtgcctccacaggacttctctctgtttctcattttcacaactacttgcatcaatgtgtactgtacagtggggacatgggattgaatttacaggattattatgaggcttagcagcaacatgggtaaactatttccaaatatcccatcttgcatttgcagtatgttaatgttagtagggggtgcctcattgccactgtggaaacagaggttttgcaactagacaaacccagtcttccatcctccactgccacttcctagttgacataggttattaaaggaactcccttggccccattggcattatctgtgaaaaaggattagtaatgtttcccttttaaggttgcttttagaattaggacaaaggtgtgtacagtgtgcaagacagtgtccagtatacggtgaacagtcaataaacaggagctaccgttactatgactgctgtgttttctccagttctgacagcaactctgtgtctgactcagcgccgggggtagaaactggtcttttcagcagacgtgactctaaggagtttggatgaagagagtgcctggggaactagggtgggatccatggaggtggggtgactgtatcagatctgtcatcagggcttctggaaaggggcgagtgggaagggggagctgaagaccctccatgtacttcccatgcatgaagtggggtccatgtgtcccaggaggagtgaaacatgccgctgaggtctggcaggaagcaaggggacaattgcaggtcagacacagagaaaaacttactgggccaggacaacaggcaactcactggaactcacggacccaggcccctggaaatgctccagaacaggctggaaaatgcctccaaggccaggccacccccagcatctctgtagccagcagtggctctggagacaggctgagcttgttagagtcctgcctctatcacctagcagctagaactgtggataaatttttgaagttctctgggcttccgtctcctgggaaatggagacgtgatgaggattcatggagagcacatgtataaggagggttgctatgcctggaacacagtaggtgcttaaaatgatggctacgaaaaatggatcaattgacagatattaattcccctctcctccttttctgcttctctgcctcctgccccttgcatgcgcagtcagcaccatgtgggacagatacttgatatttgctccatccaagggtgaaggagaagaggaccctcccctttgcctggaaaaagtttctgcatccttgcctgcaggtgggaggaggatacgatgcctcaggaaggcctggacagccccttcacacagatacctgggtatcggaggtgcctgtgtgaatgcctgttttccattcgagataattttagacttgcagaagagtagcaaagtagtgcagagagttcccctatacccttcactcagcttcccctaaagtgaacgttttatataaccacagagtgatgatcaaaactaagaaaataacattggctcaatattattaactaaatgacagattttatttgcattttgccagtttttccactaatgtccttttcctggcccaggatcgaatccaggatcccacatggtttggttgtcacatctgagtctcctgtaatctgtgacagctcctcagtctttccttgtctttcatgaccttgagatttttgaagagtgctggtcaggtgttttcagaatgtggagctattttcacacttgtgatggagtgtgcagcactgagttttgcagtcttgctttaatatttttctgctgtcttatttttgctagactcccagagcctttgcttctgccaaaaatctgtcccgtgcagtgaaagatcccatgcagctacaaaagtggcaggaagttcatctgtttagtgtgtgacattagccacgttaccctctctgcaaaatgtgcaccctctttcctactcactggtctggcttgtgctcatatcagagccccagctgtcgagctagtacctctatccagatggtggcctccgtgaggacaatggagcttgcctctcttgttcaacgttgtacccttagtccctaatcagcactgcatataataggggctcagcaaatgtgtggtgaataaaggagcaatcaccgtcatcatcagccaccatttatagatggcccatggagtgtaaaagacagtcattcaggttgtggatgtgtaagccatgtaatttcctcaaggaacatacagccccgttagagactgaacatagatagaaaaagctgatatgctggccagtcagtacagcagaagccctcatattcagtatggtggattgactgatttcaaaagttctttaaacagggaattcatttaaaaatgatactccaatcatttcattttaccttagggcattcatgtacattcatttaccaaacgttctgttcatatcttgggtcatttctttgagtacaaatacaccagctgggtgtggctcatgcctatactcccagcactttgggaggctgaggcacgcagatcactggaggtcaggagtttgagaccagcctggtcaacatggtgaaaccctgtctctactaaaaaacataaaaattagttgggtgtggtggtgcatgcctgtgatctcagctattctggaggctgaggcagtagaatcgcttgaacccgggaggcggaggttgcagtcagccgaaattgtgccactgcactccagcctgggccacagagtgagaaagaaaaacaaaaacacaaacaacaacaacaacaaaaacaaattcatcaactggagtcttgcctcaccctatttgcttaagtgtgcccatagtactttacttacagcttccagttttttttagttttattttttaaagcacagcaaagacttaaacttacaaaatgatatagtgtagacgcttagattttaagaattttcagttatctcatttgcatattagataactagttaggttttttgtttgtttgtttttagcaatttttctttatcaaaatttttcccaatgcattccacttagttttcatggatcaatattttgacttggcatccatatttcattgtttatgaaatagtgagctaaactaatgacaatgacaagaactggtgtacacaggtttggcagaggactaactgcctggcgagctgacagctctcctggtatgctaggaggacagatagagcacagggtcctggaagggaacatatggtgtgcggtgcacatccgtcagcgtcctttcccaaaacagtgattggagagcgatggttaatccaatctgcccaaaacttggaggtcactagagagcttctaatatgtatctttcctctcaagttagttgtccttgctgagcgccacactgtgctaaaatgcgctggataccccaggagcaaaagatgaataagatacaagccttgttcttaaagagcataggagaggagagagacagacttgcagattttggtaccacaagtgccaagaagagccaatagtgtactatgaaattgaagaggaataaataatttgcccaaaaatagatcacagaaggcttctcggaggaggtggcctcagatgagcaatagaggccatggtgagaaaggaatttgcaagaggctgagaccactgagcctcatcatctcaaacaacccaagcatacaaataagcctggtaacagagatgctggtgttttctgaaatagaagttgaaaggaccagtagcagctggatccacttgttcactgtcatcagcattggtcgtgaaggggaccagaatcctcctctcccccatcacgcaaaccctagcatatttgttaggcttacagataagaaaagagggggacagaaccagccttccctcggggagcccagcactgcatggaggaaaaaaggcacaaaggtaatgggcaggcccctctcccaggtcaccagcagccctgcctatcaagctgatgcatgcggtagagtccagacctcgatttgcctcatgccaggaagatggaatgttttgtttcaatctgtgacacgcacctcagttgctgaagagattagcgcttcctgggctgcaaaggtaattagatgatcaatcgtagaaagtctaaagcaaatggaacctttagggagagagatttgtgtttgctgtgtcccatggaatatcagcagggaagaaaaggaacctaaaggagctgtgtttctgaagaaacaggggcctccagacacagggctgaagtctccaggcagggctggggagg

SEQ ID NO: 694 - DNA, 32746 bp, Homo sapiens
  source 1..32746: mol_type = other DNA
caccgagcctggctctactgcaggcgctgggggttggggtgggggagaggcccagggcacatgatgccgcccccagcccgcccagcacatgacccaggcaggccggcggggtcctggcacacccgagccgcgtccgcgaacacagcccatggcctccccgcgcctagggaccttctgctgccccacgcgggacgcagccacgcagctcgtgctgagcttccagccgcgggccttccacgcgctctgcctgggcagcggcgggctccgcttggcgctgggccttctgcagctgctgcccggccgccggcccgcgggccccgggtcccccgcgacgtccccgccggcctcggtccgcatcctgcgcgctgccgctgcctgcgaccttctcggctgcctgggtaagggcgcgcgcggcccgcgggttggaatctgatcagcgcctgggtgagggcgcgtggcccgcaggttgagacccgactggtgcccggataagggcgcacggcctgtggatttggacctgttccgtgatggagtgaggacgagaggcccgcgggttggaacctgcccggtgcagggctgagggcgcgtagctggctggttgggacctgctcggtccccggctgagggcttgaggcccgcgggttgggacctgctcagtgctggggtgagggcgtgaggccctggggttgggacctgctcaatccccgggtgagagtgcgtggcccgcaggttgagaccggatcgatgcccgggtgagggcgcatggcccgcaggttggaactcgatccactcgggttggaacttgatcggtgcccgggtgatggcgcacggctagcgggttgggctggccgtcttaacacttgaaccacagagaaaagagaaagcggaggctgttccctagggaccggatgggacaactaggtaatttttttttttttttttgagacggagtcttgctctgtcgcccagactgaagtgcagtggcgcaatctcggctcactgcaacctccacctcccgggttcaagggattctcttgcctcagcctcccgagtagctgggggaggcgcgcgccaccatgcccgactaatttttgtatttttagtagagacggagtttcaccatgttggccaggctgctctcgaactcctgacctcaggtaatccacccgcctcggcctcccaaagtgctgggattacaggcgtaagccaccgcgcccggccgactaggtagttttgcaaacacatggtcggtaaaattcccatccaagggacgttgggttttaaaaaatccgtttattgtgtttgttatatggaaacttcagatggcgcagttaagcaaaacccagaccagaaaagatttcctcatttttgcccaactgcaccagggagagactaacaattaacttctctctgtctcgctctgtgtgtgtgtgtgtgtgtgtgtgtgtgtgtgtgtgtgtgcgcgtgtgtaaattcttttctattgtgcactatatattctctcgagtattttgtaagctgaaatcccttccctatccaggctttttgggtatggtttttacaccacaggtgcgcaaactgcagccctcagaccaaatcctgcccgttttctagggtccacgagctaagaatggttttacatcctactttttaaaaaattaatgattttgttttttgagacagggtctcaccctcttgcccaggttgagtgcagtgtcacaatcacagctcactgcagcctcgacctcctgggttcaagcgatcctcccacctcagctacccgagtagctgggactacagccacacgccaccatgctagggtaaatatatgtggggtctcactatgttgcccaggctggtctccaactcctgggcttaattaaaagatcaccacccttggcatcgtaaagtgttaggattacaggcgtgagccacctcacccagccctaaaatgtttttaaaaatcaaaattaaaaaatatttcctggcatgtgactattactgaaatttaaatgttaatgtctacaaataaagtttgatgggaacgcagctatgttgttcatgtgcatttgtgaattattcatggctgcctttaccctacaagggcagggtgaatattggactgagaaagtatggctcccaaagccaaaaatattaagaatgagtttgccaacatctgctttaaactattatgtgacactttatacagacctctcagctagatttggccattctgtttagctttttggaacatttccaccatgcgtaaatgcagtctataatagaaacacttacagtgaatccctgtacgtgggattcgtgaggtacgggtacccggctcatctgctcccctcttcaccctcctcactggattaatgtgaagccaatctcaggctccatcatcctgcccattcagatctcagagagagccctaaaacataataattctaaacatttgcaaccccaatatcattatcactttatttttgagacagggtctcactctgttgcccaggttggagtgtgctggcatgatcatagctcactgcagcctcgaacttctaggctcaagggatcctcctacctcagcctcctgagcagctggaactacaggcatgcatcaccacactggctaatttttgcattattttttcagagctggagtctcaccatcttgcccaggctggtcaaacttctaggctcaagcgatcctcctacttcggcctcctaaaggtgcggtggctcacgcctgtaatcctaactactcaggaggctgtggtggacggattgcttgaacccaggagttcaagactagcctgggcaacgtaacgagacccaggctctacccccaagaaaaaaaaaacaacaaaaaaaaggcccgtcatggtgggatgcacatgtggtcccagctactcaccaggctgaggcaggaggaccatttgagcccaggaattccaggctagagtgagctacgatccagcctgggtgacagccaagaccctgtctctaaaaaagtaaggtgtacccaaacatcttttgagggttagtgaataatacttgcatatcctttagcctttagaagggaagtggatgaggttgcgagcaaataagcagaagtcaggaaaaggctgggtgatcgggaccccttactgaaaaataagaaatttcaatgcccatgggatagggcttttattaagctcaaaggagtgataaatgctgaaaattctaaggcaccgtacagaagaaaggcattgtttttgttggcagtggcttgataatgagaagatgtcttgagctttttagtgttcacagttgtcgtttagtagtgtattacatagtgtgtgtttagtggtatattacatggtatgtgtttagtagtatattacgtagcatttgtttagtggtgtatcgcatggtgtgtgttgcatattatatggtgtgattttagtagtgtattgcacagtgtgtgtttagtggtgtatggcatgtttaccagtgagcactactacatagtatgtagcttggtgttgtttacagttctcccctttatattacctagcatacttttttttttctcagatggagtctcactctgtcgcccaggctggagtgcagtggtacagtcttggctcactgcaacctccacctcccaggttcaagcgattcttgtgcctcagcctcctgagcagctgggattataggtgcccaccaccgtgcctggctaatttttgtatttttagtagagatgtggtttccccatgttggctaggctggtcttaaactcctgacctcaggtgatccacccacctcagcctcccaaagtgctgggattacaggcgtgagccaccatgccaggctctttacttttcttttctttttgacacagggtctcactctgtcgcccaggctggagtacagtggtgcgatctcgactcactgcaacctccgccttccgggctcaagcgattctcccacctcagcctcctgagtagctgggaccacaggcgcgtgccaccacctccagctaattattgtatttttgtagagatggggttttgccaggctggtgtcatctcctgggctcaagtgatccgccggccttggcctcccaaagtgctgggattacaggcgtgagcaccgcgctcagaccctagtgtacttttaaacaacggatattgcattacctaacaaagaaccataatatgtaccatgagtgtgcatactgttttgaggatattagacatttgggtctaatagcaagagaaactcacaaagaataaatgttaaaggcaaattattgagaattaatttgtgaaaattttaaatgttgtgtttaaaaaagaatgaaggaactatatattcaaacttctaaattgtgctttttgaaaaattcttttttatgtgaggaataactaatatggccactgaaaatgcagccgagaaatccagattgctagtcacatattgcaagtaaaccaacagacaaacaaaatagggatgagactgtggccaactatggtttgcgttaaagtgcctgcgtttgttttgctaccataagttattttctgagtttcaggccaggcgcggtggctcacgcctgtcatcccactttgggagaccaaggcggacagatcacttgaggtcaggagtttgagaccagcctggccaacatggtgataccccgtctctactaaaaatacaaaaattagctgggcgtggttgtgggtgcctgtaatcccagccactcgggaggctgaggcaggagaattacttaaacctgggaggcggaatttgcagtgagcagggtttttaccactgtactgcagcctgggtgacagagccagactccgtctcaaaaaaaaagataaataaaaaataaaaataaaaaaaagttattttatgagtttcaatcttctttttctctctctgcacacacaaatatgtatgttttttcttcctttcttccttttccctccttgtctttttccctccctctctccctccctcctttccttccttccttcttccttcctctcttcctatctctatctattatgtatctatcatttttccaaagcaagaagtcagctttatatttgattaggatcagatacaaagtattatccaattctctcttaggtatggtgatccggtccaccgtgtggttaggattcccaaattttgttgacagcgtctcggatatgaaccacacggaaatttggcctgctgctttctgcgtggggagtgcggtgagtccaccccctctgcatgccctctcctccctacttatgctcctcaaatcgcagcagcagcaaaccctgggagtctgttagaaatgcaggttctcacgtcctgccccatcctgctgatcaggaacccagccctctctgttttaacaaaaccctccaggggatgctgcccagacactcaagtgttgtttctcccacctcttcacaaatgcatcctccgcttacatggggccacgagcaaaaccagctggcacagaaaaagttatcaatccattggatgcattttgtataaatatatacataaatatattaaataaaacatacaagccgggcacggcagcccacacctgtaatcccagcactttgggaggccaaggcaggtggatcacttgaggccaggagttccagaccaccctggtcaacagggtgaaaccccgtctctactaaaaatacaaaaattagctcggcgtggtggtgtgtgcccatggtcctagctactcaggtggctaagacaggagaattgcttcaacccgggaggcggaggttgcagtgagccaagatcgcgccactgcactccagcctgggtgacagagtgaaactccatcttcaaagaaaaaaaataaaaccacataattatatataaacaaattattgaaaaagtaaatagatatcatatatacacagacacacatacacatgtatgttatgctccatccgtcacggtggtgctcaggtgagtgatttgaagcacattccctgatgctgtgttgattgccctgtgctggagcagaattgccagtttccttgcttccctgtcctcagtggcttcctaactgcatctatggaggctctgtctcagcccgcagtggcgagacatcttgaccttgtgtcgtttctaacactggagtccccttactccatcttctctttggaaggactgcctgagtccctcctccccgtactcattcttcctcagaacaagagcttctatctagttcaaagcccccttgagcctgcacctcagtttaaatgacatatcttggaacttcatcctccctgcatacaagtggagcagaaggcatagttccttagtcaaatctgaatgcctacacctatcccaggccacaccctccttggtcccaggaactgtgcccacttgtgtcccgagagctgtcacgtgcggcttcctgacgtcagaggaagccagtgtctaccctgccgtctcaaggatgggctgggcttcttgtacctgtttccagacattttgatgcaggctcttcccgattgcagatgtggatccagctgttgtacagtgcctgcttctggtggctgttttgctatgcagtggatgcttatctggtgatccggagatcggcaggactgaggtattcaccgaggaaatgggatttctgccctagttctattttagagggaagataagagatggcactgagcgtttaaaagtattttgcagtgttgcagacaccgtcattcagaatctgtcagctggcccctccgcctagaaacatccacagcagctcatttttataagaggccaaaggcacatttaaaatattagccaggcacagtggcttgtgcctgtaatcccagctacttgggaggtaggaggattgcatgaggccaggagtttgagaccagcctgtgaaacttagtgagagtccatctccaaaataataaaagaaaatcttgaggattttaaaaaccttgaaagcaagtaattcaataaatgaaatatttggaactggacaaatactaaaacagaatgggcatgtacataaacaattttattgtttattttttactttttagaggcagggtctcgctttgacacccaggctggagtgcagtggtgagagtatggttcactgcagcctcaacctcccaggctcaagcgattcttccacctcggcctcctcagtctgtagctgggactacagacatgtgccaccaaacctggctaattttattatttttgtagagatggggtcttgctatgcagcccaggctggtctcaaactcctggcttcaagtgatcctcctgcctcggcctcccaaagtgctgggattacaggcataagccactgcataaacaattttttattatatttaaaggttcaaaggatgtatatattgacacttcatgctaaatctggaacctgagaatgccggggctggaggtggctgcttggcagggagttactcagtggctagtatctggggcactggtgtgtttgaactgatgcccagtcactcgtgagctgtgtaactgttggcgagttgtttaacttctctggacttctgttttctcagctgtgaaatggtacccaccacacaaggtcactgtgaagagtaaatgtgataacccctgtatatggttaagaacagtcctgaaacgttgccagctcttgatacctatcagctgttacagtaggtgggctgcacatgtgttgaggaaacatccacatagaaagctgaactgacacagagaagctggatgtggcatggcagggctccaaatccaggaagcatttgcccccaccaagttcatggtccacttgattcaggtcccctttgaagggagcccctccttgcctgttttttgttctggtttttgtttaaatacagctttgtaggccaggcacagtggcttacacctgtaatcccagaactttgggatgctgaagcaggaggactgcttgagcccaggagttttgagaccagcctgggcaatacagtgagacccatctctacaaaaaataaaaaaaagatagccaggcatggtggggtgcaacggtggtcccagctactcgggaggctgaggtgggaggatggcttcagcccaggaggtcaaagcacatgatcgtgtcactgtactccagcctgggcgacagagtgagaccctatctcaaaaaacaatagaaacaaacaacaacaacaacaaaaaacccagctttataaaggtcacctgtttaaagcctaaaatccagtggtttttcgtgtattcacagaattgcataaccatcaccgttatcgatgttacaccattttaatcatcccctctacatctctgtggtggttattagtcactcctcactgccccctccccacagcccccagcaaccacttatctactttctgtctctgtggagctgcatgttctggacatttcatagcaatggaatcatacagtacgtgacctttcgtgtttgggtttttaactcagtgtaacattttcacggtttatccgtgttgtcacatgtctgtgcttcattcctgttatggtctgaatgtttctgtccctccaaaaattcctgtattgaaattctaacccctaaggtgatggtattaggaggcagggcctttgggaagttattaggtcataagtgggatcagtgcccttgtaaaaggggccccagagagttccctcaccccttctaccatgtggggacacagcaagaaggtgctatctatgaaccaggaagcagggcctcaccagacatcacatctgctataccttgatcttggactcccagcctccagagctgtgagcaataattgtttataagccacctagtgtgtgatattttgttatagcagcctacatggactaaaacaaccccttttcattgctaaataatattccagtgtaaggctatactacattttgtttatccatttatcagttgatggacattttgtgtgcttccattgttttgactacttccattgtttggctactaggaataatgctgcaactgacatttgtctgcaagtgtttgtgtggacatatgttttcatcacatattcctgagtatatatctaggtgtgtaattgctgagccatgtggtaactctaggtataaccaggtaagaaactgttaaactgctttccaaggtgagtgtaccattttacattctagcagtaatgtgagggttgcagtttatccacatccttgtcaatacttgttattatctgttttaattttagccatcctagcatgtgtgaattggtagctcctcatggttttgatttcactgatgagtaatgatgctaagcatcttttcatgtgctgattggtcatgtatatatcttcttagagaaatatctattcacctcttttgcacattatttcattgggctatttggttttttattattgagttgtaggagttctttatatattctagatacaagtagcatattacatacgtgattcacaaatagtttctcccattctgtggtttgtctttacacctacttgatgatatctttcaaagcacagaagtttttcattctgatgaagtccaatttttctatttctttccttgatttcttattcttttgttgtcatatctaagaaatcattgcctaacccaaggtcacaaagatttagacctatgttttcttatggtttgaatgcttaaatttaggtccacttagaatttttgtgcacaggtgactaatgggtccatcttcattattttgcatgtggatatccagttgtcccagcaccatttattgaataaatttacttttaaagccaatatcagtaaatagagatcatatgtaggctatagaatatattgggtaatcccagtagatccccgctctaaaatcattgacattccttatgtagatcacatcatcaactttggtctctctggcctgaagtttagtgcttacttcatttttatgcttgttccttccatctttttaccttagctcccaaactcttacacatctgaaccaaactgagatatgcctggttgtgaaaattctccagggaagatagtcaaggtcagagccagccaattaggtgtatcagtgaagattcattttggctacataaaatatatataataataatgacttaaacaaggtagagatttctctttcatgctaaagatgtccagaggtaggcaatccaggacacttgtgatggacatcagggacccaggttcctttgattttcctgcgtcactatcctatcgtgtgacttccatcctcaaagtgtcatggcccaatatagctgctggtgctccagtcatcacacctacattctgggcatcaggaagtgggaagagagcaatgcaatgcaatagaggcctgtgttcccctgagccagctttaagtagtgtcttgggagtttcatacaatgccagttacatattatcggtcagaagttagttttttttttttttttttagatggagtttcactcttagtttcttttttcttttcttttttttgagatggagtttcactcttagggtgaaaaagatagagtttcactctttttgcccaggccagagtgcaatggcacgatcttggctcactgcaacctgcaccgcctgggttcaagcgattctcctgcctcagtttcccacgtagctgggattacaggtgcctgccaccatgaccagctaatttttgtatttttagtagagatggggtttcgccatgttggtcaggctggtctcgaactcctgacctcaggtgatccacccgcctcggcatcccaaagtgttgggattacaggcttgagccaccatgcctggccagaacttagtttcatgccacacttagctgctaaaggaggtaggaaatagactctgtgagccgagcatgcagctgccctcatgacatccaggttatgttactgagggaaaaaggaaatatggctttgagtaggtaatcagcagtgtgatacagccatggccctgcagctctcatgattggcatgtctctgagcatccctcagtgttggagaggtcggaggtctgacacaactgtaggtcttatagatgccagttatgggtagaagaagcgtctcagagtgctggaaggaagctgggagaaaagtaatgccctctgctgccatagaggatatattacttcacctccacccacggtggggatgtgggggaaaagggatggggtcccacagggcaatctgagaactgtctggacccagaggacagacagggccctgagaagctgggacaggcaatcatgaagccctccttaccccaaggatagtatttgggagttcatttggagctcagtgatcagaaggcaggatgttgggaccaagggtcttcagccagtggggggcgcaggcttctcctgatctgctgtggattggggttcagacttctgccccggtgtgggtttcagaggcccagcccgaagtcagggtctggaatgcagagattctgcactctcaaacacccagccctttgcagaaagcctctccgttagttatctgagtctcatacagagcttctggttcctggcccacattgctgagacatacccccaaccctcacccgctcccagcccagccaggctagggaagagccatgccaggaaccagtcacagtgtgggaggcaaaacatgctggaagtgtttcttttcctcccgaagctctttgggcttgtttctttcctcttgtctcattgtagaagggtgtcctttctcactcagatccctttgtctacacagctgatcttccaagttgaagtcccgatggggtgggggttgtgatatttgccaggaatctggtagggttttgagtgacagccatgcatcccatggagctccagccccctaccccacctcgtcccatcagacaggagaggcaaacccaagactggatggcaccagtcagctctgcagagcttccatcttcagtcttcctgcggcatctggaaggctgcggcctcaactcctgggggaaacggggtggggtgtatggaagtacaaagatgaaagctagagactgtgcaagaatgccagctgtgcagggaatggggaggcgaaaggcaagtcccccgctctcctctcgggaagcatgtagtagctgctgtttctgcagagacagccttcccaggtgggactgagcattcagacttggctattaggtgtggaggtgactctggaagggcttggggataggagctccttgcttatcgggtgagccaggtattcaggaggcataaggcctctctcgctggggggctgtgagggcccacacagctgagaaggaaccccacgttcatgtccttctgttgggaaacctcaggttcaggtttgctgcagatccacctggattcgcttccatgccagaggatcaggtaggaaaaagcaaaccagacaagcccaagcacagctcctcctccctttctgacatctccataaaaaactttgcagtcacagccattggctgatttcttctctaagctatcccctcatcttttataactgggttttttttttttttttcagattctgtttttttcaattatttttatttttatttatttatttatttttttgagacggagtcttgctctgtcgcccaggctggagtgcagtggtgtgatctcggctcactgcaacctccacctcccaggttccaggaactctcctgcctcagtctcctgagtagctgggactacaggcacctgccaccacacccagctaatttttgtatttttagtagagatggggtttcaccatgttggcctggctggtcctgatccacccgccttggcctcccaacgtgctgggattataggcatgagccactgcgcccggcctttttcaagttttaaggtttatcttgttgcaaatttttttttgaatagatgaaaagagcccttcagtaggttatcagacttacacttaaactgacatggtcctgtggcccacagaggcttctgtgacccagtcctcaacacacggcgctccctctgtcgtctctcaccctccccactccagccacgcccagctcccagcttctagaaggcgcctgtattcctttttttttctttctttcttatttttaatagctgcatctcactctgtcatctaggctggagggcagtggcatgatcacagctcactgcaaccttcaactcctgggctcaagcaatcctcccgcctcagcctcctgagtagctggggctacaggtgtgcacctccaggccaggctgcagctcacattctttgacttgtggccttttcctccatcttcaaagccagcaatggtgggttacgtccttctcaaattccctcctctctggttctctgcagctgatagtctctgcttttctggattctggcagttacattggcccaacccagataacccaggatgacttccttatctcaaacatccttaacttcatcacacctgcagagtctcttttgccatataagggaacatattcacaggttccagaaattaggacagggacatctttagggaaatgtatttgggctatcacaagtgtttatccactctaacttataaacatagtctctgccaggcatgttggctcatgcctgtaatcctagcactttgggaggctgagatgggaggattgcttgagcccgggagtttgagacaagcctgggcaacatagcaagactccatctctactaaaaataaaaataaaaaagttagctgggtgtggtggtgagtgcttgtagtcctagctacttgggagcctgaggcaggcttgagctcaggagtttgaagttactgtgagctatcattgtgccattgcatgccagtatgggtgacagagggaaaccccatctcttaaaacaacaaccaccacaaacatagtctcatcttttagattaatcacagctacgagcctgacttcatgtaaaatcttctccatccagctatggcctctggggctggcccccagcaggggcacaggctggaacattacactgattcttctatgtcatcctctcaagatggtcactcccatgcaggcagggattctgttttttgtgcctagaacaggcatgatctttgctcaataaacattcagccaatgtacactgagtgagacatactgcgctgatacaactctgtgattcttttagttgagacgtaacttaaatactgtaatatttgccctttaaacgtgtgcagttcagtggcttttagtgccatctgcaaggttatacatcagttagcctcactattactagttccagaacatttctaccatcccaaaaagaaaccctgtacccattagcagccacccccatgtctgcacaatcacacaatatgtgcaccctttgtgtctggcttttcactcagcattgttgctgaggttcacccatggagtagcatgcattagtacttcattcctttcaactcgatattaccttcgcacgtgctgacagccatcttgtaggttaagggtgtgggaagtgtttcctatcactggcccctcttctgtagagaatgtgcaccggaagggaaatcccagagtaacagcgctgatggtccagtacatgtctccacctccctgagcacaggatgctggtaaatcccattgctggggccgcctgattgtcctcaaagtgaagacagctgggcatccagggcaagcccagccttgtaggaaagtggaggtgggcggggacggccagcctgccctggagggcagcgtaagtagcagaaagcagccaggcctgacgtccacctggccccttagcgtagtggcacaggaaggccgcagagggtttccgtgttcacccagctgagaggagcaactcacggctctgagaagtgggtctggccgaggtgatgcagctagttaatgtgccagctgtttgcattcggttcaaacctgttgagcctcagagcatcctcctgggatgaggctgtaagaggagtaagtggggaggctgggaggagcacctggcgagtgctgtgcccgtgaggtgcagtcttagtccgtccaggctgctataacaaacatcacagactggcggcagcttataaatagcagaaatgtatggccgggcacggcggctcatgcctgcaatcccagtactttgggaggccaaggcaggtggatgacttgaggtcaggagtttaagaccagcctggccaacatggtgaaatgctgcctctactaaaaatacaaaaattagccaggttggtggtgggcgcctgtaatcccaactactcgggaggctgaggcaggagaattgcttgaacccgggaggtggaggttgcagtgagccgagattgcaccactgcactccagcctgggtgacagagcaagtctccatcttgaaaaaaaaaatgccatctgacccagcaactccactcccacgtatacaccccaaagaactgaaaacaggaacccagccaggtgcagtggctcatgcctgtaatcccagcactttgggaggccaaggtgaggggatcactgaggccaggagtttgaaaccagcctgggcaacatagtaagacccatctctacaaaaaaaaaaaaaattagctgggcatggtggtgcatgcctgtggtcccagctacttgggaggcttaggtgggagggttgcttacgcctaggaattggaggctgcagtgaactatgattgcatcactggactccagcctgggccacagagtgagactctatctcaaaacaaaacaggaactcaaacaaatactggtacataacacatgttcatagcagccctactcacagtagacaaacagtggaaacaacctaaatgtccattgatgggtgaatcttggcccatgtatacaatggaatggtattcagtcagaaaaagggaagaaagggccgccgctatggctcacgcctgtaatcccagcactttgggaggccgaggcagggggatcacttgaactgaggagttcaagagcagcctggcaacatggcataacctcatctccacaaaaaaatacaaagaaatagctgggcatgatggcgtgtgcctgtggtcccagctactcaggaggctgaggtgggaggattgcttgagctcaggagacagttgcagtgagccgagattgcaccactgcactgcagtctgaatgacagtgcaagaccctgacccctaacccctacaaaaagaggaaagaaagggcacagtggctcatgcctataatcccagcaatttgggaggccaaggtgggaggattgcttgagatcacgagttcaagaccagcttgggcaacatagcaagatactgcctcaacagaatattaaaagaaacaagggaatgaagaaactgatccatgctacaacgtcagtgaacctggaaagcattatgctgagtgaaggaagccaggtgcagaaggccacgtagcatatatttccatttacatgaaatatccagaacatgcaaatccacagagacagaaactagattagtggttgctaggggctgggggatgggcaaaggggagtgaccatttatattagcctcttctcacactgctatgaagaactgcctgagactaattgataaaggaaagaggtttaattgactcacagttcagcgtggctggggaggtctcaggaaacttacaatcgtggcagaaggccaaggggaagcaggacaccttcttcacaaggcagccgagcgattgggggccggagggggttggggggggagggaaatccccttataaaaccatcagctctcgtgagaactcactcactatcacgagaacagcatgggggaaaccgcccccatgattcaattacctccacctggtcatttccgtcctccaaccacctaaccaattgatttccatccaacagtgattagttcaacttgttctatcccttgggattttggagattacaattcaagatgagattcaggtggagacacaaagcctaaccatatcaccaattaatggatatggggtctccttttggaatgatgaaaacattttggaaggagacgctggtgatggctgcagagcattgtgaatgtactaaatgccactttgttgttcactttaaaatagttaattttatgtgatgtgaatttcacctcaatggaaaacaaccaaccaacctcagcagcacgaggaaactctttgccgaggggctttcctctgtgtacattttcctgacctttccagagcgcaggagctggcctggcagttccaggcaggcctctgtgccccactgagctgtggctgctgttgtgcttgtcccctagcaccatcctgctgtatcacatcatggcgtggggcctggccaccctgctctgtgtggagggagccgccatgctctactacccttccgtgtccaggtaagttgggactccagcgccccaggcagccccatccttggctcataatgtgttgtcttgcagggaatacatgagccccgacccacagagtgggtgccttggaggttaggccgttgtctcagggccacatgaggccatgctcacggcccagccccagagggctgactacaatagcttggagaatgaccctggaatcattctccctggctctgcctttctcgtttgtgtgcataggcacccatgcacacaagcatgtaggcaaagctttccgcatatttccctccacgtaaggtgtattcccagcccctgtattggtacagttttctcatgcccactcttaagtatttggtcttcaagcttcctctggatgagcaggtgagcttaacattctaggaatgagtgtaggataatgtggaagaggccataaggatccctgggcagagcttattctctagctttgcttcctacgctttctcacttctcttctatcctccacacagagggagatgtggccgctggaactgtctcaagcatttcctcaagtttacattcctgtccatgcaaccctcagttgcaaagccaaggtctttccaaggatatatactctaacttccaatggaaaactggaaaatggaagtggacagtgtctttgtctgtgatttttataccagggatcaacacagtgtagccctcaggacaaatccggcgttcttccgtttttgtaaataaagttttattggaatatagtcacactcatttctttatgtactgtctgactgcttttgcatgacaacatcagagttgagtagttgcctcagagaccacagtgtggcccatgaagctgaaaatatttactatctgttcttttacagaaaaaaaatcgacagaaaaaaattggtgtagataatttatctccctcttctcttgcttcttgcggctactcagtgaggatgtctccaaattggtgttgccttgtcaaccatgaatacaagcagggagctctgtatagatccatccatacattctgcttttctggggaactttaaaaggacagatgcactgtcagcagctgttataacggaatgcacttagttggaaagggagtttctgtgactctccctcgcctgtgggaccccggagactcctggcaaagttgcatctgagccttagggtgccattgctgcagggcgcacagggagccttgaggtgctcccagggtctttaggagctgtaccttttaagcatcttatccttaatcatctcttcattttcacaacgcctgacccagggcgctcggtgttcttcatgctcacagtctcactctcttatttgtcatttcctttctgtctttgcatcggagtcacttctctttctcctcttgtttctctttctcctttcaagcctttccagattgaattttagcctctacagctaaagataaaaccgcctgttaaaagaaagtggcagcgttgagaggtggtatagtaattcttcctatggcaagaggagacgggtattgcatttttcccacctgatttttttttttttttttttttttttttttacattttctgccactttcccctctggtttgacaactccgtcaatattaagggtgtttaatttattttttgtcattcccccttccgtggccatgaggctgtttggttagccccttttccacctccctctttggttgagctggagcagacctccctcccctttgccttcagtttcctcttcctctgtgccattttgcttctctcctacattaagcatttcgcagctgagagttgttaccttggtaacatatgtttgtgaggccctccagcacattctgtggtgaccagtgactcctatgacccctcagtagaaatctttgtccttttctctgacaagaacctctgaaactattgttatccataaccatgagaacacatttcctctgaaatatgcagctggcatattttgagttgttcaagcccagggacaagattttattcatgttattgcccaaaaccatgtagtaagtactcaaaacctcactatttaatggagtgcctttgtctctacttgaattgcgttttttccttgagacccagtgcagggaatcccccatcccagggtgtttttctttccgatcttttcccagcaggaacctttaaaagcttcctccagtggaatgccttaggggtcctcccatttctgagacagaaacatggttgatctcccttactctcctgcaatttatggcttgttccagacatgagaaatgactcacatttcctttgggcagtcagcagcagatttatgcatttccctttttgttctcatcctcttatcttgacttccagataagtagatgtcttttagccaaaactttgcttttgagaagaatgactttggttttcctctctcaggtgtgagcggggcctggaccacgccatcccccactatgtcaccatgtacctgcccctgctgctggttctcgtggcgaaccccatcctgttccaaaagacagtgactgcaggtaaatactagggaagctctctgggtacacggccactgggagcggccccatgcctcgggctcagacagtgacacatgttgtcctggaattctccaggacagttgacctcatttgtcatcctccagagacatcagcagaacacagctgcagaaagtaagcaggttcaataaatgaaaatgtgcaggcctctgcccgcacaagttctgtaccatcgtttgttagctcagtgccaggactagttgacttttcacttctgtactgggcttctcctgggtcggctgcaggagtgcccttggacgactgtggaggtgtgagaggaacagaaggagaagagaagggagggggaagggactgagtctgtactgaggcggctccagccccataatgcacttggctgatgttttttctcagatgggcaggaaacaggaagtggagcacaggaaatgagtcaaggtcaatggttagaaaaggataagagtaatgaagtcgttggcaacatgtctgggaaagacttctaggctggggctggagacctgcagtccagcccctactttcccctcaaggaagtgtgtcctggagtgagcctcccacctcctcaggctgccagagatctctcaaggggagaatgggaataaggaaatttgccttaactgagaggtcctttgaagatcacctgttgattgttgaactttttaaaaacattgttgagagtactctatcattggtaataggaaattattgtgattcttcggaccattctcttcatatctacactttttgttttcattgagacggagtctcgctctgtcaccccaggctggagtgcagtggcgtgatctcggctcactgcaacctctgctgcccatgttcaagtgattctcctgcctcagcctcctgagtagctgggactacaggcaagcgccaccacgcccggctacttttttttgtatttttagtagagacggggtttcactatgttggccaggctggtcttaaactcctgacctcgggtgatccacccaccttggcctcccaaagtgccgggattacaggcgtgagccaccacgcctggcgcatatctacatttaaatatagtgtgttaaatatagcattttaagacaaaatctcatcaaaaatagtgatttgagctgatggaaatgacttatagaaaaaagactgaaaagaaatacactaagatgttaacagtggttacctctgggtggacggaccatgggtcattcatacttctctaaacttttaaatattttctaacttgtctataagaagaaattaaatttttttcaatattttaacaagcgtgcactatttttatttttttgagatggggtttcgctcttttgcccaggctggagtgaattgacgtgatctcggctcactgaaacctccgcctcccaggttcaagcgattctcctgcctcagcctcccgagtagctgggattataggcatctgccaccacagccagctaatttttgcatttttagtagagatggggtttcaccatgttggccaggctggcctcgaactcctgacctcaggtgatccacctgcctcagcctcccaaagtgctaagattacagttgtgagccactgcacctctatttttataacagagaaaatgagcttttaaaaatatagtttctgaactaggagcattcaaataaaattgggaatttatttatttagttattttgagacggagtcttgctctgtcacccaggctggagtgcagtgatcttgcctcactgcaatctctgcctcctgagtccaagggattctcgtgcaccagcctcccggatagctgggattacagacgtgcaccaccatgcctggataatttttgtatttttagtaaagacagagtttcaccatgttggccaggctggtctcgaactcctgacctcaaatgatccacccaccttggcctcccaagtgctgagattacaggtgtgagccactgcacccagccaaaattgggagttaacatagtaatgtacctgtgttaatttcatagttgtgaagaacatccccatggttgcataagatgcttacattgaggggaatctgggtaaagggtagggatatacagggactctctgtgctatcttttatctttgcaacttttatgtaaatctaaaattatttcaaagcagaagtttaaaaatatgtatattccttagggtctatgaggactccaacctggaagttgtgaggaatgaatgtcagtgacttgctttgcttcctgcccctctggccttgcttgtgggctcacacctgcttccattgccttctctgtcactccgtaaacatgaataatgaacaccatacatagttccttctgttcttcacagtggcctctttacttaaaggaagacaaggcatttacacggagaacgagaggaggatgggagccgtgatcaagatccgatttttcaaaatcatgctggttttaattatttggtaacctttcttctatatatgtgtatttttattgccagtgggaagggctatggaaacaacttgccatgttgcatgcgtgaccagaagttccaaagggaagagcctttgggaaggaaatctttgagactgtgctaggtgccctttgaggaaaggcacagaggacaggggagcaagtccaaaattcatgaatttctggaaaaacattcaaatctactcaaattatatataaagcccttagaaaacgaacacccaagtttagttttgaaatgtcccaaccatgtgcattgctggggttaaccaaaacaaaggggttgcgtatgctttttttttttttttttttttttttgagacagggtctttctctgtcacccaggctggagtgctggagtgcagtggctcaatcacagctcactgcaaccttgatctttagggctcaagtgatcttctcacctcagcctcccaagtagtcttactctgtcacccaggctggagtgcaatggcacgatctcagctcgctgcaacctccgcctctcaggttcaagtgattcttctgcctcagcctcccgagtagctgggattacaggtgtgtgccaccacactcagctcatttttgtatttttagtagagttgaggtttcaccatgttggccaggctggtctcaaactcctgacctcaagtgatccacccgtctaggcctcccaaagtactgggattacaggcgtgagccaccacactcagctggtcatgctttataaactcacccatttgcctcactcctgacaccagaattcctgtgcctgacagaggggcaagggcacgtctttggtcaagaaggttggagaacggcctgagcagtttgtctctcctcatttttccccaccactggtatcctgtccaaacctttcaggtggatactttgaaaacagacctgtaaccaatgcaaaaaataaaactggaatcagaacatgctgcactgtggtgaatcagtaccttgcaggcagggcaagtacttatgatgttaaaaattcacctgcgcgggtcgtggtagctcacactttggtagttggaggcaggagtattccttgaggtcaggagttcaaaaccatcctgggcgatacaacaacaacaattagccaggaatggtggcacatgcctatagtcccagctactcgggaggctgaggcaggaggatcacttgagcctaggagttcgaggctacagtgagctatgatcatgccactgctctccagcctgtgtgacagagcgagaccttgtctctaaaacataatagtaataataattcacctgatatgagctttgtttggacacctttcttggagatacataaatcatctcctactaaaaatacactcagttcaacatttcatatttcactgagccacctaaaataacattgaaaaatactattataaaatggcaagaaaaaattgttttgatctccatgaaaactgtacgttgctcttcaaacaaaaaatgaattctgggttatttgatacagtgctagaaccttacaccctgatgtggtgttgagtggtaccattggaaggatttgctgatctgtgctttagactgagaaaacgaattatgttttttaaattaaattcttagtgtgctggttcctcttagtctcatttcttttctttttctttctgagacagggtctcactttgtcccccaggctggagtgcagtggcacattcatagctcactgcaggctcgatttcctgggctcaagcgatcctcccaccccagcctcccaattagctgggactacaggtgcacaccaccacacctggttaatttttttattttttatttttagtagagacaaatttcactgtgttgcccaggctggtctcagactcctgggctcaagcaatcctcctgcctcagcctcccaaagtgctgggattacaggagggagccattgcacctggccctcttagtttcttactgcagaagtggccatgtctataccgggagttggtacttttaggtcttggtagaaattcttctctgactctccagcatttaaaaacgagtttcattgcatgttctctttacctgctgccattttctttctaacagttggttgtcgaatatcatcaatgaaagccttttattctatcttgagatgcaaacagatatcaatggaggttctttgaaacctgtcagaactgcagccaagaccacatggtttattatggtaggtcaatctatattttattttaattagttaattatttaattaatttgcttcagagacaaggtctcactctgtcacccaggctggaaagcggtggcatgatcatagctcactgcagccttaaactcctgggctcaagcaatcctctgtcttggcctcctgagtaactgggactacaggtgtatgcctccaccctgggcaatgtagggagaccccatctctttttttaattatctatatttaacactttctgcttgaaaaaaaatcagaagaaaaagaagcagtcagaagtacaatatattatatttaaatacaggatgagcaaaataggctcctggccttagtgtgctagctggctgttttgtttgttgtcgggatccttattaaatgcttcaactctggtcaaacagtttggtgcagtgtatcaaagctcctggcagtctcacaatatcagagcatggatcttgaaggaatgcttcagaccatgaaaaagccacacagatgaagatattcctggtagcattatccttcataattgtaaagcattataggcaacctggagttccaaaaaaaaaaaaaaaaaagaaagaaagaaatgtttaagtaaattatggtctttcatcttgatggactattactcagatgttaaaaatgatgattatgaaatctctggtattaactgggaaatcaaatatatacaattataccaattacaagtacagaaaaacatgtttatcttttttcaacggggaaacaatgaaaaaacacaagaaatgaaacagaaaaaaaattcatgtattggatggacatacatgaagagaatgatggggtagaagccccatgggcaagttgccccagtgctgccattctctcacctttataagaagaaatgcacacgtgttgttggcagggaggtgcatattgtactatacagaatccatatttatattgcttttgaaatggggaaagtctcatttacaaagactttcaaatggagccagcaccggtccttccatccctgcacgtggtttggagcttggctgggttcctctggtgaactttatgtgtccttagcacacaagagtggagggatgtttcccagactccgtctgagcctcaggaacctttattacatcaagtgctcccttggcagcacagggtggcaaactggggagaacagaggcccccaggctgcaggaggagctggctgttcagtccctgtgctacagcgctccctctccccttctcccactgctgccctcttctcctcccccaccctctcctcccactttctccttctcctgtcttccctcctctctcttgtcctctgtcccctttcttcccttctctactccagctcctccccgtcccctcctctccccactcccctctgctttcaggcacccttgaaggtacagcacctactgtggccaatcttcatcttgccccaaaccaacccaccaaccagtcaaccagccaccagccaacccatggtcccttccaagcgagtccagccctgtgggcatcctggggggagtgtgtcactctgtgacagcccagggctctgacttctgctacgctgcactgactgccatgtgtctttctgtcctctctccagggaatcctgaatccagcccagggatttctcttgtctttggccttctacggctggacaggatgcagcctgggttttcagtctcccaggaaggagatccagtgggaatcactgaccacctcggctgctgagggggctcacccatccccactgatgccccatgaaaaccctgcttccgggaaggtgtctcaagtgggtgggcagacttctgacgaagccctgagcatgctgtctgaaggtaatgccctgtctgccacagcaggtagacttcggggtcccagggctccccttggaaagccttagaggattctttgtcccgggggctgtcctgtgcatggcggggtgttcagcagcacctctcatgtgaactcactagcttccagttgcacctccccaattgtgacaaccaaaactctttctagacattgacaaatgtctcctggggagccacagtggcccccagttcacaaccagtgtctcagaataattaggcttggatctaaaaatgtgatttttttccagatgttgtctgagctaaatgcacacaaacacaaaaccaaagacaaacaccacacaatcccgtgatggggtgtaccaaaataatgttgaaatttggagtaagaaaaataatatgcagaaagatgtttggaaatggcttaaggagttccgttttcttttccattcctactattcaaatacactgaagggaggccaaggcaggtggatcacttgaggtcaggagttagagacgagcttgaccaacatggtgaaactccatctctactaaaaatacaaaaatagctgggtgtggaggctcatgcctgtaatgccagcaggtttgggaggccaaggtgggcggatcacctgaggtcaggaattcgagaccagcctgaccaacatggtgaaaacccgtcgctacgaaaaatacaaaattagccggcatggaggcacacacctgtaatcacagctacttgggaggctgaggcaggagaatcacttgtacctgggaggaggaggttgcagtcagctgagatcgcgccattgcactccagctggggcaacaagagtgaagccccgtctaaaaaacaaaacaaaaacaaaaacaaacaaatacattgaaggaagtttcactttcaggtgacaagcttggtttactttgaagaccaaaaaatatggtgatgaactgatgaattgattccatgataccgtactgtctggttgaaattgggagccatgaagagaaagagatagttctggctgaagctaaaagacacagagagaagatttatttacagactttccgtctggtacaaatagttcacgaagcatgagggacccaccagctggaactgctgttagtctgtagagttactgataccatctagggaatgaagcaaaaaatgttatcttgaattatttggctttgcattcccatcctgctgttttaaagtggctgagcagatatttgacagtcaaataaaacactagaaataacagtaaaagtcccctgcaccccaccccaatcaccaccaccaaacaaaatccatcagcatttccttacttccactccctccggcaagctgttgcatagatcttctgctcaaaggttggatgttttcacatagaggttttagaaaaagcaaatacagatccaatagaaaaataagcagggcagccatccctggaggctgctctctgtgagggctccctgtttttgttttttgagacagggtctccctctgtcatccaggctagagtgtagcggaaggaacacgtctcactgcagcctccaccttctgggctcaagcaatcctcccacctgagtctcctgagtagctgggactacaggtgcacaccaccatgcctagtttattttattttttagtgtttggagacacgaggtcccattatgttgcccaggctagtctcaagtggtcctcctgcatcggcctcccaaagtgctgggataataggcttgagccactgcacctggtcccttggctttttaaaaaatttcagatataattaacgtaccataaaggtcacccctttaaatggcacatttcagtggttgtgcacacgtcaccactatctaagtcagaacatgttcatcgttgcagaaagaaaccctgtgcccccagggagtcatttcccttctcttctccccagcccctggcaaccatgaatctcctttctgtctctatggctttgctgttccagaccttacatggaaagggcattgtgtaatattcgtcctgttgtgtctggtttcttgtacttcggatagtgttttctagattcgcccatgttgtagcaggtgtcagaacttcattctttttatggattgataatatttcgttgtatggatacacctattctttgttttatttatttatttttgagacagggtctcactctgttgtccaggctgaagtgcagtggaatgaacatggctcactgcagccttgatctcctgggctcaagctatctttccacctcagcctcctgagtagctaggacaacaagcaggtgccaacacaccctgctaattttctttggttttgtgtgtgtgtttttaaaatttattttatagagctggggtctccctatgttgcccagattggtcttaaactcttgtaaatgatcctcccaccttggcctcccaaagtgctaggattataggcctgagccactgcacctggcccactcttattctgttaataactacttatgactgccccaaactctaccaggctgtgtactaggagctgagtggggtggagatactggagatgtgtaaacctggccctcaaggatctcacagtctattggagaaaattaaaatattttaaaaaatcattctattctaacaatagaacactcaatggaaataccaattggagaaaacactggaggaaaaggaaagaacaaaaggaaagccttttgagaaaaatgagaaatacaatcggtatttttttattgtgggaagaattcctgtaaaaatggcagctgccaatttagaactccaagtgacatattattaggtaacatctgtcagggtttttgaggatagagcttgaagcatagagtgagttttcagaattaacaacaaacatctgcaaaagtataaagtggcctggcctggtagtatgaacctgtatccccagctactcaggaggctgaggaaggaggatcgtttgaggccaggagttggagtccagactgggcaacatagtgagaccccatctctttaaaaaaaagtataaagtggcggtgctactgaggtggtggttagggtcataagtttacatctagtcaccctttgaatatcttaaaattgcccataacatgcagtcatcaccattttgtatggtaaccctatgcaggaatttgcatacattaatctaaaaagaattgaaaaggcttttattcagaaattaatttgctgcctaggacacctcacattttttaatatttccacatcggacttttggctctcatcaccattgtattgtttggggacaattttaggatcccttctaaatctttcctggtcggtatgtctctggggccacttgcctgtcaccccagaatgtgcttcccttctgtcagtggcgggggaaacgcaggtgtcattccgattttcctaccagagctttaccagcttgcaggcagcaggatccctgggactatgtaaatcctcacctactctccctgccatacctccccagcccctcactaagtagaggtgaatttgggtaagttaagtgtgcatcggatactacttctgtgcgtaaagtcaaggaaaaccccttaccagggctgctttcctattggctgcacctgattactacgatggcagatacagaaaaaacttagccatgggcttctccctatgtagacagtggatataaagctcaacttgttcatcatacccttcagaccctactgcttcgggtttcactacaagaccaataggctggcatggagctttattaagtatctgatatggtgtctggaacttactaggtacttcacacaagttaactgaattttgtcttaagcaaatattcaacaccattttagccgggatgggtgagtgttcctgagaagtataatttgtgaaactcccaagtaagtaaggacaatactgtttttttttttaaacctgtgaagggttaaaggaacacaggcaatgcaggactaagttggttttggaacactggtgagagttcctggagaaggtgatgtgcgggctgggtcttagatgatagaacagcataggcaaagaggagacagaaaatctagatgaggaagacgcggtgttgagagttagcatagaaagtctgcgtcttgtttggggacggttgtggctcagcgtggtatggaggcgttgggggaagctggagaagtggtgaagggtttataaagattctgctagggcgtttgggctttatccggtggccagcgaaaggccagttaaggtttttaagtggagagacactgcaatttgcttgtaggaccagcccagtgcatgggcgtggaagaaaacacgtaatgcatcgcgttttgtgattgtggcagcagtttccattgaggggatctgtgtctccgcttagggaggcggagagccgctggatggagctcggttccacgccccgtcaccattgtgcctccttgctgaacactctctgctcatcaagtcgaggtgttgggatctgggacaatcctgaagagagtcattactaggggaggattgtgcacctgaaccgcttttgactccctagatgtgcaggcacccaactcccgggcctgcgctggctctcaggagacccagccccttggtacctcccggtttccctccagggagcgagccaggggggcatggcctggcaggaggggtggggactgggtggagcttatagagcctggccggggctgtgttttggggtagggcctggtgagagcgaaggggcagagtctggcaggagggatgtggctactaagagcagggcatttctgatgggagcaggagtatagatctttcctggaagacgagtgtgctagtacacaaacttgcaagatttaaggatcatcccggggagaagcccaggccggtgaggctgaggcttagggcttgttgggagtggaggggtcgtggttaggatagaacagaggggctgtgttcccacacaggtggggtgaggcccattcagagcccagaaacatggccagaaaggagcgtagctgtatctcccacaatgccttttatctcccccaattccatatgacacccaccccgccattcttggtttgaccatcaatcctctctactctccacaattctgtttctcccataattctctgtctctcccacaattccgtgtatctcccacaataccctgtattttccccgattctgtatttctcccagagttccatggctctcccataatttggcattcttccccacagtcccctgtctctcccacaattcttttttctctcataattccctatttctctcacaataacattctcctaacaattgttttctcccacaattctccattctattttttcttgaaaatctgttttcttctataatctattttattcttcttctttttttttttttttttgagacagagtttcgctgttgttgcccagactggagtgcaatggcgcgatctaagctcaccacaacctctgcctcctgggttcaaatgattctcctgcctcagcctcctgagtagctgggattataggcacccaccactacgcccagctaatttttgtatttttagtagagacggagtttcaccaggttggccaggctggtctggaactcctgactttgtgatctgcccgcctcggcctcccaaagtgttgggattacaggcgtgagccactgcatcaggcctcttctataatctattttctaccacaatctgtctctcctacagttctccattctccactctaatttgttctctcccacaagtctccattctctaccacaattccctgcctgtccctcaattcctcttctttcccataattctccattcttcccaataatcctttctttttttccacagttctctttctcacactaccttgagtcccccacaatcccaatctttcccacaattccttgtttctcccacaatccctttttacaatttttcataatgccgtgaatcttccataatacctggaatctcgcacaagccttgtctttcccacaattctgttacacagtaccttgagtctcccacaatccccatctttcccacaattactattttctcccacaatatggcttcatggttttccataaatgccttgcatctcccataatacctggaatctcccacaagccttgtctttcccgcaattctgtgtttctcccatagtaccttcagtctcccacaacctccatctttcccatgattccttttttctcccacaatacggcttcacaattttctataatgcct

SEQ ID NO: 695 - DNA, 32742 bp, Homo sapiens
  source 1..32742: mol_type = other DNA
attataaaagcaagttcaacctcctcttgctctcaccctttcttgctcttctgccttccgccatgagatgacacagcacaaaggtctttgccagatgtctgtgccacactcttggacttcccggactccagaactgtgagccaaataaatttctgttcattataaattatccagtctcaggtattctgtcatagcagcacagaatggaccaagacaatatgggagatgaaaatgttgttggatggaattaatggcatgttagacatcatggaagaaaaaattagtgaatttcacatgaaaacaaaaactatccaaaatgaaacagtaagaatttttaaattctatataacaggtataattttttgctaggcatagtggttcacaccaataatccccatgctttgggaggttgaagtgagtgtatcccttgaggccaggagctcaagccagcttaggcaacataatgagacactgtatttacaaaaatatatatttttaaaattagcttggcattgtggtatgcacctgtatagtcctagctacttgagaggctgaggtgggaggatcacttgagcccaggagttcaaggctgcaatgaggtatgatcatgccactatattccaacctgggcaacagagcaagaccttgcctctaaaaaaacaaaaacatatttatatgttttgtaaattaagtgtagcggtgtgtgtgtatttatttatctatagatacctatgtatctatagctatagacagattgggaaataaaagctagccaattagaaagaaataaaactgtcataattttcagataacatggtaatctatgtataaaatctacaccaaaaaatctacccaaaaaaaatcctactagaactaaataagtaaggtgcagaatacgaaatcaatctataaaaagcaattgtatttctatataatagcaacaagcaattggaaattgaaattataaaccaggctgagtgtagtggctcacacctgtaatcccagcactttgggaggctgaggtgggcagatagcttgacctcaggacttcgagaccaggtgaggcgggaggattacttgaacccaggaggctgaggctgcagtgccccatgattgcaccactgcactccagcctgggtgacagagtgagactccatctccaaaaaaggaaaaaaaaaaacacagaaattatgaaacaatatcatttataatagcattaagaataagacattttcttaaagatacatctgacaaaagatataaaagacctgtaccctaaaacctaaaaaatattgctgagaaaaactgagacctaaataaatagatttacttttgtttatgtgttaaaagattcaatatagatttatatagaagatctatataacttgatctgtagaataaatgcaatcccaatcaaaatctctgcagactttttggtagaaaataagaagctggttttaaagttcatatggaaatattaaggaacgagaatagcctgacaaatttgaaaaacaagaacaaagttagagaggtctaacatcacctgacttgaagacatatatagccacagtaaacaagactgtttggtattggtgtcaagatagacaaatatattaatagaacaaaagaggagtccagaaatatacctagatagatatggacactcattttcgatgaagttgcaaaggcaattcaatggtgaaagaataactttgccaacaaaagttggtagaaaacatgaaaattattatgcaaaatatgaacttcaacccatgtcttgtactataaacaaaaacaaactcaaaagaaataataaatttaagattaaaacctgataatactaaacttttagaagaaaatctttgtgaccttgggttaggcaaagatttcttatatgagacatcaaaacacaatccattaaatggaaagtattagtaaattgtactctatcaaaatttaatacttatgccctttagaagacactattggccagatgcagtgtcttatgcttgtaatcccagcattttgggagtctgaggtggggagattgtttgaggccaggagttcaagaccagcctgggcaacatggcgagacctcttctctacaaaaaaaaaaaaaaaaaaaaaaaatttttttaattagccaagtgcacctatagtcctagacactcaggatgcttaggccgggggatcgctgaaaccaaggagtttgaagttacagtgagttacgatcatgccactgcactccacctggacaacagagcaagatcttgacttaaaaaaaaaaaaggaaaaagtaaataaaagactattagacaagttagtgggtgcagcgcaccagcatagcacatgtatacatatgtaactaacctgcacaatgtgcacatgtaccctaaaacttaaagtataataaaaaaaaaagaaaaaaagaaaaaaataaaaataaatttaaaaaagactattaggtgcataaaaagacagacatagactgggaaaaatatatttacaaagcatatattagataaaagacttgtatttagaacgtataatggactctcaaaactcaataataagaaaacaaacatccaatataaaatgggggaaggatttgaatagatactacactaacacaaagatatggagatggtaaacaagcacaagaaaagatgcccagcatcgttattcattagagaaacgcaagttaaaaccactagacctcaggtcatatctattagtatgactaaaatttaaatgactggccatacaaggttcagtaaggatgtagagctggaacatttatgcattgttggtggaaatgtaaaatagtacagccactttagaaaactgtgtggtactggtttatacctatcacaggacccagtcattccatgccttagtatttattcacaagaaaagaagcataaatcccaccaggcatggtgatgtgagcatgtggtcccagctactaggtaggctgaggcaggaggattgtttgagcccaggaactgcaggcttcagtgagctatgatcatgccattgcactccagcctgggtgacagagtgagaccccgtctctaaaaaaataaaaatgaaaaagtagaaataaagtaaaataaaaagaagcatatatccatacaaagatttgtgtatgtatgttcatagctgctttatttgtaataaccaaaaactggaaattgataaataatgggatactacttagcattaaaaagaagtgactactgatacaaacaacatgaataggaaattactaggccaagtgaacaacaaaaacagttcctatgttacggatagcaatccctctgccaacatggccatcctgctcaaaatgtgctcttgttgcacaaaggtattccaaaggttacctagagagtctagagtacaacaggtatattccttccctggttctgtatacttttgtttatacagcctaaagttgcacagctttgaagttttgtggatgtctcctatattttaaccagattgctccttttaagcttgtgatccaatcaaccattctctgcccaagtcttagtcccacagtattgtcaagccggatctccccaacttcttcttatgtaaatgggtgttttatatgtaagtaagatattttataagtttaaagtcttataatattataaatataaatgctttatatttaaccctttggtatcctaattgcactattcaaaatggcaatatactggctacccctccccactttgaatgaactttaaacctgaaaataaaactatatagatgttcagtcacaaggccaataacgtttaaaagtcaatttatgtcttattctctctatttgccatcttctgttattacataaataataaagagtactatggaacttagttgctttgcttagctaaattgtgaataatggaaatattttcataattttatacattttactatgtgatttcagacatttaacattttctcattttgatattcacactttttccagggtatgtcaatcatccttggctatgcatagtgaatcagtacaatatcagccagacatcccttacctagactagggctgaatgtacctagtcttcattttatggagattcttttaagtatctcccagttgttgaaaatgagacaaaaactaaacaaaaataacttacaggaaatcacactcttctccttagaattcaggtactctacctcaagaaaatgttttactggtatttagtagcagatttataagctcctccatggctcccatcttcatccacctttattctattcctccctgttccccaaaaggcctaaagtacttgataagcctctggctcagcctcaagtggttccttttgaaagaaaatcactgatgagtagattagagctgattgaagatacctgcctgggggaatttcctatgaattgagagcagacaagcttcccgtaagtctggagaaagttgtttctccttcactgttgatgactaagaaaagcagaattttctctgaacattagtaacaaatgacttgacagcaggagactttgttttacttaagtggtttcaaaaaaaaaaaaaaatctttgcaagatgcccaagaccatgtcagtctttcccatggaaggaagcaatggtaggaagggatgcaagacaatacagcacacttgccttcagagtaacagaaaaaggcgggtagcaagtccaagttcatcacatgaaaaactaatgacagaatgtaccacatttgtgtaagatcagaaaagtcggcatgctcaacacatctttgagatgttgaggacagaaagcttaatggattcaggattcagggcacctgcagtggctcacacttgtaatcctagcctttgggaggccgaggtgggtggactacttgaggtcaggagttcaagaccagcctggccaacatggtaaaaccccgtctctactaaaaatacaaaaattagccgggcatggtggtacacggttgtaattccagctacttggggggctgaggcaggaggatcgcctgaacctaggaggccaaggttgcagtcagtggagatcatgccactgcactccagcctgggtgatggactgagactctgtctcaaaaaacaaaaacaaacaaaaaatggattcaggattcagagggtcctactatggtgtgccttctgaaacatagctagacaaaaccaccagttggatggaaacaaaatgaggaaactgaatctaaaacactgacttacaggactacaaaaatcacattggctgtgttatttggggatatcatttaggatatgccatcatagtcctagaggtaagcagggatagcaactgattgacaccttgaccatattttatgaattaaaaatcagagcacatgatcagacagatgtgaatttatttataggatagaatattttaaattagaactgaccaagagtgcagaatgtgtaatgacaaaggaataaggaaacaggaaaatctaagttatatctactcagtgaatgaacatcatcaaaaaaagccaaatgaaactgttttatatttgcaaactatatgtgtgtgctcatgtatactcaaaaactttaataaataaaaattaagatgtttattttaatatttccttttctggaatttgatattccattcctctatgtctttaatgtaggaaggaatctaagtcccattattaaatgcacaaaatccctaagaaggagagatagcgtttggggaaaaaaatgtgattaggatgcaaggaaggtatgttatctcctcctcttcctcccttactctccattcataggaggtggccatatgcaatagaaatgctctatatctgcatagtaggtgaaatagaagtccagtatagccccagttgactcaggaactgctctgagaagcagggagagggagccttcaggctggaagagcagcccttatttattcaggtcagacgctgtctctgaccccatggataagcattcaactgttggcttgcctccatttctcatctcattctggttgttgtagagctggcaactgtgagaaatctagcacagtatttttcaaactatatgttatgaaagttctgttgttgttgttgttgttgttgttgtcgttgttgttttgagacggagtctcactctgtcgcccaggctggagtgcagtggcgcgatcttggctcactccaagctccgcctcccaggttcaggccattctcctgcctcagcctcccaagtagctgggactacaggcgcccgccaccacgcccagctaattttttgtatttttagtagaggcggggtttcaccgtgttagccaggatggtctcgatctcctgacctcgtgatctacccgcctcggcctcccaaagtgctgggattacaggcatgacccaccaggcccggccttctttttttgtttgttttgttttgtcgcttttttttaaatttccaatctacctataggaaagacgaagtggggtaaaagggggcatataagcctaaaatttaaatattaagttcaacagaaataaaagtattttgtcaaattgctataagtgtttctgatacttactctcaatttttgtatctaccttatctcagacccagttacaaagtttgcttatcgcatcaattgataaaccacactttgatctctggagactgttccattgacaattggaataagtagacataaaatttcattagtcaacctcaagctttaggattggaagctcgatgaacatctgtcataaaatagtcatctgggagaggtaattgttgtatgagctattgaaggcaagtgtaatcaccaacagaactgaggttgaagcaaagaaaaagacagagaacaataaggagatgaagagaaatggatttggaggagcacagagaaaaaatgtatcaaaatgtatgacctacttcagaaataaaaacaagcattatcaaggcattgagaaattgactatacagaccctagccagacaatacataaatacagaactttggcccacaatctacagcaagctacccaggaaaccaaccccttatctacaataagcaaccagggagccagactgctataaatcagacttgcagggagccagactgctatcttcagtgacaatccaagaagcaaaacaataattttcatagcaattggtcccaagtggccaagacttgattaataactgacagcttccctaatttttgtcctcacttccaacttaggcccagtcagagaaagcaaaatatgcacctctaaccaatcacagaggatagtctgcttctataatagttaacccacagcttccccatgccaccagcctccaatcagggcatacctgaagccttccctttttttccattataaagcttccccctcctctctctgccattgagcctttgccaaaacacaagtgatgatatctgactcccttactatagcaaactccaaataaatagcctttgctgtcttatttggttggtcttcatttatttctacagcatgtttcctctaattgattgatcctcaatgctcttatagaacttccttaagcatttcagagaaaccagcacactcctaataactggatccaattcaatcactattttggcagctccctttccctcatgtcccacaatttatccattgataagtcctcatatataacccaatgtattcactcttccccatctctagtactaccagtggagtccagggagccgccaacttgcttctgagttaccgtaacagcctccccacgccctggcttgctcctgctgtaatctactctcacacagaagaaagaggtacctgcatatcaaatacatcatttctctgcttaaaccttcaaagggcttccatcccacttagaataaaatgcaaactcctacaccatctggcatcttctctccccagcctcaccttgttccacctctcttgtcatccactacacccagcaacactggccttttcaaatgtgccaatcgtgttcccatctcagggcctctgcacagctgggaatactcttcccactgacctttgcatggttggctgccccttgtctttcagatatgagcttatctgtcacctcttcagagaagcaaagaaagcaccaagtctaccatagtcagccattcactgtcacccaattctacctctctgcataatgttcaccattatctgagactttctcgttttacttggttttattctccacctccctgtaccagagcagagatctatcggtcatgtttattcactgtattctctaggcccaaaacaggcctgtcatagaattaattctcaataagtatttgttgaacaaatgaacaaaggggttcatgaataaatgactcactgaactgccagagactttggactctggtaggtaaaactattctcttttatcatgccctagcttgaacgtaactcccataccctataaggcccaaatcaatcccccgcttctctggagagtcttccttttctactcagatgatctgccttttccttttccatacacacagctctgactgttcaaaagattcatttggatttgatcatatcctactttggggtctcccttctagtcctgttaaactctttccttgcttcttaacttaggcagatgtgcatgttctaccctcccaaacacattgctttgtacttcctataaaacagtaccatgacatagtggaaactcagtaactagttgtgttgaataaatttttaaatgcatatcaggtaaaattagtataactattgctaagctgttcagggcagagccaacaacagcataaagtcaaaagagatctcagagcacttcctcaggtccacatggcttccctgttgggacaagcccatgtttcccattttctgtttattggtttgctctgtaaaaaaaaaaaaaaaaaaaaaaaaaaaaaaaaaaaaaaaatatatatatatatatatatatatatatatatatatatatatatatatatattatcctttttcctctctaggatgcattctgtgctccaaaggcaatagttatgcatggattgggataacattcactgaggacatgcttataggcccagtgggcagccagccagcaattgcagcttgaatgacatatttttgcttggcaaagaaagagctgcttcaccacccctgtgctcaaataccagttcacctggttggtgaaggcttcttgctattttattgaaattatacttctgcaaactcatatattagttgctcccctagagtttggtttgtgatactggctctatctaaagtatgtaaaagagctaaaattatgtttttatgagtgaattttcaaaaagaatcagcaattccacaggttactccggcttttttccccatctgctgtgacagcaggtgtgatttcacaagcccactcccatcaatcatcctttccaacctgtctctgatgcctgacaaggtgtttatgtgcataacatggaaaccatcacaagatcttgcgaacaaataaggctgcctttcaacaattctttgaaggaagacttccatggaaacctaggtgctaggttcaagggttcaggctggggagtcattcaattgccacagtgtcaccttcttccaggggttgcaaactcaaagcccttcggggcaagacaggtactagaaaggtatgaagcctcctagtgtcaaacaacaaggagtggagaaaactgtgaccaaactgaatggtgcatgctctatctaaaaagtatttgcattcactttccataaaaataggctggctaaacataagttttctacaggcataatgtggccaccaattttccatctctatgcctttattaagtcagtttcctagtctgcggcccaaatacttaagcttttcaaaggatcttagaattcataaaatcatggacaattggagctggaaatgatcatagaatttatttattccaacttcatcttttccaaataagggaactgaggctcaaaagactgataaaccagccaaagcaaatgcaacaagtatatagcaaggatatagacaaaactccagtcttcaactccaagtctgatgatctttcagctacttgccattgcttttcctaatgtgttggtaataatcttactcttgatgtgtgcttaatataaataatccctttaaagatatattgcactgatattaatagtagtaaaaggatcaaacgatataggctggattaaaatgttaaatcaactgaataaaagagaatttagtcattaaagatgataaccataatataaaatgtgtacaaatattatttataattactttacatggtaaagatagactataaaattaagatttcaactatgtaaaatatacgtacaagtggacaaagactagaataaaatttgcaaaatgaaactggcatgattatgttgttattctttttaaaatcattgtaatgctgctatattattctttggagtgtttcaggtaattccctttgacaacattacttagggttcattttaatcttaagtgtagccatttgtcacttcctacagtcttccttgctagcaaaaattccacattttattcaggtgtcccctcttttcctttatgactcaggaatgtcctaataaatctgtcagcagcagtgctcctatttcctttgctgctaattgattcaagtatggacatgtgatgtaaatctggcaaatgaaacgtaaagagaacttgccaagggacttctgggaaagaactcccttaatgttaaaaacaagtctcattctccacctctggatgttgcactgagaatatgaatacgtgtagctggtgcagccatattgtgaacatgaggcaagtcagccccaggataagatctataaaagcagaagtgttgaaatggggctgggtgtggtggctcacgcctgtaatcccagcactttaggaggcccaggcgggcggattacttgaggtcaggagttcaaggccagcctgggcaacatggtgaaaccccatctctactaaaaatacaaaaattagctgggtgttgtggcacacgcccgtagtcccagccacttgaggggctgaggcacaagaatcacttgaacttgaggcggaggttgcagtgaactgagatctcaccattgcactctagcatgggtgacagagagagactccatctcaaaaaaaaaaaaaaaaaaaaagggaaaaaaagaaatgttgatccctaatgaattcgtgtgaagccatctgcctctggattttttatgtgagataataaactctttatcatttcattcaattgagaaggggttttctgttatttgccaaagccccagccgaaataataaacttgattctccaagtgcacttggatacctatatggagaggggagatgctcaggtatttgcttctctttttctcttcctagggcacaaggagcatgattgtgttgaattatctagtgtctcatttcacgagtttggtcataatgaatatgaggcacaatccatttgcctgagttacctgctatggttctattaagtaccctaatatgactagaaccttatgaacatcagcacttttatatggcatttttaaaacataagtaacagtttgagccaatttgagagagacatagggaaaataagatagacaagaggagaaaatggacatttccagggatagtgaagccattccaataaagctgagtttttgaactcccaagagttctagtgataccaaatgcccttcttggatagtaatatttgtcccttttcaaaccaactactttgtaataggctgtcattttgctttactctgggaatgaccacatttcaatcatggcagtgcagtaggatatctgaacatcaatgacaagattgcaaaggagttgtggaagcaacaaaagcttcattgaattcaagattattctcattaacatacaaagtcctacaagtcctgtctgctggggagaactgaacttttgaagattagacagtgtaacccacagaaaatggattgcagatatactttatacatgctgagtatcttgaaaaacaagatatgaagataaagctgctcctttgtgctctagggcagagatcaaaccattataaaggcacttaaccaagagaagcacagtgtgtgaacacacaaaccccaacttacgacaaaaataatgatcgtttatttctaatcttagagaacattttttagacatttgcaaaaaaagaaaagaaagaaaacacatgacctgttctttgatggaatgttgtcaactatgaaaaagttaaagtgcctctactactcctccatcttattccccatgatacatgtccctaaatgcctagaataaaacagttgaaacatgtctcacccagtctagagtctccaggcaacttttgagcctctagatcttcactttctcagacatttctacttccatcataataacacttccatatctctctcatcttccatcttctatacacacagttctctgatttccagggggagcactaaaagccaatggaaaaaaggggatgatttcagaaatatggtggagtaggaagcaccaggaatctgtttccccagctagacacaattgcactggcagagtctgcctgatgtaattattttggaactctggaatctattgaaagcttgcaacttccaggagaagccttgaatggtaaattaagtttattttggtcatgtcagctcttagcataatagcaattactcattctccacttccagcaatgtggcatacagctatgtctgaattctgggagcagcttgcaggagccagagtgggcaaaaagaaccttgtcctccaaatagaggggaactatggtctgataattgattgctccttctgatcacagagattcagacaaaggagtatgctaccacggttgttgcacctcccccactgttataagcccctccctgtctggctgtagtaacttcaagaagatttagagccaggtgcagtggctcatgcctgtaatcccaacactttgggaggccaaggtgggcagatcacctgaggtcgggagttcaagaccagcctcaccaacatggagaaaccctgtctctactaaaaatacaaaattaaccgggcatggtggcacatgcctgtaatcccagctgagattgggaagctgaggcaggagaatcgcttccattttttaaaaatctacctttatttttctatttccaccttttggaagtcagacattaaagactaggacattaaaaaacaatgcatatacagggaaaattagaaagtgactgcacttacctagggaaaggtgcagatttagaaaagaaaccttaaatttgcacgtcaggctgatccttgacacagaaacagcacttaacatttttttaaagtagtaaacaaaacactaacaaaaaaatatgcaagccctggagaagagggagaatctgatttacagagttaccacattattaacttcaaatgtctgtttttcaacaaaaaattacaagacaccagcctgggcaacattgtgagactccacttctataaataaataaataaaataacattttccaggcatggtagcctgtagtcctagctacccaggaggctgagggaggaagattgcttgagcccaggagtttgaggttacagtgagctatgatcatgccactgcacactagcctgggtgacagaccaagcccatctcttaaaaaaaaaataaaattacaaggcacatgaagaaacagaaaagtatggcacattcaattttttttttaattaatcaaccaaaactattcctgaaagagtctcagtggcagatctactagacaaagactttaaaacacctaacttaaagtctcaaagaactaaaagaagatgtgggaaaagtcaagaaaacaacctatgaataaaatggaaatattagcgaagagatagaaacactaaaaagaaaccaaaaagatattctgaagctgaaaatataataactaaaattttaaacttcactagacagatttaaaggcagatttaagcaggcaagaaagaaatcagcaaacttgcagatacaatgaaaattatcagtctgaggaacaaaaagaaaaacgattgaagaaaagtgaacagagcctaaaagacataggagacaccatcaagtgaaccaactaacacactgtgacagcaccagaaagagaagggctagataaagggtaaggagaatatttgaagaaataatggcagaaaagtttctaaatctgatgaaagacataaacatccaagaagcacaatgaacttcaagatgaacccacaccaagactcactataatcaaacttctgaaatataaggacagtgaattatgaaagcgcaaaaaaagaactgattcatcatatgcaagggctctttggtaagaatattaacaaatttctcatgagaaactttggcccatcaggtagtgggacaacgtattcaaaatgctaaaagaaaaaaatacctgtcaaccaagaattttatatcagaacaattgtccttcaaaagtgaaggaggtcagttgcagtgactcacacatataatcccaacattttgggaggccagggtgggcagatcacttgaattcaggagttcgagaccagcctggccaacatggcaataccctgtctttactaaaaatgcaaaaaattagccagatatggtgacatgcacctgtagtcccagctacttgggggactgaagcaggaaaagaaggagaacataagacattgccagataaacaaaagctgaggagcattaccacattaccactagactttccctgcaagaaatattcaagggagtcctacaaggtgaaatgaaaggacattagacagtaacttgaagctgtatgaagaaacaaagagctcaataaatgcaaggacctttataaaagctagtagtattttgctatctacataatttaagagactaatacatttaaaagaaaacaatcattagtctaaaagctaacattattgtaactttggtttgtggctccatgttttgttttttatataatttaagagactaacgcatttaaaataattattagtttatgtttggtgttacacaatatataaaggtataattttatgacattaacaaccaaaaagagtgaagaaagaatagtagaggaccagatattttatgttattgaagttagactggtataaactccagttagagtattataactttaggatgttaaatgtaatctccactgcaaccaaaaagaaatagttaaggaatataaacaaaaggaaataagaaaggagattaaacatttcaccacaaaacatcaactaaacacacacaaaaaagagtcatgcagagtgagatgtgggaaagctataaggcatatagaaaacaaatagcaaacaacagaagtaagtccttctttatcagtaatttctttaaatgtaaatggattaaactacccaatcaaaaaacagagatcagcagaatggataaaaaacacatgattgctggatatactgtctacaagaaactaactttagatccaaagacacacacaaaaataataaaaaagagaaaaagaaaacaaagatacaataggttgaaagtgaaaagatggaaaaggatattcatgcaaatagtaaccaaaagagagcaggaatggctagacaaatatcagacaaaaatgaatttaagtcaaaaaattatgaaataaaaaagggtattatatattaataaaatatttaatacaacaagaaaatagagcaattttaaacattaacatgcctcataacagacgatcaaaatacatgaagcaaaaactggtagaattaaagagaaaaatatacaattctacattaatagttggaaactttaacattccaccttcaatcacagatagaaccaccagacagaaaataagtaagaaaatagaggatataaacaacacaataaacccactagacctaaaagacatatacagaacactctacccaacaacaatgatatgcacattcttttcaagtacacatgggacattttccaggatgggccatatgttaggccacaaattgtgtctcaatagattttaaaagacaaatgtcatacaaagtcttccctgatcataatgggaggaaattagaaatcaataacagagtaaaactggaaaactcacatatttgtagaaattaaacaacacacttttaaagaatcagtggatcaaagaataaattacaatggaggcataatgctcttgaggatgtgaagatattggaacactcatgcactattgatgggaatgtaaaatgatacagctgctgtggaaaacagtatggtagtacctcaaaaaattagaaacagaattaccacatgaaccagcaattccatttctggatatatatctaaaagagctgaaaacaggatctcaaaaagatatctgaacacctatgttcatagcagtgtcatgcacaatagctaaaatgtgaaagtaatttaagtgtcatccatagatgaacagaaaagcaaaatgtggtacaattgaatattattcagccttgaaaagaaagaaaattctgacatatacttcaatatcaatgaattttgagaacattatgctaagtgaaataagccagtctgaaaaagacaaatatagtaggattccacttatatgaggtacttagagaatcgcttaaacctggtaggctgaggttgcagggagccgagattgcaccactgcactgcagcctgggtgacagacggagactctgtctcaaaaaacagaaaaagaaaaaaagaaaaaattagatgatgatggagggtagtaaaaaacaggaagaaaataggtcgaaaagttaagatagaagtagaaaagggaggtaacatgcaagcacacagaagggtagatgcagatataaaaaaccactatcatttatttatttccttccttactattactctgctacctataatgagtgatttggtacaaatctgattgattgagaagcctccttctgttatttcctgccattctcttgtagaaaggaagaaagtggtgctcaatattagataataataagtgagttgaactatttttctttcaagaactgtattacagcagcagaatgaattcaaacataaaacctaacactttctcagatggttctcatctatcaccagatctcattggagaggaacaggggctaaggttgagaagaaataaccatactactggaccactcactgcatttgccaactttcatttacacttttacaacttgaggtctgattccagtgaaaaacatactgagaggctcttgttcagaccagatcagtatcatgcagtttaagatcatcatgataatcaaatcttccagttcacagtaaggaatgccagttataataagacatggaaacaaaatgttcctttattcatataggtcctgcaaattgcctccccataatgcttcatttagtctccatactgtcctagtgagtgggaactcagtgggggtttaaagtggtgtactcaatggtcggtgctcaaggcaaggtttcttgtatcattccctggaacagcatttcaaagacaagaagagaatagtcccaccacaaacttcacatcaatttcctttcaaacaaaatcactgagtaaccatatgtatcagaagcccaccatctctcttctcttgctctagacttgccacttcaagttgaaaacataaagactttccctgatgaagggccattggctagtacatgagaatgttccagccatgctattgagatggagtttctggaaggaagatgaaaaaaatgatctatatttttcttgatttctgcccaggcatatctcttctgtaggcatcttggagttcttcccagaaggcatatctcaatgccaatcatgaataagggttccacttacttaaaagaataaaattgtttgttgttgtatgaatgggaagtgccagataaaaggagcaattgctaatcttcacctatagtgaagtccagagagaaaggatcacttcatttaccctgcttctcttctatttccacaccaatccctccccattcaccacgggggtcaaggagtctaccagagacagctaagtcagaacagagttgactgcctagatgtgtgattttaggcatgtcagttaattttcctgtctcttgttcctacacagaattagagtctatatcactctttatcttccttttacttttgccaaaggaaggcactaaaaacatgctgaggaatatcttgccagcatttacaactgcccttgaagagagaatatgtgttctcaacacagaaagttagaaatagggttcttcctactacattcacgcattatcaagatagcattatcattaggcacaatgtcttcaaatgttaaagaaaataaacataggatactgaaacgtgaaaaccatgttgctgaaaatgagtgatatgaggttcttaactccttagaaggcctttgcttcattctgctcacataacagcctgacattactccctgcttttatatgtcagacaagccaagttttagcagtgcatattctcttggtccccttatccaagggaagaaaagccttggagttcacattcaacccaggagttctagtcttagggcatgttcaatatagttatgtcatataactaatacatttatgcccaataagttatgggcaaccttggatatggaacctaacctctctaaccctctgtattagtttgctagggatgccataacaaaattccacaggctaggtgaattaaacaagagaaatttatttttgcacagttttgaagggtagaaatccaaaatcaacagggtggcaggtttggtttctcctgcaagacccctctccttggcttgcagacagatgccatcttcctgtgtcctttcctctgtgtgcacatttctggtgcctcttctttttcttataggaaaccagtcatattggattagggcgtaccctccaggccccattttaacttaactcacacttcaaagatcttacatccaaatacagtcatgttctaaggttagggcttcaacacttgaattttggaatgacacaatttagtccataacagcctctataaagatggcatcatgaagactgatgtaatataatttacagaatgatttctaaatcatctaaatgatttctaaatataattatatacaaatgtattattaatattattattactgtcataattattattctctctgacatattatcagtcttttgggaagtttaaattttcttcttttggaagactataccatagtggttaagagaattaggttgtttagatccaaatcttgggtcagccacttgttagctgtgtgactttcagacattatactaacctccataagctttaattttcctatccataaattaaggatggtaaaaaatagtacctgccttgtagggttgttgaaaggattaaaaggagcaatgcattaaaatgactggctaaaagtacatgctcaataaatgatggttgttatcaatagcagtatttagaccttgttgatgctgctgccttctttctcagccagcagaggtctccatcatagtcaaacaagagctagcttccctataactgcaccgcagttgccaagcacatccactgttggcagagaaaacagccgaagaattaccacactgaccaaacagaggagaaaaaaaagagagagagaacaggaaatggttaggatgccacagtaaaatgtaagatgaacaggtgaccataagttaggattgtttatgttctactgctgactttcactgatattgtccttggttgcatctcactttagcttgttccaaaccagttttaaaaaaggtatctatgtatatatcacagagaagcagtaagaatgaattggcaaatatttatgaagtcctctgaaaacaagaagtgctgctaagtaaacatttaacatttcttacagtattaagcttatttcatccttattgccagttatacgccatgcctcagttttgctacctttgtaatatgtttcctttaaccttcttttcccagacaggcttacacctccaagttcaattatcctgtcaattgtgttttaaattgtactgatttccattaaccaattgtggtatcaatttgatgatctgttccttctgaactaatcatctttacacccaccaaaatctggaaaggcaattaaactgaggaaggtgagagttattcaagagaaattaaagcataaaggtaaaaacagtggaaaaactaagattaaaaagagcactgaggagaaaatatacatgtactaaaaagcacagtatccgagcagatagagagacaaagaggaaaagagagcgaggtagaaaacggatactgcctatgcctactccatccctctttcagcaccaaggacagaacctctgagcggctgacccaagcaacgctcagtttagggtccctcccaaatcctctaaagaaaacggatacattcgaaagcagctatgaaacatgcactaaggtctaatagggaagctggaaaagcagcactcaagtaatttcaccttagaggcaaaaatgggtgatttctttctgttcatttcatagtttctgagtcctgagaaaggcaaagtttgctttgcttgggtatgtctgctgtcagtaaatggctgcaggagccgaagtggtaaactcctcggtctccagaaatcagaagaaaattttagggtaagtaatttttcttttcgtttctaatttaggacatagtattttcctcaaggttatttaatcagcttggggttctgtggatctctaaaaatatgcattaaaactcaatatccactcttatttaaaaaccaaagccctgaggaaatggttttctttttcttctaagtggttggacagcagaaaccttttatattcctttttcttttattttttcccccaaaattgtatccttgtgggctctagaagctatatcaaggaagaattaaaagatagaaaacaaaaagctgttattatttctaggatttgtatggaagttgattgtattcctcttaaggattttacttaattgtaagggtctgttattttaaactcctcaattcagcaccctggcaattcagagctgaaggtttggagaggcactattttcaatggtctatttaaagtcaggctgtttctaagtcagaatccaattattcccagcagagatatgtagtacttgagatgatgattgtgtatgtttcctttgatgatggtatatgatttttagggtattgttatttaattgtgagacttccattacttgctgtagcttactggggcaacagaagtcattgcaattaggtatttgttccagttcatgcatttagtttaattgaataccatcaaaatacatgcatgaataataatgcagcaatagcaaagtgaaacttggattctaaactcattgtgcatgactatttcactttataggtgaagcctttgcttactgatactaaaaggtctgtaaaatatctgtccttagataagagtgaagaaccactgcttgacatggcattaggatgtcttatagtcaaggagaagtagagacaatgtgagaaagattcttactcggcactcatttatttgtagttgaatattttcaagggtctgtatggctagcagtgagcaagggtattgagcaaggaaaatactgacagtatccaaatgggtgcctaatattaaagcatccatacagaaggctatttgttatggaatatacattaaagcaaataccgaacagtttctactcaatatcagattcaatttctaatgcattgaagtttgtcatcaattaatatttgcttattgattgatttatttgctgagttccccattttatctctgattagaatggtaggatgctcagtctctagaggttgtgaaggaaagtgagtatgctctgctttactagtcaggtttaatgaggggaaaaaactgttatcttagctactcagtaaccagcaatagtttttctctgtacatttaccaacaatgtaaatgtgcccaaatacataaatatgctatgtattgcaatccatttgtgaatctttttcaggaaaataggcagcaatttgcaagaagaaagtagcatagaaatgctaaagactatctctaataataataacaatgtaactcccactggctctatgagcagtgtgcacctgcattacttcaccaagcctagtcagatgatgtgacatgttcacatactctgaacaagtgagattgtaaaattagtacccatttcacatttgtctgcctcaccccaaaaagtggcatagttaagtggcatagttaagaacatgagctctggaatcagacaaatcttgggttgaatcaactccatcatttactggtttgtgatctcagcaagatatttaacctctctgtgactcaccttttttatctagaaaacttgataggataatagtgcttaccttcttcatcaggttgttgtgaggttgaatgatgataatgcttataaattttagctataattattaattttatcaggcaatatagcaagtccgaattacagcccagaccagaaaagctctggcgactggtggtcaggagtcgtctgagtaaaagattagatgtagcaacagccagagatctgtgaaatgagtgaagatgtggtcatggaaccctgttactgaagcgttttgttctgggttgagtaaaatccatctcaactcgggaatgacagttttgtgggtttttttttactttgagacaggatcttgctctgtcacccaggctggagtgcagtggcacaattatagttcactgcagcctctaactcctggactcaagcaatcttcctgcctcagtctttcgagtagctgggaatacaggcacatggcatcacacgcagctaatttttcttttcttttatttttgcaaagatggagtctcactatgttgcccaggctgatctcaaactcctggcctcaagtgatccttccatctcagcctcccaaagtgctgggattacaggaatgagcccccaagcagggctgggaatgactaacgtcaacttccatgctgctataagtattaaaatgcatgtaaagtactcatacttgccacacagtagtagcccagatgtagttgtcttcatcttcatttgttttcttacagaaagagaacaaataattaaaactctgtaagtcttaatgaggtgctaaggaggaaccccacgaatgtttcaggaagactgttattcagcactgagggattgaacatcagcaaagcaggacaaatgtcataactgatggggacctgacaactctctgttcccctgcctttttaaataggttatgcactcactctaagagatgccagaacaaactataaagaccaagataaatcaatactttgtaaggcatttaaaagctcattaaaatgtgtaagtagtgttatatgtaatgaatcttaaaagactgacgccaagagtaatcttctatttctctgccttctctattcttttacctcctatccacttttaactcctaacactgtttgctggactttttcctctgccaagaggtttgacagctacctaaaaatagtatagctgaatgccagtggctaattatacaaagggaaaccctcaactctgaaaatcaattctgagcctgatgttggaatcacagttgcatggatttctgatttcatatttattttttccacatctgatcttagatcctttatagcagaaggtgggttaaaccgtgattgttcaggtagtttctgatgagttgtggatgtgggagatgaaagcaaaaatgagtgagatgctagattactctctgtctctcagctaattgtttcaacttcctccctgcttagattttgtaagcatgaatgccatcatgaatatcgtcctgaatgtttaagcatgtcatcatgaatgttgacatgatgacattaagaatgtcttcatgaatgtttaagcatgaatgccaccatgaatgtcagtcatcatttccaagttcactagatactttacaattgcagcttatttaactcttcacctattcccactttcctcttaacaataaaagcaactatatttctagtgctatgtgccagacattatgctagagtgatgattcttcatggggagagcaatttgcacccccgctccaggatatgtggcaatgtctagaagcattttttattgtcccaacttgtggggaggggtatgctactggcatctagtgggtatatgtaaaggatgctgttaaaccccccacaatgcacaggacaacctcctcaacaaagaattattcagcccaaattgtcagtagtgccaaacttcatgtatataatctcatttagtcttcataataaccttatggaatggatatgattatctccattttgctgatgaggaaaccagcctatcattgtaaattacttagagagtgattgagttaatgaattctctaggctctttgcttcttcttacctgagacccgtttcctatctgttagcatatctaacagaggggaaaagaaagaagaaagcccagctcagttctgtgttatataagcaactctggtttgaaaaaaaaaaaaaaaatctaagcagggaggaagttgaaacaattagctgagggatagagagtaatctagcatctcactcatctttgctttcatctcccacatccacaactcatcagaaactacctgaacaatcacggtttaacccacctgctgctataaaggatctaagatcagatgtggaaaaaataaatatgaaatcagaaatccatgcaactgtgattccaacatcaggctcagaattgattttcagagttgagggtttcccttcgtataattagccactggcattcagctatactatttttaggtagctgtcaaacctcttggcagagtaaaaagtccagcaaaagagtaacaagtatcctaaggttttatgcctccctcttacgtggcaggtgagaggaggctaagacattattcaccagttgcagaccccagaaaagagggattctggccactgtgttccaaagtggcccagttgtgaaagggaagacatttgggcctcagcctgccttaaaagtgggaatatccttgaacaatcagaaagcattgtatttttccaaaagctcttggcagcagcggtgctatctccagggtagcggctgccctcctctgaataatgagaaaattataattattatcaagaattattattatgttttaaaatacattgagtgcaaacagtgtgccaagataaaggacaatttttttaaacaattctctaaattcattccaagtttgtcaccctttcccaagtatttgttcattttaactctttcatatttcaggctgaaacatttcaaagtgaggtacaaaatgacagccatgattaggccggtctcctaatcaagggagagctacagatacctggcttgagggcaaattctggccaccaagtcagcctctacttttgccaaggcctgaagagagagttcccataaaggtctatatgtaccatgcttaaatattttaaagttgtaaccaacaagccattgagtaaaatgtttcatcctcccaccttgacaaatacaccttcgtaacaacatggaaggccaagtttgaatttaagattcctggacctttcaaaattccatacaaaatgtgatcatacaggagaagctgggcccccacccctaatctgcttcagggaccctggcctcttctctcccaacctcaggctacatagaatctatttgtctgagctctaactgaaagccaccacttggccccaggaaccctacacatttatggcacagtctcccgtcagagtgagagatttagaatgagacccgtgatgtcttggaaacaggctctgagcagttgggtagagaattccctgagtgtggtctagacagggttgtaaacttagtggaccttctccttggcactgtgggaggttacaacatcattctatagaggttagaggcataaccagtagagggtgccttagtccttttgggctgctatcacaaaataccataaactgagtagtttataaacaacagatatctatttttgacagttctgaaggctgggaagtccaagatcaaggcaccagaagattcagtgtctggtgagggcctgctttctggttcatagatggctgtcttttcactatgtcttcccatggtgaaagagattagctagctctctgggtctcttttataaaagcactaatcttattcatgagggctctgtcctcataacctaatcacctctcaaagacccccacctcctaataccatcatattgggaattaggatttctacatatgaatttagggagacacaaacaccgagaccacagcagaagaccagagtggactcctctatagcacctcctctagagcttggggcaagagtcacttttgcttgggtttcagggttactccctaagtcacaggccttatgtcttcccctagccttcagaactgtgagacaacaaatttctgctctttataaattacccagactcaggtgttctgttatagcaacccaaaatggactaagatagatgggtttcattattcccacattttacatgggaagaatctggagctcagagaggtaaagtaatatgcataaggtcccagagttaggaagcagcagagctgggattgtaatcctgcaacagcttcccatctcactcagagtccaagcatggtactttcaatagccctgcacaatctgtctacctcacaccctcctattctactcctgcctcacttggctccagcctcaccagactccctcctatgacttctatgtgctagcccttcctgctggcccgtgttgttctcactgctcagactgctatcacatctgataactgcatggtctgcttcctgatctcctccaggtcaagactcaattgctgatttctccatgaggagttcctgattatactcagatactcactcacatacgcacaatcttcacccgttacttacctgcctctctgatttgtctccaatatacgtatcattattgaacacaccacatcttttatttatcttgtttattatctgtcttctcctctagaatgggagcttcaaagggaaggaattaagattttatctgttttgttcattgctctatctccaactctcacaacagtgcctactatatagaaaatgctcaataaatatttgctgatgcaataaataaaaaaatgtaactaagcaaccaagccccaaagagtctgattttattaatattgttttctgtctcctcacaggaagccccttggcatcacgcacctccctctgggctatggcatctctgagccagctgagtggccacctgaactacacctgtggggcagagaactccacaggtgccagccaggcccgcccacatgcctactatgccctctcctactgcgcgctcatcctggccatcgtcttcggcaatggcctggtgtgcatggctgtgctgaaggagcgggccctgcagactaccaccaactacttagtagtgagcctggctgtggcagacttgctggtggccaccttggtgatgccctgggtggtatacctggaggtgagtagacttcaggtgcatgttgtctctatgactgtgctagtacttgtcttccctgagttctggcctttggggctcaaaagactccccagacagtcaggaactgaggaaggaaggagagctctcattctccctgtaatgagagagttaaagctctggaaaacagtcaccatcctgtccctcatccacatcagaaccaaggagctgagaatgattctgttcatgggtctccagtgttcaggtgactggatttgagtgacgggactcttcctaatatggcctagagtttattctctgtgccagacatgtctcaatgacatggtgggctgggtgaagcagtccagaagacctcttcaccagtgtttaatgtatatgagggtgagggtgtgcaggagggatgtgaggccaggaggaaaaaggaattatagaaaaaaaaaattagtgaatgtaagggaagatagaaagaatgaccagcgaacagatcagacttctttcgatggctcagtccctctttgctctttcctcctgggtaccagttctccatagactctgctaccaaaggaacagacaaaaccctcaaatgtatattttccatgtgtccatgaatagtacagagcctttgccagagagatagtgcagcagatcctggtgaattcttttggggagaaacatttattaaatttgaaagtattttcaattgggagtgcaaaacagagccagggggtggtcaagacaaaacacccatttgctaacaaagaaatcagggtgaccatatctgttcaagaaacagatattcttaccaggaaaacatgcaattacttaagatatgtttttttaaaaaaacctgagtatactattaatatttctcctctgcactgtgtgtcattttaaagaggtatccaatgaaggatcaaaatgatgctatgattaagagaaattaagattcatcaaattaatatctcagttaatattgatagtaaaagtgacagttaattaagtatgacatatcacgggagagcaaaaaccttgtacatagactgcctgtgctaatacctttgttaaagatggctgggaactaaaattagacttatgatctcaagggggagacataaagagagaaaaaaagaaaacagagaaataaaaggaaaagaagaaaaacaactaggctgtgtagatctaaaggctaagggaatacttgaggaaaaaatatgcatttattcttcccagttaggataatcctagttgggagggtgaagggtcttataattatcttgatttttctgtcaacccaattagtctgagtcaaccttgaagtcagagactagatctttactcttcatctcctgtagcctaaacatactacctggcacaaaatacatgctaactgctataacatttgatatatgaatgatgaaatgaatcttctctgtaatgtatgcattatatgggctattcctgctaataccatctgcctctctatctattgttacactcagactttttggggagaggacttttggggacgagctatttgttattttacatccaacaataatgagcctgaaaaaatttcgaagcatgtgatatttctgttcaagaatgaggcgctttaggtgcaaccagccaatatgaattggtcaataactcatagcactgtcatcatcttcctaaaatgtttttgtccatttctatgtgttccaaggaatgttaagtcctccagaaggatgaatggcaggaagaaatgtaggcagtggaccttcactctaatgagcatttttattccctctaagataaaaccaggcttttggtgtctgtaacaaagccactcaggggcatttgttggctatgtatttgtgattatttctaggactctggttggaccatactggaaaacatctgtatgtactggtttaggagatagacattgtgacttttccacactagaaatccatggcaccccttctagccataccttctgatatactggtgctcctattctactactgagcatagaagggcaggtgagactatagaaaatgacaggaaatcttgccaaaggccttaaagaaatcactgtagtagtacatataggttttcttccatgagaacagctctgatgaagtttttggtttctccccataaaaaccataatactatgccctctgtccaacaggttatttcatgtaggtattcagtgatcaagatcataatttttacatttgatcttaaccaaaaggctgagaagcaataagagcatgatttttaaaatctatattcacacaaggaagattcaggggagcagagacgtctcctcactggctttaggacctctttttggtcttaccaatttgcttcaagacccagtcaatgtcttgaagcgagttggtaagaccaaaaagaggccctaaagccagtgaagaatacagaggaccaagtctctccatcttacatcagtctatacttttcttaatctcaaatgttttcctatctttccttagaggcaaatgaggcaccttaatgaaagaaaagagcactttgagcccttaaaatatgggctatgaatacataaatccatgttcctcaagaagaagcaaagtattattctcactaacttgtcctaatgatagtacagtttgagtagctactctactaattacttaattatacctaagagctccctttggaaaagaaaagggtgcaatgttgaccaccgagactgctgtaggcttgagggcccccaggaagataagatgtacatgagaagaacaccactttgggatccaaaagattcaccagattcatagccgcatgtgctttgatttgaacacatccaccttcttcgaaggaaaattggctcattttgccagacaccagtatttatgaggtaggaatgttttggctgtaaatattggaaaccttgattagttgtggtttaactgcatttaatgtttttcaaataaccagaattctggaggaaaagaattattgtgttggttcagctgccccatggtgtcatcacagaccagacttttccatccttcctcttcaccatccttggcaagctggcttagttctttatcttgccatagcccccagcaccatggcagtattcaaaaataggatgggtagggacagcaggaaatgagagagagagagagagagagagcatgcactttccctgtagtagcttaaagcatgtttctaagaggtttcacataagcttaattggccagaacttagtcatgaggccacctttagctgcaaaggaagctaaaaaagaaaaaatgaaaacgtgtgttttatttataaaagatgtaggggtggggaattgctctgacgtaggcaataaagtatcacatttcctttattggaattcactgggatgaatgtcatttcaacacagtgtcatgctgtgagaaaaagactcagaacttggagtcagaagacatggatttaagtgcataaaatggaggtgacaacaacattttccaccctgagctgatgttagactcagctgtcatcaactgatagagtattttgataaccaaaacttttgatctataaatatctcacttaagacacttttaattataagtttaaaacagcttaactccaattggcttaaatgaaaaaacagaatgcattggctgtcataccaggaactttataaagtcctctggtagggtgggctgcaggcacagttccatcagggcaccagctccatttccctacagttctctcagctctgcctttttccatatactgaccttacctgcaggcaacaggctaagctataggtctcacatgtccacaccacaccattcacagcaagagagaaaatccttttcttagaatttctagtagaagtatcaagatgtgctctgattggactggcttgtggcacatgagttccagcttgaaaaattgatttaacataggttatatgtttcttctttggatactgcccagcgatctcatagattcacagtggcatctagggactatttattgaaaagatagaagaggatagtcagtaagtgggaaccacagtcagctttcattggtatcattctcatctttaagacacacaggagccttcacttgggcatatataagggggcccacagggaccagtcactgacgtgcttcagtattctctgtcctcaagcctggcagataagttcaggacaaaaaccaagcaggtgacctcacagaagattatatttcagagggcttctggcttggctatctgcttaattcagtttgcagcattttctcaacttttctgtaccatcccaaatagttctgtctcagatttcctctcaagattttaatttcctgctttaccgtctgcactccagagcttcctctccaagcacaaacttctcattttgttccactcagtgaagcaccttttgtgatgtttaaaacacttttatcaggatagaaaggcagtataagcggccaggggaacatttggaatactaaactcagactacttgggtcccagtgtagacaggaggaaaaacttgaggattaagaaaggtagtcaagcaagatagaataggatgagttcaggcaaggaaacgcaccacagaaaaagcgatcgaggtcggactgtgatgaaagaaaagaatagcaaaattttgggaagggaagaatctttgagttttgtaatgatatcgattattaaaaataaagaagtgggtttttttaaaggaaagttttaccacagctcaaaaaaccccaaatgataatttaagacctccctactggaaaacaaagacaggagattctcacgatctcgtcaccaaactctggattttgataaaagtcatagaatattaaagctggaagggcttggagattatttttgccatcatttccacagtgtgatccaaccacaggaaattcctggccatattctactgacatggtttctctgaggatgagtcttggagtctcatatccaaatgagctcctccatacttcttatgcacctaaactttgagcagctctgagctaaacgttcattagggggtgtgttaatccatttt

SEQ ID NO: 696 - DNA, 1471 bp, Homo sapiens
  source 1..1471: mol_type = other DNA
gtagccaagtctgcaggtgtctttaaatttccaagccatgaatgaatccaggtggactgaatggaggatcctgaacatgagcagtggcattgtgaatgtgtccgagcgtcactcctgcccacttggatttggccactacagtgtggtggatgtctgcatcttcgagacagtggttattgtgttgctgacatttctgatcattgctgggaatctaacagttatctttgtctttcattgtgctccactgttacatcattatactaccagctatttcattcagacgatggcatatgctgatcttttcgttggagttagctgcttggttcctactctgtcacttctccactactccacaggtgtccacgagtcattgacttgccaggtttttggatatatcatctcagttctaaaaagtgtttctatggcatgtcttgcttgcatcagtgtggatcgttatcttgcaataaccaagcctctttcctacaatcaactggtcaccccttgtcgcttgagaatttgcattattttgatctggatctactcctgcctaattttcttgccttccttttttggctgggggaaacctggttaccatggtgacatttttgaatggtgtgccacgtcttggctcaccagtgcctattttactggctttattgtttgtttactttatgctcctgctgcctttgttgtctgcttcacttacttccacattttcaaaatttgccgtcagcacaccaaagagataaatgaccgaagagcccgattccctagtcatgaggtagattcttccagagagactggacacagccctgaccgtcgctacgccatggttttgtttaggataaccagtgtattttatatgctgtggctcccctatataatttactttcttctagaaagctcccgggtcttggacaatccaactctgtccttcttaacaacctggcttgcaataagtaatagtttttgtaactgtgtaatatacagcctctccaacagcgttttccggctaggcctccgaagactgtctgagacaatgtgcacatcctgtatgtgtgtgaaggatcaggaagcacaagaacccaaacctaggaaacgggctaattcttgctccatttgaagagagctacatagtaaatcaaatgtaatctgacagtggttttggatcatattctagattcatctggaaatttgccatcagagaaatatttacttgaatagttgactgtaaaatgaagtatgagactaaaggtttctctctttttttttctttttcatggaagaaactaaagggaaggatgtatagagggttagctcatgaaataattatagcatgtgagtattagtgtgcagtaataggaaaaattaagcactgagatgaaaaagaatatctcaaatcttctgcaggacatgagcaagccccttggctcagcatttctgtctttctgtctgactgtaccctgcctct

SEQ ID NO: 697 - DNA, 2022 bp, Homo sapiens
  source 1..2022: mol_type = other DNA
ttctgcagtacgcgggttgaagcacattcctgctttgcaaggctttctgctaaggatgtattgtggcttttgtttggattgcagcatgcagaattacaggtaacattctgaaattgaactaaacagtaaattctgttgaaatgttttcaaagaggcaaaatattatattggaatcaatgaagaaagtaaattatcttggctaattttattagtggtaattgtagtgaaaggttttcctaaatattataagcaaattccttttctcccccgtctcaaatgaaaggaaatgggggtaaattaatctgactgtgattggttttgttttatgctgatcttgaaagcttgatgttgctgctgctcctctatacagtacagatcagttgtgtggggtgctattgagggtagccgtgaatagtggtgccagtaggggtggagcgggagggatgatgccagcctgagctagccaggttctttgattagggcattggatgtgaaatgtaaaatgctctctccttttcttctatcagctgttcagaggagactcattacaactcctgctgaagctcctaatcttcttcccttctcttctaccctttccccctaccctcacttggcctgaagacgttctccccagagtttaccttgctcccctggtgctatgtgtatggtgaacctggcactatggccgcgtctgggactggccagacaactgctgctggctctccttattccaggaaggatttaaaggggaattgcactgcaggcaatgcaccagagcagcagcatcaggagcttggggagtaaggctcctctggcattattacacacatgcaaagctgaccgcaatgacagcagctgcttctttgaactgttggcagcagccaagcggcagcatgaagtgacagatcactcctgagctcaagatgaactccaccttggatggtaatcagagcagccaccctttttgcctcttggcatttggctatttggaaactgtcaatttttgccttttggaagtattgattattgtctttctaactgtattgattatttctggcaacatcattgtgatttttgtatttcactgtgcacctttgttgaaccatcacactacaagttattttatccagactatggcatatgctgacctttttgttggggtgagctgcgtggtcccttctttatcactcctccatcacccccttccagtagaggagtccttgacttgccagatatttggttttgtagtatcagttctgaagagcgtctccatggcttctctggcctgtatcagcattgatagatacattgccattactaaacctttaacctataatactctggttacaccctggagactacgcctgtgtattttcctgatttggctatactcgaccctggtcttcctgccttcctttttccactggggcaaacctggatatcatggagatgtgtttcagtggtgtgcggagtcctggcacaccgactcctacttcaccctgttcatcgtgatgatgttatatgccccagcagcccttattgtctgcttcacctatttcaacatcttccgcatctgccaacagcacacaaaggatatcagcgaaaggcaagcccgcttcagcagccagagtggggagactggggaagtgcaggcctgtcctgataagcgctatgccatggtcctgtttcgaatcactagtgtattttacatcctctggttgccatatatcatctacttcttgttggaaagctccactggccacagcaaccgcttcgcatccttcttgaccacctggcttgctattagtaacagtttctgcaactgtgtaatttatagtctctccaacagtgtattccaaagaggactaaagcgcctctcaggggctatgtgtacttcttgtgcaagtcagactacagccaacgacccttacacagttagaagcaaaggccctcttaatggatgtcatatctgaagtggctcagttacggggttcccgtgtgtgtgtgtgtgtgtgtgtgtgt

SEQ ID NO: 698 - DNA, 2375 bp, Homo sapiens
  source 1..2375: mol_type = other DNA
gtgccagcctggcgcccgcgactgcctgccccagcccctcagtggcggcttgctctcttctctcgctccgaaccagacacagccgctgccgctgccgtccggcgcgctacagactcccgagaacagccctggctgtcagcgagcaccagccgcttcctgtccccatcgcggagactggaggggcgcaccacggccatggagccagaggcgcttcaggaggcaagagaagtccccgcgcgctccgcagcccggcgcagctcatggtgagcgccctctggggctcgagggtcccttggctgagggggcgcatcctcggggtgcccgatggggctgcctgggggtcgcagggctgaagttgggaccgcgcacagaccgcccctgcagtccagcccgaaatgctgccgccaggcagcaacggcaccgcgtacccggggcagttcgctctataccagcagctggcgcaggggaacgccgtggggggctcggcgggggcaccgccactggggccctcacaggtggtcaccgcctgcctgctgaccctactcatcatctggaccctgctgggcaacgtgctggtgtgcgcagccatcgtgcggagccgccacctgcgcgccaacatgaccaacgtcttcatcgtgtctctggccgtgtcagaccttttcgtggcgctgctggtcatgccctggaaggcagtcgccgaggtggccggttactggccctttggagcgttctgcgacgtctgggtggccttcgacatcatgtgctccactgcctccatcctgaacctgtgcgtcatcagcgtggaccgctactgggccatctccaggcccttccgctacaagcgcaagatgactcagcgcatggccttggtcatggtcggcctggcatggaccttgtccatcctcatctccttcattccggtccagctcaactggcacagggaccaggcggcctcttggggcgggctggacctgccaaacaacctggccaactggacgccctgggaggaggacttttgggagcccgacgtgaatgcagagaactgtgactccagcctgaatcgaacctacgccatctcttcctcgctcatcagcttctacatccccgttgccatcatgatcgtgacctacacgcgcatctaccgcatcgcccaggtgcagatccgcaggatttcctccctggagagggccgcagagcacgcgcagagctgccggagcagcgcagcctgcgcgcccgacaccagcctgcgcgcttccatcaagaaggagaccaaggttctcaagaccctgtcggtgatcatgggggtcttcgtgtgttgctggctgcccttcttcatccttaactgcatggtccctttctgcagtggacaccccgaaggccctccggccggcttcccctgcgtcagtgagaccaccttcgacgtcttcgtctggttcggctgggctaactcctcactcaaccccgtcatctatgccttcaacgccgactttcagaaggtgtttgcccagctgctggggtgcagccacttctgctcccgcacgccggtggagacggtgaacatcagcaatgagctcatctcctacaaccaagacatcgtcttccacaaggaaatcgcagctgcctacatccacatgatgcccaacgccgttacccccggcaaccgggaggtggacaacgacgaggaggagggtcctttcgatcgcatgttccagatctatcagacgtccccagatggtgaccctgttgctgagtctgtctgggagctggactgcgagggggagatttctttagacaaaataacacctttcaccccgaatggattccattaaactgcattaagaaaccccctcatggatctgcataaccgcacagacattgacaagcacgcacacacacgcaaatacatgcctttccagtgctgctccctttatcatgtgtttctgtgtagtagctcgtgtgcttagaaacctcaccccattgattggtagttcgaagaattggcagaagcagttgcaataaactcagtcaaatgtacccagcctaccagagatggaccaacgatcctatgagagaagagagtatggtgctgggtccttaaaaaaaaaaatgatacttggtccttaaaaaatatgctctcccctccctttttaaacaaatggcttgttcagtcacttgtttgtgtttgaattgatttttaaacagcaggttgtgtgtgtgtgcagtgatgtggtgggagcacagctttcctgggtctggattcccgtggctttgtgcttatgtcatttcttctctctgtgctggtgggggcctctttaccatagcttaagaagtatccctgatttattctggtgtctaataaacacagattatttgta

SEQ ID NO: 699 - DNA, 32746 bp, Homo sapiens
  source 1..32746: mol_type = other DNA
cgctgcggagcgggaggggaggcttcgcggaacgctctcggcgccaggactcgcgtgcaaagcccaggcccgggcggccaggtgaggccagcgtcgctcgcggcatcggggcgccccgctccttccgcagaccccgaagtggggcgcaggggcgggggccggggaccgggcacagtctggggtccccgcgtcccgcagaccgcgccgtctccaaagtcgccaacagtcgcgggtgccgagcgccccccgatagcgccacatgggaccctgaggccgtccgaggcgcgaggagggtgcagggctgcccctggccccgctccaggctcagaaccgggtgggcacctggtgcagtcaccggcttaggggacgcgtgggtgtctatggctgtgactcgggggtcctggtttcttctcgtggaacttaaccctactaggggtgcggcgcatcccagatccgatcggagtgggttttgtacaccgccgctccatctcgcgggggctttgtctgtgttgggggtggtggcgggcgcgggctgcgcgctggtgctctgggcagggcggggaggccgggcgaggactcgccaggcagcgccgcttcttgttctgggcgcggtgaggaaggacgctttctaacgggccacattttgctgtgtagacccaaaactcgcctctgaggccccgcgttcaggagcggggtcaggtggccccagggcggcggcggcttgccggagactcgcgagctccgcacccgacgccctctcccaacgcggcctcctgctcgcgccgcggaaccccttcgtcgggtgttttacccaccggaggggtcgtgccggttgaggttgtcaccgggtgcgtggcatagctcgtgatagctcatgggtgaggttttgtgcaaacttggatgcagggaaagttgcctgttagagcctccacctgcgacctgcttcagtcgttgtgtgtgtgtgcgcacctgtgtgagtgtgagtgtgtatgtgtgtaagtgtatgtgctcgcctgtgtgtgtgtgagtgtgtatgtgtgtttgtgagtctgtgtgtgtctgtgtgtctgtgtgtgcgtgcgctcgactgaaacacgctgctgctggatccaaatgacagaagtcgccctggctggggcggtgtagacgctcctgctctcctgctcagcgttgcaggggggtttatgtagccgtttggacaggatttcccgggttaccctgctggcccaggagctagttcccgcgatgaagccctgtccatcctccgcccagctctctcacgcggggtggtgccacctgccctaggtggatgtggcttgtacagacactttttgaggaagcagttgtgatggttatgtctaaactctctttacagtggctgattttgcttatataaattttgctctttattactgagtataaacaatacaagcccaggcttggtggctcatgcctgtcatctcagcactttgggaggctgaggcaggaggatcgcttgagaccaggagttcaaaaccagccttggcaacaatagtcagaccctgtctctacaaaaaaacaacaacaacaacaaaaaaacacacacaaaaataacttagccggtgctgtggtgcacacctgtagtctcagctgctcaggaggctgaggtgcaaggatcacttgaacctaggaggttgaggcagtgagttgtaatcacaactgtattccatcctgggtgacagagcgagacctcatgttaaaaaagaaaaaaaaaagaaaaaagaatacagatgaacagtcatgaagacattattgaatgctcttagaagattgtaaaattgctctctggaagtgtgggggaaggtggaagtgatatccatgcattgttagtagaaagccacgctagagctcacacagccttgcactttgataggagtggggaggggtgcaggggaaggaggagcaaaccagagtgtctgtcttgaggcctccatgggccagtgccccagccctgtggtgagggctggcacttcccagctcccgtgccccagctgtaccatctcaggcgctgagaacgcacccatcccttcccagaggaatgcccgtgaatgcctcggggctctgccctccgcaccaggtatgtccctagccctggctgctgaattgttgcgttcctgttgtgtgtttatttttcatattggctgaagaccaagagggaagaagcacagaattcctcaactcccagtgtgcccatgagtaagagcaaatgctccgtgggactcatgtcttccgtggtggccccggctaaggagcccaatgccgtgggcccgaaggaggtggagctcatccttgtcaaggagcagaacggagtgcagctcaccagctccaccctcaccaacccgcggcagagccccgtggaggcccaggatcgggagacctggggcaagaagatcgactttctcctgtccgtcattggctttgctgtggacctggccaacgtctggcggttcccctacctgtgctacaaaaatggtggcggtaagtcccatctcagcctccctgagcatgctggccgggcgggggtcgtaggggcagccggggccaaggcacgtacggaaacgagatgaagctgttcccatgcgtgaagacggagctccctgtgagagctcacggccggtgcagatcctcccagaggatgtcacaaaaccattgagcaggactcggagctgccttgtcccacgcctgcatttcagagtttaggaaagggaggcccgcgaagaagctggggggtggggggcggcagacggggcagcttggctctgcctcctgtttccagaggctatcttcgctttggaaagaaaattctcaaaggtccaaagaacagcctgcggctgactttggcagcctttgcaaagcatgtggaggccctggagcctggagtggcagaggaggcccctggaaagtgactgtgtcccctgcaccctccagaacccagccacagagccagaaagcgaagatcgaggcagggccaccggggacgtccaagaacattggtgatcccttcccaggagcctctttgggcctcccagcctccctgcctggcctccctcattggcctctatgctaggtctgggaagggaggcctggggaagaatctggggggaagcctcacaggatgcctgcgaggaggctggcatttttatgcccatcttgaagaggggaagacagaggcctcagcaggtacaggaagttgcccaaagacagagctgaggggccccatgcctccccctccccttccccaggagagagagtggcaaagctctccctcactccagtcagaccaggggagcagagggaatttaggaggttgagaccagggttccctgggctttgtgctgggggtgggggaggtgcaggtttcagaggaactaggccttaccctggaggggctcccagcacctggggcagcaaagaccctcagccacagtcaataggggcagcctctgagggccccagaagctggggacaggacggcagggcccactcagctcaggggcagagttggggggtcacagattcacaactcaagaggcaaagaggatcagggcaaagtggggggacgcaggccagggaagggcaccccgaaccaccacggggaaggatagtacctagagcaccgctgagcatgggcagggcctccctgtgctgctcttgggtttgacttcatggctcgaggtgcgcaatgacaaggggatccaggagggacgtgtcaggcactgacagcagtggagggcgggcttcgggactcatctaccctagcctgggacttcccgttggagagtggggtgaaacggtcgggccaggacatggatggttgactggggtagccgcccaagctcccacgaggagagatgggcccttccgaggccccaaactaaaggtgcttttctgccccacaggtgccttcctggtcccctacctgctcttcatggtcattgctgggatgccacttttctacatggagctggccctcggccagttcaacagggaaggggccgctggtgtctggaagatctgccccatactgaaaggtaatatgcgggtgcctcccttcaccctggcgcagcgcggatcatggtggtgacgctggagctttcaaagcaagccagccgcatcatgggcatccagccctgctttgctaagacacaggcatggcacacgccacttgaacttgggtcccaccttaaagatctgcagtgacaaggactggatagttcattcccttgctctaggtgagggtcctgcaattcatttgtggtgttactttgtcaagatgctaaaatgtagttaagataaaacacatgtctatctatggatctgccatctacctatcatccatcggtccatccgtcaatcatctgttatctatctatccattatctatctttattattggtctttatatcaatcattcacccatctatctacctatctacctaatccatccatctatcatcatcatctatctgtatctgtttcctgtggctgctgtaacaaatgacacaaactgggaggcttaaaaggcacacgtttattgtctcacagctctggaggctggaagtccaagatcaaggtgtctgtagggttgatttcttctgaggctgtgaggaagcatctgttctagcctctctccttgtctcagagattgtcttctccctgtgcctctttatacttcttgcttctatgcatatctctgtaaccaaattccccgtttttatgaggccagaagtcctgttggattagggacaccctaatgacctcactttaacttgatcacctctgtaaagaccttgtctctaaataaagtcacattctgaggtttgcggggttagaacttcaacagatgaacttgggggagggacacatcccacaattctatctatctattatctgtcaatcatctattcacccgtctgtcatctacccattcatccatctattttcttttgatccatccacctatcaatccattcatccacccatccagtcatccatccattcatctatctatggatctatcatccatccatccatccatccatccattatctattgatccatccatctacctatcgatccatctatctatccatccatccattcattcatccattcatctatctatggatctatccatccatccatcttctatctattcatctatccattcatccatctgttatccattgttccatccatccatccattcatctatgtatggattaatccatccatccacctatcgacctatccacctatctactagctattgatccatctagttgtcactgaacctttccggctgctgatgtcctgctctggcaccatgaaatggacacacctcgtgttgagtgcaggtggcctgcccagcaccaagccctctcccagcatttctgactccatcttcatgagaccctgggaagggcacacactaggtctctgtgttggagatgcagatgctgaggaccagagggccggggtcgttccccctggtgtccccatcagagcagagtgggatttgatcccagacgtttctgactccccaatccctgcacgcaggtcacacttgcccagtgggccaaagccacctctcaggggctggtggttcagggaggattcaggcatttactcagaggcaccactcagaaaattggcattaagaaaatgactactagaaggtcagcctctggatactcatagaagttctggaaaagctgtgtgtttagaagacagccgagcccagcacggccccaggacgcattaccaatgggtcaggggtgggccttcagaggcgagccgctgacctcccttaggagagggaacagatggcatttcacagctgctgaggtcaggctccaggaggagaagtcagtctcgcagccgtggaaatgctgagactggacaggtgtgatggttcttcccaggcacgagactcattcgttcttaatgggctgcttagtgaatcttatgacttcagtaatttcttcctgggctccacattcactggactgcactgaaatggagctacaaaaagaggcctccctccccacccccacccccacccccaccccacacacatcttcagagtgagagacagatgctttgggcatgcactggtgccagacgaccccttggcgggatctgcaggtagaagtcaaaccgtacaagaattgctcagaacatgcctccgtccccgtcgtcaggtccctgatatcaggtccccaatggaagaatgcagcagccaacggaagacccaggcctgttgttacagacagacaggggcgcgtgtcaaatccggcgttgcagtgaacccaggctaacagttcaagacacacgcgttacctgtgtcctgcctggccctggccagcggcacggacgtgtttcagagaggagtgctgcctctgagcctgcagtcgtaagcgatgctgagcttgcaccgtggtccgtgttggagagtatctgagggctcagagccttgggatgctgagtcagagatgaagccggcccactggggtaggggaaactgaggaaagatgacattgtgctctggcacaggctgcagcgacatccaactgtgctttgctggattttcaagagccaccctggagtctgtcacaagtgtcttacaaggcacagccctgtgccccactcccgccagtgagcctggtgttggagcaagttaaatcacctcttcacgtgcaggattcaggtgaggagggcaggagaaaaagggacctgtaggtccgcagataagagctcatttccttccgtctgtcacacagaaaggatgttcaccaacaaagctgccgttgtgggtcttcatggtgtagtccataaaatgtcaagaagcaatttctaagaatttcagagcaccaactcaacttgggctagtagagaacctctgacttccatcagcgtgagcagtggcacctcgttctgaagaaatgcagccggcggatgtgggcatatcatcgtgttctccacaatgcgcagccggggtaagctgggcagtcgtctcctctgtgtcacagaccctgtgcccacaatcccgcattccatgccgccagcttcgttctgaagactagtcccagaggagggctgcaaagtgtggccgcaggaaggaaggctcgtggccctgcgggcggatctttggaagagcttgttcacactcacctagtcctggtgaggaaggaaaattgcaaatcacagaaagtgaactgttcgacccacgaagggatagatgaatcagtgcaagaaagctggacttctttttagagacgagacaccttgagttgttgaatctcagtaacgctgcaggttccggtgccagcgtcccgtttgttctgcctacctgtcaagcgcaggatgccagtttagaggagactgacattgcttatgaaatcagatgtacaccatgcacccccggcaccctgatacatgtgcctttgtcctttttaaaaatctggttaataaaaatgcatacgttttcatgtctcattgaatagaagtgccacgtggtaaattaagacatcagctaaagtgcccacaacaatcattgtggagctaaaaggccatccagccctgagcaggtggcaattccatgggggaatgaagccagctctccaggaagcctggttgttcctggcccttcccctcctgcagacctgcgagctgctccctgctcctaactgggagccaagatccacccttgaaagccagagggcggagttcatggtgaggcccagctgctcagcagccatgactcacgtgcatttcccgtagtctcaccagagcagcttgggatgggcaccacagccagaggggcctctggggccttcagccccgcagtgcaccccagggtcctgagaggtgggtctttaaaactctccgtctcctcccttcccctcgctctctttccctctccctgtgtctctttctgtctctctccctcctttcctctctgtgtctctcctgttctgtctcttctcctctctgtctctctcctgttctgtctcttctcctctctgtctctcgggtacatgcacacacagcaagcacatactaaagacacccagactgacacagagaggcgtcctctcccctctttcttttcttttcttttctttttttttttttttgtgagacggaatctcgctctgtcaccaggctggagtgcaaaggcgcgatcttggctcactgtcacctgcgcgtcccgggttcaagcgattctcctgccccagcctcccgagtagctggggctacaggtgcgtgccaccacgccccgctaattttttgtatttttagtagagacggggtttcatcgtgttagccaggatggtctcgattgcctgacctcatgatccgcctgccttggcctcccaaagtgctgggattacaggagtgagccaccgtgcccggccctctcccgtctttcttccaaagacctgcttgatgcctcctgtgaggtatggaggggctgctccaccagaggcttcctccagcgggatccgtgcatgcgttgacaacaccctctcctgaagccagctctcgtgggtgccctggggtgtactggtgttcaggggtggggcagggtggccgtgctctggtgggcgaagcaccatttgcaggcacgaccctcagccagcttctgtttgtcaggtttcggtttcattgccaagggcaaccccattttacagacgccctggaaaccccaccattcgattgtattgaatataaaatattttatagtcagtcatattttagtgtgatttctcaaacacaaaacaaactacacacaaggttaatataaagaaaaagatactaagcaaaaataaatttaaggaaatgggccttaaaagctatgcttgaaattcacacttagcgccgagcttcctgggagtcagacaggagggaagggaagcgccatgttctcatgaatgttttccctggaaacgcgagcagggactttgcctgccacctccttggggagacagtctcccgtgtcactaaatggtgtttaagaaatgtgtcaggtgaagcttcatctggagcccacagtgatgtcatgagcagagatcactagaaggttctgtagccaacagggtagtgggtttcctgcgtctgggccttcggtgagcttgaggagctcgtggtgaagttggctggttggtgaggggctacacgtcagtggcccaggtcacgggctctgccttcctgaagggcagggcttggagcaaccgaatgcctggccagtgctgacagtggccactaccgttcaagggagccatttcctcacccaggtgcccagggaagcatccaggaggggactggccaccaccgttcaagggagccatttcctcacccaggtgcccagggaagcatccaggaggggactggccaccactgttcaagggagccatttcctcaccgaggtgcccagggaagcatccaggaggggactggccaccaccgttcaaggctgtttcctcacccaggtgcccagggaagcatccaggaggggactggccaccaccgttcaagggagccatttcctcacccaggtgcccagggaagcatccaggaggggactggccaccaccgttcaagggagccatttcctcacccaggtgcccagggaagcatccaggaggggactggccaccactgttcaagggagccatttcctcacccaggtgcccagggaagcatcctcaaccaggaggggtcctcttggtaagggggactctggtgtgggggctgcactgtcccatggatcagagcaggcccatttgctctgggagccgcatcagccagtgtggccagtggtgatgtcatgcacagtggccatggtgatgtcatgctcccatggtggccctgccaatctgtggtgcagggcaggaaacaaaagcagtggctctggaaggacccagggtacactcagcccttccttcggactctggattgggatccactctggtgttgtttgatcaaggacttcccagggtttcaagctaaggacttgatacagaaagttttaaccttgaaaaattttcaaattgggcatccattgtcagttaccaccatggaaaaccctccacagtgctctctggaaacaatgtggctcaccgacagtgtggctcccaacctggctgcctgggtgagttcactgtggatcacaacccagcctctctcctaagggactccggacagacggtaatatagaattatttaatatggaccagatccacgtgggagaaggccttccaaaggcaatccgtgacagactgcaatacagaattatttaatatggaccagatccatatgggagaaggcttttcaaaggcaatccatgacagactgcaatacagaattatttaatatggaccagatccacataggagaagaccttccaaaggcagcagcttggctttcatcgtcaccactactgagcatgctttccaagggggattacccgcactcctgatcttagatttgtttaaaacaaagttttgagtcttctttttgctttcaaggtaggaagagaactttactgaggtgccctgagcatgagaacagcttctcctaaggattgagactataaaaagcaacccaggccaccccctgcaaaagtcaccttgaaggtatgctcctaccccggccatgaacaggcaagacggcatggtgcctactgggttttaataaagtaaatcaaagttgtacccaaactaatcatgtcagtaaactgagaagaaatgtggaaatgaaaaaaattcttcctggagcttagtaaagtgaaccccagtagcaagaacgtgatggtgcccatccagcagtgaacaaggaggaagtcatctgaccaccaggcccatctgcccaccagtcaggctgacaccactccaaagactgctgaccactgagttctgttccagtttaccaggagaccccataaatgatggatcccaaattccaggtctgtgatcctggaaaggacactctaaaagaccgtggatggcattgcatggccatggatggccctggctggtccttgatggtcttgcatggccctggaaggcctcggaaggtcaaacatggctctgagtagtccttcatagtcatgcaaggctctgggtggcccaaggaagccctggatgatcttacctgccctgggtggaccctggtggtcttacgtggccctgggtgattctaggaaaccctggatggtcatgcatgggtagtgtgaccttggatggctccacatggctgtaaatgagctcagatgactcttctgagtagtcttgcaggagaggcatgagcagctatagatggccacagatggccatagatggctatggatggctctggatggccatgggtggctgtggatggccatgggtggccgtagatagttatgggcaaatgcagatggctgtggatggctgtggatgtctgtagatggctgtggatggttttgaatggcaatggattgttgtggatggccgggtggatgtgggaggttgtggacagccatggatgactatggatggctgtggatggatgtggatggttgtggttgggtgtggatggttgtggatggttgtggatggatggatggttgtggatggccgtggatggatgtgggtggccatgaatggttgtggatggctatggatgaccatggatagttgtggatgtctgtagatggctgtggatggttgtgaatgacagtggattgttgtggatggccaggggtggatgtggatggccatggatgactgtggatggctgtggatggatggatggttgtggatggctgcggatggatgtggatggccgtggatggccatgaatggttgaggatggctatagctgaccgtggatagttgtggatgaatggagatggctgtggatggccatggatggccctttgcgactcaaagtggccctggattagcctgggtggccatatgtggtcctgggtgccctccatagtcctgaatgagcctggtggctgtggatggctgtcaaggaccccaggtgtcccttagtgactattggcagtcttgatggctctgggagacactgggtgttcctgggtaaccctagacgacctttgatggccctatttgcatgggctccctaggtagccctgggtgcttctgggtggccgtggatgattctgatggtttcacatgggcctgatagccctggttaaccatgagttgggttgccctgggtcacccagagtaccccctagatggcctcaatgatcctggatgactcttatggatcctgagtggctgtggtggggatggatgaccatatgtggctgggggtgaccttggtgtccctgggggtctctgggtgcataagggtggccctggatactcgccatagctctgggtgaccttgctggctctggatgtctctcagagacaccctgaaagtccttgtgtaggagtgcatggttttggggagtgggcagcttcttctctgtggtcacagtgtgaaatctggtctcaggcctttcacgggccttccctgcatgtttgaagatgctgtctggcatcagggctgtccaggagttgtgggctcagggtaatgtctcccgtgaggggaggtggaagggacacgttgctgatggtggctctgtgctccacctgcgtgggctccatggcctcccccttcccgctaggtgtgggcttcacggtcatcctcatctcactgtatgtcggcttcttctacaacgtcatcatcgcctgggcgctgcactatctcttctcctccttcaccacggagctcccctggatccactgcaacaactcctggaacagccccaactgctcggatgcccatcctggtgactccagtggagacagctcgggcctcaacgacacttttgggaccacacctgctgccgagtactttgagtaagtgggagtcgggtcctcgggaacgggagagatggcgcagccaggtcccccatggtagccccttggttggacaccagcccttgctgactcccagggtgcggggagggggaatctgttcctgcactccatccctttagtgctctggaggggcacatttctgaatcactgtggtggtctccaggagctcagcaaagctcctgtagggcgagccctcagcaaggatggggcactgagcagctcccttggctgctcccagcggcagctcagggtgggagggggctgatggggaacacagcagaccctgtgcagaaggtgggcaagctccagtctctgggagctgcagtggcgcctctggagtgagtcagccccatgtctgggctcccttcctccctacccttcctctgtgcatagcatggggccgaactgcctcactccggcccttgccctctccagaaaagataactttctgggtgtcactgcgcaagaagtctctggcttcagtaggcagcccctgtctccagggtgacccagccgtccgcttttcacaagactttgttttgttgtttacctgcatggctttatttctgtctctgggcctctttccacctcccatgccagcgtatcccatgtccagcagcctcctgggtctctgtctccttctccctttgccctggccaggcctgacctgcacagtcctccccagccaggccagttcctcactgcccaccccagccaggcccaaccctcactgtccaccccagccaggcacaaaccacaaagtccaccccagccaggcccctcgctcactgtccacctcggccaggcccaccccacaccgtccaccccggccaggcccgcccctcatggtccaccccggccaggcccacccctcaccgtccaccccggccagacccaacccacactgtctaccctggtcaggcccatccctcactatccaccccggccaggcctgatcctcactgtccatcccagccaggcccaacccatacagtccaccccgaccagccccaacccgcacagtccaccccatccaggcccgtccctcactgtccacccaggccaggcccgcccctcaccatccacctgcagcacctgctttcctggaccccgatgtctccgatgaagtccttttgggccccgtgccagctcctgctggccctccctcgtcaccaatggcctggcccagcctggaagggtcgttactgacacccaggggttccctgtttcccctggacccctcccggaatctggatctggcgggtgccatccacatcttcctgccctcgccagccgggcctggggcctcgtgccgggtcgccgttctgacaggcggactcttcgactcagccgtcattttggagaggaggagaggacgtttgcgcgattctccccagatccagtgtttcccgtcagccagggcgctcctgtttggggggctcgcttgcctggttagacgcatcttattcacgtttatatgccaaaatgagtccacttcaaggtaggaaaaggaactttgaccagtaagactaattccagttttaacagccagtaggtgcctttgcaaaatttgttttgagtcagaaaacagggagcttgaaagcaaatgaagcatctcatgttaagtttgtacaagtcacggtgagcagagaagcccccacctcgcctctgctgggggaggatcatccccgagaactttggtcttggtctgcaagggcaccttcggggcgcacagcctcccagagagatgctttctatatctgaaaaccgtatcaacagacatcactgaggtcttttcctgcaaggaagggaccttcgccctctcctgggggtcttgtcagagatggctgagatggagccttcgggcaggccggagggtgtggcttggagaaagtagggctgatgctgccggaaagggaccagttctcatggtgggcaggcgttcggtctctcaaactgctctgcactcagatattcagaacccaagtgcttggttctagaattcctcctcgggcatggaagcatattgccgggactggccttggaggtgaggagccggggcggaggcaggttttggggggccacccggcgtttttcttagagcatgaggaagaccatgggtcgcgtggggtgagcgttgtgtgggcctttcttgtggtttgggagtggacaagagtgacgaactctgaggaggacggtgccacgatgggagagagtggcccaccaagtacccagcaggaggagagagagtccaggctggggcgccaggaagacgctcatgggaggagggctggtttcagaaggtggggcaggcgggagagaagatgcacccgggatgagtcctggttgtttgcctgaagacacttggacgagcatcgccataggaagcgcagctgcaggcaaggtcgtgggagagtctgggcaggactctcgtgggtgacaggcaagcgggaaatgataaaattgtccaaataatgcacagtcacaccatttgtccaagtagattttaacattctcgagggagaaaactcccattgcgtgtggatggcctgttcacacctacatttccctaattaaacaccctatgaacaccccaggcctgggctgcatgtgctcttgctgtgtgcccagctctcagggttagcatgtgatcaaagagaggggacagcaggagaaagtggggggcacacagagccaggggcagtggccgcagaggtgccaccagggcaagagcctgagagttcccggtacccaacgccctgttaaagctgccaagtgctgccatgtggggactgccttccttttgtttgggcagtgtgggaaatgttgactcattgaagtgatgttcagataacagaattggagaggaaaacttagtgtagtgattagtccagtgattcgttgttaagaatgctagaaggaaagaacacgtgttattattttaaacgatcagactagcgaagtctatttggaagttctcagtctggaaggaaggaaggaaacagaaaggtgcccagcccttcactcagaagccctgtccgcactggcacgtggtacactttagctggcggcagctcaagagcagacgtggggagttggagaaggtttaagatcaattcacaaatgattaatgacccaaggcactgaggtgcttggcactcctcccacaccttctgaaggtgattttcccaccagtgggactgaggttcccctgaaacaggccccagtgactcttggggagcagggaggacagtcataacgtactcaggtctgccaggggtgttctggatttcaaacctgctttataaagcagatcactggacaaaggatgtcgggttcctgccagcgcatgtaatcagggagtggatgtctcactgtgaaaggccataaaggccagagtggctgtgatgtgtgacagtgcagctctttgtcctagataatgggcatgcctgactttgtcagtaaacacaaaagggattgagtttcctacacaatgtacgaaacatgacgtgtcataaatttgacaactaagatgttagcaagagtagatctgaaagggctttatcgtgcgtttttactacaggtcctcaggaagtaaccgtgaggcctgggtgagacgctggccatgtcttctgggccctaagtcagaaaagactgctgagctgccccactaatggtgcttcctccatgtgccatgaatgccgtgtgcagtgctggctcctacacccagtgttcctcagggttggcaaatgaaacgtatcctgtgggagttgctggcacccctggcccccaggggtcccagccagccttcctgcattgccacttccttcttgggcagcagcccacccaccagagggaggtggcagaaatggttcctggagagaaataaaaggaacccttccttgtaggaacctggagattattgattggctgcatcccacacatttgatatgctgtgttttcatttcaaaaccccaacacaggaccacataactgtgaccagtttacagtttccccacttccataaatacttatcgacactgcctaatataaattataaagttataaattaaagctattaatttgcctcaaatggactgcattagctgcatcccacaaagtttgatatgctgtgttttcatttcattcagttcaaagtattccctaatctttcttttgatttctatttgactaacagggcatttttagaagtttgttgtttaatttgaaatatttggaagtttgctaggtatttttgttattgatttctaatttaattctgttttggcaagatgatatgcttatacatctttaatattttaaaatatattgagacttgtttatgacctactagatggtttacactggtgaatgttccacatgcacctagaaagaatatgtattctgctgtctttggttggaaagttgcataaatgtcagagaggttatgttaggtcactgtgtttttcaggttttctacatccttactggttttctgtccacttgctctatcagttactgagaaaggggtactgaaatctcaactgtaactgtagatttgtctatttcttttcacttctatcagtatttgcttcattcacatattttgaaactctgctatgaagtgcatacatgtttattattattagtctttgaattgaccgctttaccatttgaactatccttctgggttagatttctcattctgaagtctactttgtctgatagtaatatggccaccccaactttcgtatcattactgtttgtgtggtattatcttttccagccttttatttttaaactatatgtgtcattatatataaaatggatttattgtagacaccatcgagttggttgtgctttttatccaatatggcaatctctgttttttaattagagtttccattcaataattgtcagcatggctggctttaagtctttcattgtgctaattttttgccccctctcttctttgtttcttgtttcctctatttattccctgttttgaattaattttttaggctttcattttatcaacactattagctaataaactatagctttctgttttcatttcttcgtggattttatagggtttacaacactgaccttcaagtgacatgataccgtttcacagagcagaagggcctacaacagtagacttctgttttcctcacatcctttgtgcaattgttgtcatagattttttctacaatatgtatcaactccatgataccttgctgttatttctgctttaagcatttacattttaaataaatctaacaaagaaatgttttatatttacctgcataggcaccatctctagtgctgtccggtcctgtatgtagattggggtttccatttaagaccatcttccttccatctaaagaatttcctttaacatttctcatagcgtagacttgctggcagtgattcagcttgggctttacacaaaagtattttgccttcttggggggctattgtggtaagctatacatagcattgcttttaccaccttagccatttttcagtgcacagttcagtggcattaggtacaatcacatgttgtgcaaccatcaccatcatccattggaactttctcctcctccaaagctgaaattttgtccccattaaatactaagtccccatcctccctcactgcagcccctggcagctaccattctactttctgtctctgtgaatttgtctactctaggtccctcctctgagtagaatcacttatttttttgtgactgccttattttccttagcatatgtcttcaaggtttattgaagaatttcagaaccagaatttcattcctttttaaggccaaataatatttcaattccattgtatggatatatcatgttttgtttatccatttatctttttcctttttagagacaggatctcactctgttgtccaggctggagtgtgcagtggtatgatcacggctcactgcaggcttgaccttctgggctcaagcaatcctcctgcctcagactcccaagtagctgggactacaggtatgtgacaccacatccagctaattttttaaaattttttgtaaagtggggtcttgccatgttgcccaggcctgtcttaaactcctgggctcaagtaatcctcccgcctcagcttcccagagcactgcaattacaaatgtaagccaccacacctggccagatctatttatcttttgatggacatttgggttgcttccacattttggctactgtaaaaacatgctgctatgaacctcaatattgagtacctacttttgagtagatacccagaagttgaattgctggagctatgtgataattctgtgtttaattttttgaggaaccaccacactgtttcccacagtggatgcaaatcggaacaagggttctgatttccccacatccttgacaacacttactttctgcttgtttgttttgatcatagccatcctaatgggtgtgaagtggtctgtcattgtatttttgatttgtatttccttaatgattagtgactgttgggcatctcttcatgtgtttattggccatttgtataccatctttggagcaatgtctattcaagtcctttgcccatttttgaattgggctgtcagtttttttgttgttgagttttaggagttctttacatattttagatattattctcttttcagattaataggtgatttgcgaatattttctctcattctgtagttttcctttttactctgttgatagcatccttcagtgcacaaaagttttaaattttgatgaagtctaattcatcttttgtgtcatatctaagaaaccattgccaagtccaagattgtgaaaatttaccctatgttctcttccaagagttttatggttttagcccttatatttggctcttttatccattttgggttaatttttctatatcatgtgaagtagctgttcactgattttcctctggttgtagatcacatttcttgcttcttgtcatgtctagtaattttttattagatgctagacttggtgagttttatactaatgggtatttagctcttgtcgtctttgtttagagagtgttagatttgttctaataggaagttaacgtgctttggcacaattttatcctttggaagcttgtttcaccacctcactgccttggctccctcttggtaaaacggggtgagagggctgctgtgaggtcatcacaatgatgcatgggaggcctgagcatgcctggatcaccaccagtggctccactgtcacccaattgaatcatggccaggaattcaccaggaaaaagagcccagtagaaattgggaggtgctgtgtcttttccacgcctggtgaacatcctgggccaacacttttctggtcctcccaactattatggcttatgaaacacctgcacgtaggcctgcacttatgccccttcccggatgtcctttgatggtctcgcctgccctgccctcagaagcatggacatgctgggagacgcacagctttcccctgctcctggcatggctggttcccatgctgtggtcagctctggggacccctcttctcaggttgacagcactcaggagtgtccggttctctaaattgtctgtgggttttcaaataacctcaaagcacagtgactttctaatctcgagaaggggctcgacccagtgtgtcaaggtgctgcgtctgaagttgctttcatgtttaatgctgagccagctgtgtgtgctgtggacgcaaccttgtgagaaggccctgagtggggcagcgcactttccctgggcctccccctctggtccaggagggcctgtgccatgtatgggcattgactgagtttgccttttctccaggcacctgggcaaggggagagggtgtgctgtctggtctgggtgtataattcatgcacgtgtgtgtgtgaggcactgaggctgccaaggcgtgggcgggtggcatgctggggtcagtgacaccatgggcagtgagggaggagtggtccgggctgcacaaagttgctgggaggcctcagaagctctcagtgatgagaccttgctgggggagcagaacgacggggactggccagcaggggcagagcctggtgtgtggcaggaggagtgagaagaaggccctgggagtccccactgccccaggaagggcaggcgtgacctccaccagctcagacaactttccctgcacagtgcgggtgacggatagcctcttgactgagcggcttgcccttggagaagagcagagaatggtggcgatggtttcagtggtgcagccatctgcccacccggccaacctggggcctgtgccaacctggggcctctgcctgggcgccctccaggataggacggaggcactgtccagcgctttcagggctcgtggggccttccctgttggcaacagccagggtgtctggagtttgaagagccgaattcctgggacatggccctggaatgccttgcagctggtggaaagctccccaaggctgcattcggccgggctccaccatgggtgtcaggttttatctcctggggacctcagtggacccacaacagaagcaaacctgggcagtgggagctcctttcataacgcggcttctgtctgtcacagctcctgactctacggtggcagcggcacggctgttacagttgtcttggccccaagtcacagtctgcagtggtgacgcagctgactgcatgtagcctggtgcatgttctcccacagagagtgtcaccaggatggaatgagttcccacagacagggggcccaggacctgtgcctggggcaaggagcacagccgatggtcagctccatccctcaccctctgttctgccctttctgagggatccttcaaaaaacagtggaactgcgagtgattcctgctggagcagagtcatccactgaatctgttccttgtggaatcctcatagcagcaggggctgtgagcaggtgtcgtgagccatcccctcagaaaacagtgctggctggtgcctgtgtgcctggcattattgctagagtttgctcggcctcatccctggagagggaccctggggctgtcttgtgggcagcagtgggtacccagcagcgtgggcagcactgtgggcagcggtgggtacccagcaccatgggcagcactgggcagcggtgggtacccagcaccgtgggcagcactgtgggcagcagtgggtacccagcaccatgggcagcaccgtgggcagcggtgggtacccagcaccatgggcagcactgggcagcagtgggtacccagcagcgtgggcagcactgtgggcagcggtgggcacctagcaccgtgggcagcactgggcagcagtgggtacccagcagcgtgggcagcactgtgggcagtggtgggtacccagcaccttgggcagtactgtgggcagtggtgggtacccagcaccttgggcagcactgggcagcagtgggtacccagcagcgtgggcagcactgtgggcagcggtgggcacccagcagcgtgggcagcactgtgggcagcggtgggtacccagcaccatgggcagcactgtgggcagcggtgggcacccagcaccatgggcagcactgggcagcagtgggcacccagcagcgtgggcagcactgtgggcagcggtgggtacccagcaccgtgggcagcactgtgggcagcggtgggcacccagcaccttgggcagcactgggcagcggtgggcacccagcaccgtgggcagcactgtgggcagtggtgggcacccagcaccatgggcagcactgggcagcggtgggtacccagcaccatgggcagcactgggcagcggtgggcacccagcaccatgggcagcactgggcagcggtgggtacccagcagcgtgggcagcactgtgggcagcggtgggcacccagcagcgtgggcagcactgtgggcagcggtgggcacccagcagcgtgggcagcactgtgggcagcggtgggcacccagcagcgtgggcagcactgtgggcagcggtgggtacccagcagcgtgggcagcaccgtgggcagcggtgggcacccagcaccttgggcagcactgggcagtggtgggcacccagcattgctcagcaacttccttttggtttctgtggctccttttcttcaaagacccaaggtgccctccgcctccgcagctccagtgagcaggggtgccaagggcagatggtgaggcagggcttcctgggcctcccacgtgctccacgggtttcaagggcggccctgacacctctgccagggcctgtgggccagacctccctggaaggcatctcttgtccatcagactggatgctttctgccctgctgagatggggagggcaggtccccggacaagctcagccgtccagttccaggtgggttgacagccacccacagagtcccccgctgactcccctctgcagacgtggcgtgctgcacctccaccagagccatggcatcgacgacctggggcctccgcggtggcagctcacagcctgcctggtgctggtcatcgtgctgctctacttcagcctctggaagggcgtgaagacctcagggaaggtgaggctcgggggtcaccaattgggcctgtagacatggggccaccaagtggacatgtggccgtggctggacaggaggtgcacgtgtggcctcagttgggttttgtgctaccaatgtggccatggccaggttggggtggacacatggccatggttgagtttgggagactcatatggccataatcaggttgggagtgtacacgtggccatgattgagggtacacctgtggctgtgccgggttggcttgggtagacgcgcggccatgggtgggtggggggacacgtggccgtggctgggctgggcggacacacggcacagttgggttttgggtccacgtgtggctgtgtttggggaagggcctcaggagggaagcactcacagcagtgtttctggcaggaaggcacacacaagatgatttttttgttgataaaaatactttgggaggctgagacgggcagatcacctgaggtcaggggttcaagaacagcctggccaacatgatgaaaccccatctctactaaaaatacgaaattagccaggcacggtggcacgtgcctataatcccagctacgtgggaggctgaggcaggagaattgcttgaacccaggaggcggaggttgcagtgagccaagatcatgccactgcactccagcctgggcaaaaagagcaaaactccatctcaaaaaaaaaaaaaaaactttggttgttatatgggccaaaaccagttttgaccaagatacgactcctcccttggaaaagtgcgtgtagtatggcaccagccacgggagcctcccgcagggacacagcccagagcagcccttcatcgtgccacagtgccgttcaccagtgtgaatccactcacgtcccacgcatcagaaaacccccatcagccactcccagctactctggcggaccgaatgcagaaaaggaatgtgctttccctgccaagttgttcttccctttccatccctggggagggtgtgcaggacagaaagtgtctgaccttctcactccaaggagcatttgctgagctggcgtcccaggaaatgtttgggaattgggcctcccaatcagaggacaagccgtcagggcaacccggtgcccttgtgccagtgtctgctcccaccaagggccctgcctgtgcagcctggtgacactgtcctctcctgcaggtggtatggatcacagccaccatgccatacgtggtcctcactgccctgctcctgcgtggggtcaccctccctggagccatagacggcatcagagcatacctgagcgttgacttctaccggctctgcgaggcgtctgtgagtacagtctgctcactgcttcacagtccacaggggctctggcattcccaggtttccatatgcattgcctgccagggctgagaggtgtcagagttgcagacaccagggttctttcctcgggaagccaaatcccaagtacctgtgatacagcacgagtcatctaaatcaaattacatcagaaactccatctagactcaggctgcagctttggtcagcaaaagaagacataattcagggttaaaatatttggagaaagcctcccggagagaggagactcagctgggccatgggggatgggacccttgtccagaaagggaggagaaagggctgcacccttcctggcaaacaggcccagaaacagaagcagctgttggcggaaggctggcatgacaaaaatggcagctcccttggggcatcgttggaaatcaggtggactaagtgggggaggtggcaggccccaaagccgcccaggggcatccatgttgctgtgggaggacaatgcagcaagaggggaagggccatctcagctggggtatgaggcaggaggccgttgagaggtgctgccctgtgtgggtgggccggtggagccaggtctgggggtcatgaggcaagtgtaaacccaaggcagaagtgggaaggaaggggagaagggatgggcgggcatggctgcaagcctcccaggaagccccagggaggcagcagctgacaggtgcagtgagagagggcacctggacatggcacctatgaggctgcaaagcagttgggtgggggtgggggtggaagtgtgcctgcagcactgaaggggaagccctgtggagacaggagccatgggtgcagcaggcgtgtggcccacgggagccaaggaagagagaggaggacaaccagggcagcaaaatcagctgtggccgggggcccacaagtgcagagctggagccagacaaaccatgaagtcagcagggcgtctggaccccagaaaggccaaaatgaagccaaggggtgtgtttgcaggaccatggcatgttacagaatcaaagaaaaataccacaaggacaacgtagagcctagtgctccagctaggaagaataggcagccccaggaggaggcaaaacaaacaccagtgcatgtgaaaagatgctcactggagaacaaattacaaagatgagatgtcagaaattaggtggagacagtgaatagattggatggatggatggatggatggatggatggatggatggatggatgaatgctaggtaagtaggtggataggatggatggatgataggtgggtagatagaatggatagataggatgggtggatggaaggctggctggctggatgtatggataatggatgggtggatggaggaatggatgataggtaggtagctggatagtatggatggatggatgatggatggatggatggatggatgaatggatgatgcatgggtgaatgggtggatgaatgataggtagctagataggatggacagatggataatggatggatgatggatgggatggatgggtggatggatgatgggtggattgctggatgatggatggctgggtggatggatgaatgataggtaggtagctggatagcatggatggatggatggatggatgatgaatggatgatggatgggtgaatgggtggatgaatgataggtaggtagctagataggatggatggatggatggataatggatggatgacgggtgggtggatggatgatgggtggattgctggatgatggatgtttgggtggatggatgaatgataggtaggtagctggacagcatggatggatggatggatgatggatgggtgggtggatggatggatggatggatgatgggtggattggtggatgatggacagatgggtggatggatgaatgataggtagctggatagcatggatggatggatcgatgatggatgggtggatggatggatgatggatgggtggatggatggatgataggtaggtagataggatggatatacaataggatggatggagatagatacatacacacacatgtacttcatatattcatagatgatagacagttgatagattatagagatgacagatagatgatagattggtgatggattgatagatgacagtgatagatgatagatagatagatgattgattgatagataatagatgatggattgatgtatagtgaagagaaatcaggaaagaaatggaaggaaaggacaattgcaggtcctggagtgaaagtgcatgaggtgaggcccagggaggcagccatgggcactggctctggtgtggcactgggcagaggcctgagctgcacacacagatcagggtgaggaggaggcaggcgctcccctgtgacacctgatccagcctgcagctacctggccaggcaggtggctgatgaccagcatgggagccacatcagggtatgagcctctccacccactgcccacccagccactctcggcttggctcctcccctcatgctgaaacactggccacctgcagagtcctgactgcggggcctggccatctgcctccaaacacactgtcccaggaactggggttgccttgaggctctgacatgctgcccaaaggacagagggccccgccccctctgcagcacccagttcccttgctcagtcaagctcaggcaagcttgacctgggacctgggatgccctgagacccacctggcctccccagcaggagcatctggtgtctctgcctcagcatcctggcccacaggcctgtaccatgggctccagggacttgcaggaacagccctaactgaccagtccctcaaatgcctccaagggggggttggctgctccttctcccccatccaaggcccagggaagggcaaggtgggcatctgagtcactgaatggtctccgcagtgccctcaccttagcaggttgtggctgactttttaaaataccacaatggtccaatcgtggacccacccacctttcctttcacgtccagagttgtgggtgccatccaccgagttgggcaggcacagcaccagtgtctaagctgcaggtgggctcctggccatgcccaggtgccactgtgcacctgtactgctcatgttttgggaaggatacaaagcaggcattgctggtgtgcgtccaatcaggacaccatcatcatgtagcatgtggatgggtccatgcctttctgagggttatcagggtgctgccatcatgcagcatgtggatgatccatgctgttctgagggttgtcagggcgccaccatcatgtagcctcaggatgagtttatgttgttctgagggttatcagggtgccgccatcatgcagcttgtggatgatccatgatgttctgagggttatcaggaagccgccatcatgtagcctgtggttgagtctgtgctgttctgagggtttcagggcactgccatcatgcagcagggcgcacatgggatggggggacacactcagggggttgtgaagctggaccctgatcaagggaggatggagaccccgctagggctggtgtgagtgtggataagtccatgctgttctgagggttatcagggcgccgcggtcatgttgtgtgtggatgagttcatgactttctgagggttatcagggtgccaccattatgcagcatgtggatgaatctgtgctgttccgagggttgttaggacgctgcggtcatgtcatgtgtggatgaggccgtgctgttccgagggctattaggacgctgcggtcatgttgtgtgtggatgagtccgtgctcttctgagggctattaggacgctgcggtcatgttgtgtgtggatgagtccgtgctgttccgagggctattaggacgctgcggtcatgccgtgtgtggatgagtccgtgctgttctgagggctattaggacgctgaggtcatgctgtgtgtgggtgagtccgtgctgttctaagggttattaggacactgtggtcatgttttgtgtagatgaggccgtgctgttccgagggttattaggatgctgtggtcatgccgtgtgtggatgagtccatgctgttctgagggctatggagcagggcacctctggttctgtggaatcgctgccttgatactccatggggaatcccagatcaatgaacacagacagccccctgcttctcaggctcttccaggccgctggcccgggagggttcacttcctgaggctgcatcttccaccagtcgtctgctgccatttacttcttgaggatggtgttgagtttagaggcctcagtgtggggctgggacaggaagggtgctcaggtcctttgcctgtggcctgcgttctcctgggacagcctctcaccgccctctggctctgcaggtttggattgacgcggccacccaggtgtgcttctccctgggcgtggggttcggggtgctgatcgccttctccagctacaacaagttcaccaacaactgctacaggtgagcccctagcagggccaggcaggggcctcatcaatactagggagaggtcgctgacttccagaaatagggtgtccctggatgagaacagggcggatccactgaacccgcaaacctgtgagctgcgtggcctttcagacagaagcgacagcgaggcagctcccaacacgattttgatttcaactttaaagaaggcactgaagccagtgggtgtgtcgcctcctgggagggacctgcctaggtttgacctgcggccagattccccactgagggccccaagtggcaaggccagcccctccctccacaaggacacaccctcttccctcacaccagccccggggggtctctgtcctccctcgctcagggtccagcttcacaaccccctgagtgtgtccccccatcccatatgcaccccgtgttacttactggcaggcacctgaagccccgtgccggaccccaaatccttctaaaaacagaaacagaattttatccgggatctgcttgctttgacctttatggacttgtgcttactttctttcacatcatgaggctagaaacacggtaaaaatacaaggacagtgtgtgcagcagaatggccaggcagaccacaagcaggcttcactgagagtgggcgctggaaggcaggtcctgaggcagcgcctgcccgcagcccacctgcgtccacctgggtccaggtgctctgcagatgaagtgtgtggtccttccaccccagtgacaggccacacaggaacccaggaggaggacgctggtgccctgaccgaccccaggaccctccctcttcgtcctcggcttgcctccagctctctggtttctcagccctcagagtggggcccccaggcccgcagcaccagcgcccttgggagttcatgggaaacacagcccccgagaccccatgagacccgcccagtcaggatctgcatcttagcgaggtccccgggaggtgtgtgctcctagagcttctggaagatctgccctgggtgaggtgtccacagcaagactcgcggggcacaggggtggccgtctgttctgcccaccctgagccttgatggctgagccttgagcagctcagctaggggaccaaggtggcccaaggacagctctgccaggctgctaaggagctggccgtgctcactgggaaaagtagcccctccgaagacctcccgcccccttccccagacacagtaaattaagaataatgactggaaaattgcagctgctgcagctcagctggttcctgagacggcgtgtcttgttcttacagggacgcgattgtcaccacctccatcaactccctgacgagcttctcctccggcttcgtcgtcttctccttcctggggtacatggcacagaagcacagtgtgcccatcggggacgtggccaaggacggtgagcccctcctgctgcacctgggcctgctccgtgtagcaccagcgccgagctctcagcaaagcctttttccttgtgaaagaggaaggagacgcatgggccctgagcgacttcagtgagagttgctgcctcactcttgaaggatggtggtacacatcccagtacagacctgcccccacccagcgccttccccgccctgaccctccaggccccccacccagcgccttccccgccctgcccctcccggccccccacccagtgccttctccgccctgcccctccaggcccccccacccagtgcctttcctgccttgtgcctctcggggcctccaccctgggctggggaacctcaagcccaaatgcagctgagcagcatagttggtgcctcagtccctcgactgctccctgcagatgccacatgaggctgccccaccagggtctggcgtagatgctgtcactgagggccctctagatgtttgcttgccacgcggtgtgggaacatgcagctcagggaaggggaggaatgagctgttccagcaacacctggaggcaggctgggatgccgcaaacatcagcttggccacagagcagccgggagatccctggggcctccagcacagggtgtccctgcccgctccccaggccgacgcatgacgctgagtgtccctgcacgcctggagttgtctccgagagggtggggaggggtccaggtctcgggcaggcacaggtgagtggtggggggaggccttggccacagcaagaagtgtgccaggcaggatggagccggcaggacgggcacagatgcaggggctgagagtgggcccaggcacttggggccacgtgcctggctccggtgcttgcagtggaaagctgtggcgttggcagccctaacttgggccaaccgagagctccagggagtcccaaggcttctcggtctctgtcagccagcagagcccccgcctgcctcccggcctgctctgccacatggatgtggaggaggccctttcgctccagacacgggcctgggttgggtgggctcccatgctgcgtccccatccttgcttcctctggactgtcttctccgggggtggggtgggggcactacatttgtgaggaatgattgtgctcagaaaagcccctgtcccgtgtgggtgttgttgctgactgatctctgcctgggtgttgaggctcagtgaaggcggggagcgacaagcaccaagcgggggcagccttgaccgcacctgagtctcacagagtggggcactaggaccctcgcaccgcaggtaggaacacgctcagagacctgaaagggcccactccatgcttgcaacagaaagccagggtcggggctggagccacagctcagaggtgggcctcctaagcccatgttctttccactaggaaaaaaaattcagtcaaagcgggagaaagggaacatctgcaaataaatgcagagcagtgaaatttactcggtgccgcatttatgccttttcttcattctttttgccctttattatgataacgagcatagtttgcaaaaacctctattaacccctgaaaataaagttgaatgttcttctgtgcatttcatgacaagcaaagtaaatgtcatttacagccttaattctcaagaaaatagggtgaaatgttaacttaggtacagaaacgaaggcacgggtgttgacattacattccctgagctgatgaatatcttcccaggctcctggctggtaccatctaagccccggaacatctcaggcgagcctgcctcccccaccccacgcggaggctgtccccatccaccagggtatctgggagctgcgagagcccaggtctgaccccgctgcttggctgatagtgaggcccctgaaagacctttaggaacggcccctggctctggcctttgattatttaaaaggccaggcgcaggcctattcctgcaggctagggccagacacgtgcctgctgaggacaggggactctgttgcaggcagattgggcttgggag

SEQ ID NO: 700 - DNA, 7876 bp, Homo sapiens
  source 1..7876: mol_type = other DNA
cggacctccacactgagccatgcccacccccgacgccaccacgccacaggccaagggcttccgcagggccgtgtctgagctggacgccaagcaggcagaggccatcatggtaagagggcaggtaggtgcccggcggccgcagtggaccggagcccagggctggtgccagctgcctctgctactccccagcctggctggcagccccaggctcagggtccatgcaaacccctgggacgcggcgtggatgtggaggcctgggcacagcggcatcccctgtgcctggtgtttgagtccctgttgggggagggtgaggtgatgcctgtccctgtgtgtgcccctcttaggccgacctctctcgggggtcgtgtgggtctctgtgtcttgtttcatcttgaatcttaacgatcggaatgtggaaacaaatccatccaaaaaatccaagatggccagaggtccccggctgctgcacccagcccccaccctactcccacctgcccctgcctccctctgccccagctgccctagtcagcaccccaaccagcctgcctgcttggggaggcagccccaaggcccttcccaggctctagcagcagctcatggtggggggtcctgggcaaatagggggcaaaattcaaagggtatctgggctctggggtgattcccattggcctgttcctcccttatttccctcattcattcattcattcattcattcattcaccatggagtctgtgttccctgtgacctgcactcggaagccctgtgtacaggggactgtgtgggccaggctggataatcgggagcttttcagcccacaggaggggtcttcggtgcctccttgggcactcagaaccttgggctccctggcacatttaaaatgggtttttatttatggaccttgattgaaatgtggtgtgagttgtagcagtgtcatttccaggtaccttctcagggacacagggcgccctcccccgtcctcccccgccctcccctaccctcccccaccaggctccccatcaggcatcccctccccagggcgccccggggcccagcctcacaggctctccgtggcctggaactgcagccccagctgcatcctacacccccaccccaagggtaagtaagaggggactctgggaggggcttctgctgctccccttcatgttccacaaccctggaagctcaggatgaagctgattcttctcttacaaggggcccagagccttcttgggagttcagctccaagggatgagccccaggtgtctgccaagtccccctctgtccaggcctgggacggctctgggatcgaggggtcagaggcgctgagcccagggagagacacctgcgcccagagctatgacaaagggtggagggatgacaaggcagccaggagcgggcgcctgcggggtggcacagaggggcagggcccgaggacaggtgtcctgatgggagtgtgagaaagggtcccctgtgcggcagccaggagggtaggggggttgttcactggggccctgtgggggcagctccttcctgagctgccgttccctccccggcagccgatgccactgtccatcaagacatcgccctcttcccatcactaatccagttagcgcctggcctggggatgagtgacacagcgtctctgtctgtctgctcgccacagagtggggagcaggcgagcaccttcccagcccccactcctcccccaccaccactgcttctgactgggctgcccccatcgggaagggcgtgcaatgcccgcaggcacctcggctagcatctgccccagcaggcacacagtaggcgctcaaaaacgtgctctcatcccctgcctctgtgtgccatcagcgctgcccgactgtgggaccagctgtgggtggaggtccccgggtctcagcaggtggaggaggcatgggtgccccttgtccccacagtccccgcggttcattgggcgcaggcagagcctcatcgaggacgcccgcaaggagcgggaggcggcggtggcagcagcggccgctgcagtcccctcggagcccggggaccccctggaggctgtggcctttgaggagaaggaggggaaggccgtgctaaacctgctcttctccccgagggccaccaagccctcggcgctgtcccgagctgtgaaggtgtttgaggtgagctggtggccttcgtgtccctggggcaagttcacctgtgggtggggctgtgtgggctgagttcctgacccctctatagcagaggtgcagctgcccaggcccccgaggccggcacaggatgcagcaggggagtctcaggcctcagctcagcccccatggcatctagccacacccccgtgtttttgagggatcctgagcccacccctagggctgaggctaccaagccccactgtgcctcttgccttgcccatcccctggatccccctcacccaccatttcccacgtggggggctcccagcagggcagcacaagaggcaggggcagggcagtgtgccctctcccacccacccagcacagtggctcaggtgaccactgattgcattagtcactccggccccactgtgccccgggaggcaggtgacccagctcccggaagaagctcccaaatgacattaaagccagactccccgccccccagctcccagagccagttttgtggcccgagggccactgcgacccaccgcccttgttgctaggcaacaggaggtgggggtggagcggacccttctggccagtgtcctggacgctcaggggccagtgagactcagggcccatcctacaaacctggatgaggccaccagggttgggggcaccttctgaccagtggctgaggagccggactgtgtggcatggccttgggacacacacaccgagccgcccagaaccaggttaagcctcaagcggtgacaactcctggttaggcacgtaacacaaaatccaacttgccagtggcaaaccctggcctggtggccgacagctgacctgagcctggaagaacgggatctgtgtgctgctagcacaaaagtcaagggcagggcctggccagccagccagatgtgcctcctccccgcccaccccaccctctctctccatctctgtctctttctccttctctctctcttcctgcttttgctccctaagacgtttgaagccaaaatccaccatctagagacccggcccgcccagaggccgcgagctgggggcccccacctggagtacttcgtgcgcctcgaggtgcgccgaggggacctggccgccctgctcagtggtgtgcgccaggtgtcagaggacgtgcgcagccccgcggggcccaagggtgaggcggttttctgtccttgagggccaccaaatgaccttgagaggctggggtgcaggggctcctgcagggggaccctacagtgaccacgtggtggtggcctggttccctctctgcgggctccactccgcaccccgttttgctacacatccgtgtccgggcctggggccactccaggatccccccgcagctctcacagccccggctgcctctgccccccggaagtcttgtaggggaggctgcttcaaggtgggtgacacagccccacggctccgagctcaccaagatctcttcctccatcacccataaagtcccctggttcccaagaaaagtgtcagagctggacaagtgtcatcacctggtcaccaagttcgaccctgacctggacttggaccacccggtgagtggtgcgcccctcactcaggcctcctgcccctgatcacatcccctacccttagcccaaccctggacaggagtctgtcggctccaggagcctccgtggcctgtgcccccaccccagcacagcctcctgacccgtgcatcccctctgccctcagggcttctcggaccaggtgtaccgccagcgcaggaagctgattgctgagatcgccttccagtacaggcagtgaggggcccctgcgctcgggacccagactccgtcctgcaggctgacgctggacctggggggtgggagggaaggacaaaggggaggacccatcttgtcaccagcatcagtgcctcctgccaggcagctctgctccagggctttccatgtccccaaatcccagtggggaaactgaggcccaggggggctagagcaacctgccgaggccacatagccggctcacggcacagtcagctggggtgcaccctcctgtccatcctccaacccaaaggcctcgctgcactaggcgggtgtggacctgtgcccagtgaagctccctccctccctcctgcccttctcactccccgaggggacctgctgaccactggccccctccccagcggcgacccgattccccgtgtggagtacaccgccgaggagattgccacctggtgagacctccgtgcagctaggggctggggaggagcccgggggatgcctcctggaatcctggcgtgtgagggccgcctccagggaccttggcacaacaggagagactaaggccgggaagaagagggacttgcagggctcagaatgttgggttgggaggaagaggctacccatcctgtcgggccatccccagtgtgctgagggaccgcccctcatggccccctatcccctgggattccctaaagccaccagcaaaagcccctcccgggggcctgggtcttcaggggtccccaagaggcctgcgttggtaggggctcaggcaggcagaggcacccacagttcaggaggggggtttcgggcactggggtggggcattagagggccctgagcctggctgcccgcaggaaggaggtctacaccacgctgaagggcctctacgccacgcacgcctgcggggagcacctggaggcctttgctttgctggagcgcttcagcggctaccgggaagacaatatcccccagctggaggacgtctcccgcttcctgaagggtgtgcccagacgggaggggcgcagagccggggggccggggatggtcagccaagcgccccaccccagcgcggctccagcccgtcccggctcggcagtgacccgcgtggccccttgcagagcgcacgggcttccagctgcggcctgtggccggcctgctgtccgcccgggacttcctggccagcctggccttccgcgtgttccagtgcacccagtatatccgccacgcgtcctcgcccatgcactcccctgagccgtgagtgcgcgccctggccgccagcccgagggtggggggtgcgacgggcggcccctcagcccccttctccctcctacgcgcagggactgctgccacgagctgctggggcacgtgcccatgctggccgaccgcaccttcgcgcagttctcgcaggtacgccgcggcctcggagggagccggggtcacccaggggctggcttggcgccgggggcgggcggggatcgatgtgcgggtgggtgaagtgtgctgcctgctcccgggccccgccaaggaggctcggcgccccgagggtcgcgcggcatagggcggggctggagcggagcctcccacggcctgtgctgccacctgccggctacctgggaacggcgcccacgggcttaggaatgtggtcaaggagggctgcctggaggaggaggcccggtggaggtgcggatcctgggcggccagggaaggtctctgccgccagggaagtgtcccagagacccctggaggggctgctgacacccccggtgcccccacctcgagcatgacccagggctgcctctccccatccttcatcctccctgctccacaggacattggcctggcgtccctgggggcctcggatgaggaaattgagaagctgtccacggtgggttgacccctccctgcagggcctggggtgtgggtttgggggtctgaatccaggcctcaccctcttgccgtccaggctgaggcctctccttccacccacgaattgtgaccctcaccctggcctgcctgcatcctggcctggcctccctgggggtggtatcctggtcacgggtgaccaggggctgcccggtgggcggcagctgtctctgggctgatgctgcccggcttccccgcagctgtactggttcacggtggagttcgggctgtgtaagcagaacggggaggtgaaggcctatggtgccgggctgctgtcctcctacggggagctcctggtgagagtctctccttgctgcagcccccagcagaggggcagggctgggggacggtgcagggaggggacaggctcccagtgggaggaaactgaggcctggacctccaggactcaggctctgtttgggagaaggcttgtctctgcccagtcctcaccccacattatcccaggcctccgaaggcccggcgggggagatgggggtgactctacccaaggaacccacccagcgtcaggccacggtgccccagttccctcggggacctgggtgcagtggagtcagtgatgccattggcctcctgccagcactgcctgtctgaggagcctgagattcgggccttcgaccctgaggctgcggccgtgcagccctaccaagaccagacgtaccagtcagtctacttcgtgtctgagagcttcagtgacgccaaggacaagctcaggtgggctaggctgctagggcaagccccccatggtgcccccaaactgggccagccaggccttccttctggccttgagcagggctggacctgtgagcccaggtcacagatgagaaaaccgacccctggttgcagcagcccccacacagcagggacaccatccgtgagaaggaccccagcgtctggggaggggcagacctacaggactgggggctgctgggtggccgggtcaaggccagtcttggaggtgctgacagagcctgagctttgtgaggacgtcctgtggaacctgtcccggccccctgccctgggatggggagaagtcagggggatagacagagtcaaggtgggggacagggcgggagtggggtccccagggctgggggcctttggtgcagtgaccagagtgtcaggagaggggagcaaagccctctagcctcatcctcataaaaggtctcatcattttccctccagcctcttatgcactggggaaactgaggccaggggctatgtgtccagcggacaggggtgctgaattccacccacaggcttagggatatggtcaaggaaagcttcctggaggaggcccagtggaggttcagggagggatggggtgcccggcagtctctagtggaaaaggcgcctagcctatctcccccatgaaccccctcacccagccctggaagaggcctcagtgtcccgcctgtgaccagttggctcagaaaagccctgggagctctgagccactgtgaaggtggaaacgcggcccctggcctcccctctcctggaggctgcagactctgcccgccagttgacgagggctctgccgctctcctccccaggagctatgcctcacgcatccagcgccccttctccgtgaagttcgacccgtacacgctggccatcgacgtgctggacagcccccaggccgtgcggcgctccctggagggtgtccaggatgagctggacacccttgcccatgcgctgagtgccattggctaggtgcacggcgtccctgagggcccttcccaacctcccctggtcctgcactgtcccggagctcaggccctggtgaggggctgggtcccgggtgccccccatgccctccctgctgccaggctcccactgcccctgcacctgcttctcagcgcaacagctgtgtgtgcccgtggtgaggttgtgctgcctgtggtgaggtcctgtcctggctcccagggtcctgggggctgctgcactgccctccgcccttccctgacactgtctgctgccccaatcaccgtcacaataaaagaaactgtggtctct

SEQ ID NO: 701 - DNA, 3488 bp, Homo sapiens
  source 1..3488: mol_type = other DNA
ggctcgctgcctcgcattgccacaggctcctgagaggtcgcgggcagtgcctgcggggaggcgcggggccctgctctgtagggctgaaggccgcccgaggttcgccaaggctctgggctctcgaaaggaagccaagaaaagaagctgcccaggtgaccagtcctgggagtgctctctcccaaggaagctccgagcgcccaggagcccttagccggggtctagtgccctttgaacaatctccagctcttcaaggaagtgggctgccgccgcctctcttgggacctggcctgggatcctttccccaaacgcaccccggcgatttttgcgcaccgggagccgaacccctgctgcgcgcagctggctgggctcaggcgcgcttcctcaacgtttcggagccgctgcccccagcgaagtccacattccaagctccaggggctttgagagagacgaccccaaggcaaggtaggtggctcggacgggctcgccctgggaattattaggttgggcttgacgtgagtaatgatgccatctgcttaagtcttggagaaagaccgtgtgttttccttttgctttttaaggcgtttggagagctgctgaggagccaggggcttggaggagcgagaagacatgtattttcagctgagtctcagaaggggagaatctcctgtcaccaccagaaaagcaacagccccgaaatgtgattgcaactgactagcagagcagaggcccaggagtcactggattgatgatttagaatatgctaaaaagccagtgctttatttggggaattcaggggctttctggtgcccaagacagtgacctgcagcaagggagtcagaagacagatgtagaaatcaagagtgaccatccacgggattgacttggattgccactcaagcggtcctctcatggaatgttggtgaggccctctgccagggaagcaatctggctgtgcaaagtgctgcctggtggggaggactcctggaaatctgactgacccctattccctgcttgggaacttgaggggtgtcagagcccctgatgtgctttctcttaggaagatgaggactctgaacacctctgccatggacgggactgggctggtggtggagagggacttctctgttcgtatcctcactgcctgtttcctgtcgctgctcatcctgtccacgctcctggggaacacgctggtctgtgctgccgttatcaggttccgacacctgcggtccaaggtgaccaacttctttgtcatctccttggctgtgtcagatctcttggtggccgtcctggtcatgccctggaaggcagtggctgagattgctggcttctggccctttgggtccttctgtaacatctgggtggcctttgacatcatgtgctccactgcatccatcctcaacctctgtgtgatcagcgtggacaggtattgggctatctccagccctttccggtatgagagaaagatgacccccaaggcagccttcatcctgatcagtgtggcatggaccttgtctgtactcatctccttcatcccagtgcagctcagctggcacaaggcaaaacccacaagcccctctgatggaaatgccacttccctggctgagaccatagacaactgtgactccagcctcagcaggacatatgccatctcatcctctgtaataagcttttacatccctgtggccatcatgattgtcacctacaccaggatctacaggattgctcagaaacaaatacggcgcattgcggccttggagagggcagcagtccacgccaagaattgccagaccaccacaggtaatggaaagcctgtcgaatgttctcaaccggaaagttcttttaagatgtccttcaaaagagaaactaaagtcctgaagactctgtcggtgatcatgggtgtgtttgtgtgctgttggctacctttcttcatcttgaactgcattttgcccttctgtgggtctggggagacgcagcccttctgcattgattccaacacctttgacgtgtttgtgtggtttgggtgggctaattcatccttgaaccccatcatttatgcctttaatgctgattttcggaaggcattttcaaccctcttaggatgctacagactttgccctgcgacgaataatgccatagagacggtgagtatcaataacaatggggccgcgatgttttccagccatcatgagccacgaggctccatctccaaggagtgcaatctggtttacctgatcccacatgctgtgggctcctctgaggacctgaaaaaggaggaggcagctggcatcgccagacccttggagaagctgtccccagccctatcagtcatattggactatgacactgacgtctctctggagaagatccaacccatcacacaaaacggtcagcacccaacctgaactcgcagatgaatcctgccacacatgctcatcccaaaagctagaggagattgctctggggcttgctattaagaaactaaggtacggtgagactctgaggtgtcaggagagccctctgctgctttccaacacacaattaactccgtttccaaatacattccagtgtattttctgtgttgttcatagtcaatcaaacagggacactacaaacatggggagccataagggacatgtctttggcttcagaattgtttttagaaatttattcttatcttaggatttaccaaatagggcaaagaatcaacagtgaacagcttcacttaaaatcaaatttttctgggaagaaaatgagatgggttgagtttgctgtatacaaacaggtgctaacactgttcccagcaaagttttcagattgtaaaggtaggtgcatgccttcataaattatttctaaaacattaattgaggcttacagtaggagtgagaaatttttttccagaattgagagatgttttgttgatattggttctatttatttattgtatatatggatatttttaatttatgatataataaatatatatttatcatatttaataggataaattaatgagttttatccaagaccttacaaccacatttctggccatttaactagcactttataagccaatgaagcaaacacacagactctgtgagattctaaatgttcatgtgtaacttctagaaacacagcagaaactgatagataagggaataaagttgaaatgattccttaaaattcatggacacagataaatgcaaggtgagaattgacaaatgctataaatgctttctttttctgaaaagattttgaaaaatttaaaaaagtatagctactactgtgttcaaaacgttttaaatgacaaatgactttcccaggggaatttgcagttctgtaaatatcttaaataaaagccaacttaagaagagcccagcattaaatttacgatcttaggtggtaatgaaaagtatatgctgctttgtatttatgtaaaataattggccctctccatcttttctcatttcatgtgtcaggtagtttttctg

SEQ ID NO: 702 - DNA, 2041 bp, Homo sapiens
  source 1..2041: mol_type = other DNA
cacataacgggcagaacgcactgcgaagcggcttcttcagagcacgggctggaactggcaggcaccgcgagcccctagcacccgacaagctgagtgtgcaggacgagtccccaccacacccacaccacagccgctgaatgaggcttccaggcgtccgctcgcggcccgcagagccccgccgtgggtccgcccgctgaggcgcccccagccagtgcgctcacctgccagactgcgcgccatggggcaacccgggaacggcagcgccttcttgctggcacccaatggaagccatgcgccggaccacgacgtcacgcaggaaagggacgaggtgtgggtggtgggcatgggcatcgtcatgtctctcatcgtcctggccatcgtgtttggcaatgtgctggtcatcacagccattgccaagttcgagcgtctgcagacggtcaccaactacttcatcacttcactggcctgtgctgatctggtcatgggcctggcagtggtgccctttggggccgcccatattcttatgaaaatgtggacttttggcaacttctggtgcgagttttggacttccattgatgtgctgtgcgtcacggccagcattgagaccctgtgcgtgatcgcagtggatcgctactttgccattacttcacctttcaagtaccagagcctgctgaccaagaataaggcccgggtgatcattctgatggtgtggattgtgtcaggccttacctccttcttgcccattcagatgcactggtaccgggccacccaccaggaagccatcaactgctatgccaatgagacctgctgtgacttcttcacgaaccaagcctatgccattgcctcttccatcgtgtccttctacgttcccctggtgatcatggtcttcgtctactccagggtctttcaggaggccaaaaggcagctccagaagattgacaaatctgagggccgcttccatgtccagaaccttagccaggtggagcaggatgggcggacggggcatggactccgcagatcttccaagttctgcttgaaggagcacaaagccctcaagacgttaggcatcatcatgggcactttcaccctctgctggctgcccttcttcatcgttaacattgtgcatgtgatccaggataacctcatccgtaaggaagtttacatcctcctaaattggataggctatgtcaattctggtttcaatccccttatctactgccggagcccagatttcaggattgccttccaggagcttctgtgcctgcgcaggtcttctttgaaggcctatgggaatggctactccagcaacggcaacacaggggagcagagtggatatcacgtggaacaggagaaagaaaataaactgctgtgtgaagacctcccaggcacggaagactttgtgggccatcaaggtactgtgcctagcgataacattgattcacaagggaggaattgtagtacaaatgactcactgctgtaaagcagtttttctacttttaaagacccccccccccaacagaacactaaacagactatttaacttgagggtaataaacttagaataaaattgtaaaattgtatagagatatgcagaaggaagggcatccttctgccttttttatttttttaagctgtaaaaagagagaaaacttatttgagtgattatttgttatttgtacagttcagttcctctttgcatggaatttgtaagtttatgtctaaagagctttagtcctagaggacctgagtctgctatattttcatgacttttccatgtatctacctcactattcaagtattaggggtaatatattgctgctggtaatttgtatctgaaggagattttccttcctacacccttggacttgaggattttgagtatctcggacctttcagctgtgaacatggactcttcccccactcctcttatttgctcacacggggtattttaggcagggatttgaggagcagcttcagttgttttcccgagcaaagtctaaagtttacagtaaataaattgtttgaccatgccttcattgca

SEQ ID NO: 703 - DNA, 3400 bp, Homo sapiens
  source 1..3400: mol_type = other DNA
tggggaaccgcagcaccgcggacgcggacgggctgctggctgggcgcgggccggccgcgggggcatctgcgggggcatctgcggggctggctgggcagggcgcggcggcgctggtggggggcgtgctgctcatcggcgcggtgctcgcggggaactcgctcgtgtgcgtgagcgtggccaccgagcgcgccctgcagacgcccaccaactccttcatcgtgagcctggcggccgccgacctcctcctcgctctcctggtgctgccgctcttcgtctactccgaggtgagccgcgtccggccgcacgagcatcctcacctgctcctcggttccccgtccctgtccctacggaggacccggcgcgacccggcccctttctggtgcggagcttccagctggggcggcggcaggggcgctgcgccttgtccctcggcgatacacccaccgccgccacctcgcgaccttccacccgctgcgctgtctgtcccccgaccctcgttcctcttctccttccccgtctgtcttggcgtctgttatccaggagatgcccgtccttctatccagggaccccggaaacaggcgactttgtcaagcccagtcccctccgtagctggatttcacctccagggcagccagctggacagacaggcagatgcaggctcagccccctggctgccgtgggacacacacacacacacactgccacagccactgcccaccacacacacctagtgcagatgctggcacacccccagaaggaggctcacagctcgcaggggagacctgggctggacaaaacccaggggaggggagggtgtgtggggaccaggcccctgctgagaaccctggggggaagcctgagggggaattgggggatggagcccacactccacaccaggtctggccctcgagtgggtcggccttggtgccagcccctctgcggccagagaaaagcagcttagggctgagctggagacgcggtgtccccgactgtgggggagggggactcgaggtttccccttgatggacacagtgaatccaggcggctggggcagagaccagcagcacgggacacgcgtgacctgtgctcctttcgagccgcagacgtcacagtgacgacgtttaagctcctaatctccccaaatcggcgggaaggattagaggggctgcctgctcctttgcccttggagagagtcactccacgtggagtcctacgctgggcactgggcacggtcttcatatttttaattataatttatcttcaagacaattatgatgtggatactatcatcacccttgtcttacagatgaagaaacagaaatgaattaacgtgcccgagtctcccacagagaacttagccaacagagcagccagcttcgcttctaggcccagcggggaccctgcctaccccaggctggggaggggctccctttgagcccgatgatatcaggcccgcccccagggaattccccaggccgttctcatgtttgtaacaaaagggagaccaaggccagaagccgtgattcacgcctgtaatcccaggactttgggaggcaaaggcaggaggatagtttgagaccagcctgggaaacataccaggcctggtctctacaaaaaattttaaaatatcagccgggggtggtggctgcggctgttgtcccagctattcgggggagctgaggcggcagaatcgcttaaacctgggaggcggaggttgcagtgagttgagatctcaccactgcactccagcctgggcaacaagagcgaaactccgtctcaaaaaacaaaaagaaaaacaaatcagccgggggtggtggcgcgcggctgtaatcccagctactctggagactgaggtgggaggatcgcttgagctcaggaattccaggctacagtgagccatgatggagccacagcactccagccgcggtgacacagcgagaccctaactcaaaacaaagggagatctgcgtggggaaggggtgtttccctgcccggtcctctggcctctggctcacagccgggcccccttctccgtattcagccctggaactacccataagagtgggggcgggtcacaagggcccgcggtggctgggaaacctcagggcctgtggtgtcgccgcgcaggtccagggtggcgcgtggctgctgagcccccgcctgtgcgacgccctcatggccatggacgtcatgctgtgcaccgcctccatcttcaacctgtgcgccatcagcgtggacaggtgcgccgccctccccgcccgcgccccggcgcccccgcgccccgcccgccgccctcaccgcggcctgtgcgctgtccggcgccccctcggcgctccccgcaggttcgtggccgtggccgtgccgctgcgctacaaccggcagggtgggagccgccggcagctgctgctcatcggcgccacgtggctgctgtccgcggcggtggcggcgcccgtactgtgcggcctcaacgacgtgcgcggccgcgaccccgccgtgtgccgcctggaggaccgcgactacgtggtctactcgtccgtgtgctccttcttcctaccctgcccgctcatgctgctgctctactgggccacgttccgcggcctgcagcgctgggaggtggcacgtcgcgccaagctgcacggccgcgcgccccgccgacccagcggccctggcccgccttcccccacgccacccgcgccccgcctcccccaggacccctgcggccccgactgtgcgccccccgcgcccggccttccccggggtccctgcggccccgactgtgcgcccgccgcgcccagcctcccccaggacccctgcggccccgactgtgcgccccccgcgcccggcctccccccggacccctgcggctccaactgtgctccccccgacgccgtcagagccgccgcgctcccaccccagactccaccgcagacccgcaggaggcggcgtgccaagatcaccggccgggagcgcaaggccatgagggtcctgccggtggtggtcggtgggttcctgtcctgaggggcggggaggagaggagggggggggtacgaggccggctgggcggggggcgctaacgcggctctcggcgcccccaggggccttcctgctgtgctggacgcccttcttcgtggtgcacatcacgcaggcgctgtgtcctgcctgctccgtgcccccgcggctggtcagcgccgtcacctggctgggctacgtcaacagcgccctcaaccccgtcatctacactgtcttcaacgccgagttccgcaacgtcttccgcaaggccctgcgtgcctgctgctgagccgggcacccccggacgccccccggcctgatggccaggcctcagggaccaaggagatggggagggcgcttttgtacgttaattaaacaaattccttcccaa

SEQ ID NO: 704 - DNA, 32209 bp, Homo sapiens
  source 1..32209: mol_type = other DNA
gagttcgcgcgacgaccgcggggtcggcgggcggggcgaggccctggacggcggcggcagtggggctcctccttctgtttcccagaccgagagccgcgccggcaccatgtcagcttaccctaaaagctacaatccgttcgacgacgacggggaggacgaaggcgcccggccggccccttggagggacgcccgagacctccccgacgggcccgacgcgcccgcggacaggcagcagtacttgcggcaggaggtcctccgcagggctgaggccacggccgccagcaccagcaggtccctggccctcatgtacgagtccgagaaggttggggtcgcctcttccgaggtgagcctggggcagggctggtgtggactcgccggtctctgtgctgtcaaacggagacgagaaatgttttgctcacaatcttttgagaattctcaagttgcctagcatagattcttgcaccttagtgactcgatggtggtaacaatctgttaactatgtaaaggtatgtgcatctggagtacttgaagagggcagtttaccccagaaatcttccttagctattagtctgcttcgttgattttttttttcttacgcctagctcacggggaaacgccagattattttctgtccaggtgagtaaaaattctgaacagcaggtcctaggtttgggaaatggagagtccgtttcttcgacattatttcctgtgcaaaatctggcacagggttttggccattccttccggagtgagccagaaagagaggactatgtgcctgcgagtgtcaggtgataccctgaagcatcagggcaggtggtccacgagttcttcccgcatcattgacatctccacctaaccaaccaatagaggtattgaagtcccttcagcccagacagctgcctagttgaccaaagcctgggtttgattgagtccagggtcttacctttacttcccaaatcctagacaaatagtgtgcgggttaagagtttgttgctccaactcatcttcatcagttcttcccatccttagatttcagagagtagtaccttcaataacaattattctggccgagcgcagtgactcacgcctgtaatcccagcactttgggaggcctaggcgtcggatcgcctgagctcaggagttcgagacccgcctgggcaacatggtgaaaccctgtctccactaaaattaaaaaaaaaaaaaaactagccgggtgtggcggtgcgcctgtagtcgcagctactcaggaggctgaggtaggagaatcgcttgtacccgggaggcagaggttgcagttagctgagatcgtgctgctgcactccagcatgggcaacagaccgagatcctggagggtctttttctttttcttttttttttttttttgagatggaatctcgctctgtcgcccttgcttgggtacagtggcatgatctgggctcactgcaacttccgcctccgggattcagacgattctcctgcctcagcctcccgagtagctgggactacaggtgcgccgccacacccggctaattttttttgtatttgtagtggagacagggttttgccccgttggccaggctggtctggaactcctgacctcaggcagtccgcccgctttggcctcccaaagggctgggattacaggcgtgagccaccataccggtcgagaatgattctttattgtacaccacagtctctcttcagcctgctaatgaaacagttttgtttggacagagaaaaaaaaaggtttaaaaaaatgtataagccaggcgcggttgtacttctgtaatcccaacaatttgtaaggctgaggtaggcagatcattttagcccaggagtttgagaccagcaggggtaactgcgtctctacaaaatttgaaaaattagccaggcatggtggcacacacatgtgagtgcagctactgaggaggctgaggcaggaggaccgcttgagcccaggatgtcaaggttgcagtgagccatgttcataccactgcactccagcttgggcgacagagcaacacgctatcatttccccttgctgttttcttgggttaattcccttccccacctctctctgttcatgtatccctcattgatccacctccctgtggttttttttttttttttttgagacagattctcgctctgtcaccagactggagtgcagtggcaccaacttggctcactacagcctccgcctcctgggttcaagtgattctcctgcctcagcctcctgagtagctgggactaaggcgtgcactaccacacccagctaattttggtattaatagagttggggttttgccatgttggccaggatggtctcgatctcttgacctcgtgatccaccacctcggcctcccaaagtcctgggattataggcgtgagccactgcacctagcccacctccctgtgtttaactgttggttttttatttttgttttgtttgagacaaagtcttactctgtcacccaggctggagtgcgatggtgtgatctcggctcactgcaacctccacctccccagttcaaatgattctcctgcctcaacctcccaagtagctgggattagaggcacctgctacaacacctggctaatttttttgtttttgtttttgtttttgtttttttggtgttttttgtttttgagacggagtcttgctctgtctcccaggctagagttcagtggcgcgatctcagctcactgctacctctgcctcccaggtcaagcgattctcctgcctcaacctcctgagtagctgggcttacaggcacccgccgccatgcccagctaatttttgtatttttagtagagacggggtttcactgtgttggtccggctggtcttgaactcctgacctcatgatccacctgccttggcctcccaaagtgttgggattacaggcgtgagcgaccacacctggcctctgatttttgtatttttagtagagacaggtttcgccatgttgggcaggctggtctcaaacgcctgaccttaggtgatctgcccacctcagcctcccaaagtgctgggattacagatgtgagccactgcgcccggtcctaaccttgttagggaggttttgcctgtagttcttacatctcatacctactggattcctatgttccattctaaatgggaagtcttggcttagatttgagaggattgcctgaggttttagggccctggtgaatgggtcacatgattgaggatctcaagcccaaggaattcaactaacaactatttaaggagacatctttgtaaactgagaacaaatgaagtagggaatcaatgattcaaagtagggcattgtggcagaggataaacttgaatctagcttttaaggctgaggtttacacaagaggagtgagaatgagggatgttcttagggaagacaggaaaatatgcaaatgcactggcccagcaacagagctcctgggtccagaggagggacatgatagactgggtgtgttagaggacaggggatggaggaggtagcttaggagcccttggaggtcatagggaaagttctggtctcatagcgcaggagaggcaaaaatgtaatagtggtgagtttgatatagattgtgatgacatgccccgtgctgcccccaaaggtctttctatgcagtggggacagtgagagctgaggcagagtggcacttcaggcatatcaggcttggccaggccaggcattgctgtgagaagtacagtgtggtcatgactgggcaggtgacaggtgctcttgtcagtgagacaacatgttggaattttccaggattgggtcagttctcaattatgagaagccctgggagtcagggatgacctacatctccaccacacccagtgttctccaagctgtctttgtttttgtgttttgttttgggggaggttttttgagatgggggtctcactctgtcaaccaggctagagtgccgtggtgcaatcttggctcactgcagcctctgcctccaggtgcaagtgatcctcctgccacagcctcccaagtagccaagactacaggtgcacgccaccacactcgactaatttttggtatttttggtggagatgggctttcgccatgttacccaggctagtctcgaattcctgagctcagatgatctgcacaccttggcctcccagtgctggattacaggctccaagctgtctttgaatcactctaatcactctttcattccctttggtgttgggatgggaacagaggagtatgagctcttccaaccctcagtgcacagtgtggcttccagcaaattccagcataccctgctaatcacccaacttaggtgcctggttaccccagcactgtgaaacatgccaacacatgacagatttatgtcaaagatgaggactttacaaattatattaggttgggaagattataattcagtcccagcttggcaggaaaatggcttagttaagtcacctctagcaaagagagctgcccttctcctactgtgaaacctggcaaggattgtttctcacaaaggctcaggccacaggctatgaccacaaaagaacagaggagaagtagtgggagcagggcggtttccccaggccgacctggtaggcgctttgtagaactacagggagacttgtaagccactcgtctctttccctgtttagtaagcatgatttcttcttttttttttcctaaggtttaatttttatgaagagagattccaatcacatggttcaaaatttcaaaacatacaaaagggtgtagtcttctcccacttccctccctatcatccctctgcccctaaggcagccaggcactttccctccttcagtgttttggggagataatgccgtggataaaaatgggtttttttttttaagtgaagtattgtatacattctggtctgcatgtgcttaatagaatggagtttgttccacactagtatgtaatgagctgggctttctttttggctgtgttgtattccattgaacaaatgacttctatttatgcagcctgtcccctaatgatgagcattgaggttgtttacaccttttggtgagtctatttgcatcctacttggacatggtttttgtacaccttttcatcactccagtggaggagactcacctgcccaggacactctgcttcccctcttgtagctgaacttaactccactgaggttttctggggcccgagatctcggttcaggggagtccagcaacaaacattagaccagggttggaacggctggcacagtaacatcaatggaaagggacagagtttgagagttcaaacgtgatgcactcagcagccaccgccagcacatcctccacaccgtctcgtgcaggggcccacccatctctgtgtctttccagcacacaacagtcacccacactgggcattccattcagaggtgggagagaggaggacacccctcctggcccaggagcagaggccatcaaggtgtccccggaacttagagtagatacattgccaaaaggtgatatcctcattctcagggattctggtcttggagcagcccactccaaatgaggggccgtacagaccaaagtcacccctctgaggcagcgtgtggtgatactgatgcagccagagttcttagcaaaagttgatggatggggacaagcagctgctagattaagtaattcctcaaatttgtaaatgtcagcagtggaagaggagcagtctcttacccatctcttgctcaactttctacccccacgcttctcagcacaatgtccttaagcgttattggcgctcccaaaatagttgccaaatgaataagtgacctggggaaggaaaggaaggagggagggaacagaagattgcctgaaaaaggaggagagagttgggtggaaagaatgcattgagctgtgtgccttggttgcaatgcctgtcctgtgaccagaaaatgcatcccaacacatgtcaggctgtgtctagcaggtgggagggagtctggtggagaaatggcattggaccacatactcaccgctaggtctgttcgggatttatttttaattaatttttggtaaactatcaatgattgaatttgaccattgatggccaggtgtggtggctcacacctgtaatcctagcacttggggaggctgaggcaggtggatcccttgaacccaggagttcaagatcagcctggggaatgtggtaaaaccctggctctacaaaaaatacaaaaattacctgggcatggcggtgcatgcctgtagttccagctactcagaaggctgaggtaggaggatctcttgaaccagggaggtcaaggctgcagtgagctgaggtcatgccactgtattccagcctgggtgacaaagtgagaccctgtctcaaaaaaaaaaaagaattagaccattgatcccaggccaatttgctggcttgttggctgtaacaggatgccttctgaggatgggctggttgttcgagcttctggcttctccttcctgggcacatccactcacagctgccacattgtcccaaggaaccttgctttgctgaccaggaaacatgctgtgacaagctgagcggccatctgctatacagctttctgcctctgaggtgttcttagagtgggaagtgttgtagggaggtgtttgggggttcccaagactaccctcaacttcactgattcactggaaggatgcacagaactgttacacgtatggtgatggtttcttacaatgaaaagatgctgattaaaaccatcaaatgaaaaaagtgcatagggcagcgtccaggggaaaccaggcacaagcttccagttgtcctctccccatggagtcatgtggacaacacttctccaagcagtgcgtgacaacacacacagagtattgtcaaccaaggaccctcacttaagcctgggtgtccagagttttttggggagtctgtcacataggcatggctgagtatagtctccaaccccaccagaggtcaagctgataacgtgtagcccaaggccaccatcatatatcacattgttagcatagtctgtctgacctggtctaagcttaggctcacttgagcaaggacactcttatcaggcaggatattccaaaaacaaggaaccaggctagggccacacctctctttggaatgtggagtgtatggacaacccagagctgctgagctagccttttgctcagccccaggttggcctgcacacagacggcgaggggcaccagcactaccgcctttgcccttggtggtttttcctgcaccctaagacccgatttgtctctgaatccaccccatactccagctgccacagtcagagccccgggtttgagcatctgccatgggtgctcacgtatccctgccaaggcttgtgcctgtgcacactcccttgggaagggagagatggaacaaagataaatttcagatttctagattcagctcactgactccagattggcctccgtctacttatgatgaacctcatttatcagaacctgagtttacgagctcagtatgagaaacacagtattgatgcccttccgtcaggaacctggggaggtctcggtcacggaagcccacctgatgttataagatgtgttggctgcgagttgcagttgagatctgttggtcactgctgccctttgaaggccttagtgacatcctgtgggtgttccctgccgagtcctgtgggtagccccgctcactccccacacggttcctctgcccctgcacaagctgcaccctctgcctggtgcccttgccccaccccaactcttcgttgtgatttgtttttaggaaaactaagtccaaatggacaggacccccaactttctgactgcctaacttctcagtctctcctccagcctcaacagggagcctctctgacccccaccttaagctaaacaaagagtctgcagggagaggtgactctgtgtgtgtatgtgtttgtgtgcacgcgtgcagtagctttagtttctgcctcccccacaggactgtaagctcagtgaagcaaggactcatctgcctttcttggattccgagcattgcaatgttgtcaacaaatgaaaagctgagattgaacctcactcatcttgctctctgttagactgtaaacaccatcaggacagagacttgggattgtttcgtggacaaagagagaactcttgttggggttcaagggagtaagaagggcatcacctgtaatgcttagtaatcactgaaacaaggaagcactttgcatgtgcgtcctttacactgagggcacctgcggagctcactcccctagcagccacccaagtccgttcagggacctcattctcccacgggaagttggagaagatgggccgtggctctgcggaggggggtgtggacctgcctcggtacctggagcggttgaggcctgtcttggtggtggctggggcacaggtgtctgcctggcctgtccttacagactgtcagtgttctctttcctggtattttggtgtttgctctgtcaaacccttcttcctcattggttggaactaggtcacaagcacattaagtccggtcatttcctctgccttctgggggtggattttagcagaagaaacaactcctcccttgctggcctcatgacctctggtgaacactagctttcagcaaacagaaacttccagaggccagagcagcactcagtcgcctggccttccagcctcacaggcaagataagccaccctcacagacttctctgtgctcccatctaaacatctaaatcagccatctggtttccttaacagtagcacagactctgggagtttgagagaatgtgtctcttgtgaataagagaaaataagtccatactggggaaggtagctctccaaattgagatgaggaggtcagggtgggagggtgagtggtcgtgggttggccctgatgggaggagctcaccatcagggaagctgaggacctccctcctaatgtgacagcagagtcttggccacctcttcattccccagtccccaacctggctgctctgagtgtctttccagctactggaaagcttcttctgcagcctgcaaagctagctggaactggactgtcagaaaaacatgtagatgctggagaaaatctgttaatcctaacgtatagctctgccttattccagagaagaccgcagtgtggacatgaagatgataaacttgaggtgatggaaggagcagaaatgccagatacattagcagctcttttttcttttgaaaactagcccttgcaagatttgcttgacatactgagtgacactatccagaaaacatcttttttttacttaaaaaaggctgatggtttgttcagacatctcttgtgaactagtgaaaaacataaacgttgaaagctgtaaaattcagcagttctaagtttatttccagcaagagttaaacaaagtttaatagtaaattcaaccaaccagtgttttagctttttgcctatacattatgtttttaaatttcacccattaaacaaggactcaggttacacattgattccttaaggactttaaggaagccacaaccatttatttatagttgcattttgctcttcaggtttccaggatgtttaaaattttttttgactttgtttttaggcatcaagagagaatatatctaaaaaacatttgcatagttagtgtaattgctaagccacagggtgatgggtggatagattcagaggaaggcagctgagggcagaggctgcctgacagagcaggaaaaatgaagctcgagagccttctggctggaaaggcagctcacagatgggccgcagctgtagatcagttctgaactagggactgaagcaagtttgtcgtaaataaaggaaagtggtagtgttgatgttgtgaatgtatatccacaaccagaaccatcagctctggagggaccatcaggctgccactgtggccacagagcatcactcacgtctccattgggcagatttgcagagactcagcagtgaacagagcaagtccctgcctcgtggagctcatatgctgtgagcggtggctcatgcctgtaatcccagcactttgggaggccgaggcgggtggttcgagaccagccgggccaacatggtgaaaccccgtctctaccaaaaatacaaaaaactagccaggcatggtggcaggcgcctggaatcccagctactcaggagactgaggcaggagaatcgcttgaacacaggaggcagaagttgcagtgagctaatatcacgccactgcactccagcctgggtgacagagcaagactccatctcaaaacagaaaaggaggtggagaagaggggtagtggttggaagaaggaattctcctttagggaagatgtctgggaaggcctctctgagagagtggcctttgaaaggagaccctaattggatgagggatgagaggctgagccatgtaagtatctggatggaaaacattacaggcggagacagtggtgtgtgcaaaggccctgggacagggtcacccgtgttaacaggttttaaagctggaattgtggatgggctagagtcagacactaatagggcccagaggggacactggtccttgaaatagaatttgaggatttgaccatggccaggaggctcaggtggcccagtgggaactccttaaatgggaacttcctaaaggaagaatataagaaccaaagtccagggggcagtgccaggcccaacctgtgagggttcccagagttggagggctagagagaatctgcttccagttcaggccatagactctgaacctcacaggcacattgccatccatctcccctcacccccaaccgagacggagtcttgctctgtcgcccaggctggagtacattggcaccatcttggctcactgcaacctctgccttcagggttgaagcaattctcctgcctcagccccccgagtagctgggattacaggtgcccgccacaacacctggctactttttgtatttttagtagagagggggtttcaccatgttggccaggctggtcttgaactcctgacctcatgatctgcccgcctcagcctcccaaaatgctgggattacgggtgtgaatcactgcgccaccctctgccatccatcttaacatggcgccatgagccagcctctcaggaaaagggtctcatgaacaaatgaggaaagcaagtagaggtagggcagggagggagaggcaaaggaatgtgttgttggaaagggtagtgtgcccctcacagatgacagtacccgtctccagatgtgcccactgagagtttatgaaggggctgctccatgtggtccttgactgccctgggggagagtcacagaaagctataatgccactgcctctcggtttccccaggagctcgcccgtcagcgaggagtcctggagcgcacagagaagatggtggacaagatggaccaagatttgaagatcagccagaaacacatcaatagcattaagagcgtgtttggggggctggtcaattacttcaaatccaaaccagtagagaccccacctgaacagaatggcaccctcacctcccagcccaacaacaggtgagtgcatcttctaccatctgggtataaaggagcagaagtggggattagtgcaaatgaccaagactttcagtccacgtcagtgccatgaagggatccaacaaccctttaagttactcatcaggggatatttgtcctcaaacattgtgaaaccaggaactgttcttccctgatcccatgttcacttgattgacatctagtctgtcaatagcttctccaataattgtgaccccactactttgaaagagagggtgttcacctcagcgtaatctgtacaaatgtgactcacttcacataatttttgctttaaaaaatctttagggctgggtgcagtggctcacacctgtaatcccgacacttcaggatgccaaggtgggtagattgcttaagcccaggagctcgagaccagcctgggcaacatagtgggaacccagtctttacaaaaattacccaggcattgtggtgcacacctgtagtcccagctcctcaggaggctgaggtaagaggatctcatgaggcctggagatcaaggctgcagtgagctgtaatggtgcactccaacctgggctacagagggaggccctgtctcaagaaaaaaaaaaaaaaaagtctttatgtctaaatttgtcatatctaatccaattcgcccattgatttttatttgaaaattataaggctgggctcagtggcttatctgtaaaatcccatgctttcagaggctaaggtaggaggattgtttgagaccagcctagacaacatagcaaagacccgtctctataaaaactaaaaaaaaaaaaaaattagccagacatgatggcacgtgcctatattcctagctacaggggagactgaggtggaaggattgctttagcccaggtgttagagactagagttaagctatgatggtgccactgcactacagcatcagtgacagagtctccctgtctctaaaaaaaaaaaaaaaaaaaaaaagatttaaagctaaataattaaaatcaaaaaaataaagttagaagttgctttcctcaggttttggctcgaaatataaaatcatacatgagactgggggccaggcacggtggctcacgcctataatcctagcacttggggaggccgaggcgggtggatcaccaagtcaggaaatcaagaccatcctggctaacatggtgaaaccctgtctctattaaaaatacaaaaaattagctgggcgtgatggcgggcgcccgtagtcccagctactcgggaggctgaggcaggagaatggtgtgaacccgggaggtggagcttgcagtgagctgagatcatgccactgcactgcagcctgggcgacagagcaagactccgtctcaaaaaaaaaaaaattcatgagattttggtagacttcagtgttacatgttcaaggataaaggaatggagtttctgctgaagtagattactattgtttgtatttcagatcactgtgtctgtttttattacaaaaacaacatggccacattacagacaatctatactttacctaccgcaacacaaaaacagaaaatttcattttccccttattcagtattttcatagttgtaaccatagtattcttttggtttgatagcctttttcttccatttaacccagaaaaactgcttgatattatgtgataactcaggttccataaccatctctctctctctcttttatttatttattttttattttatttatttattttttttgagatggagtttcacccttgttgcccaggctggagtgcaaagacgtgatctcagctcactgcaacctctgccttccaggttaaagcgattctcctgcctcagcctcccaagtagctgggatcacaggtgcccacaccatgcctggctaattctttttttttgagacggagtctcactctgtcacccaggctggagtgcagtggtgcgatctcggctcactgcaagctccgcctcccgggttcatgccgttctcctgcctcagcctcccgagtagctgggactacaggcgcctgccaccatgcctggctaattttttgtatttttagtagagacggggtttcaccgtgttagccaggatggtctcgacctcctgacttcgtgatccatccgcctccgccttccaaagtgctgggattacaggcgtgagccaccacatccggcctaatttttgtatttttagtagagatggggtttcaccatgttggccagtctggtctcaaactcctgacctcaggtgatccacctgcctcagcctcctagagtgccgagccaccacgccaggctttttttttttttttttttttttttttgagacagagtctcactctgttgcccaggctggagtgcagtggcaccatctcagctcactgaaacctctgtctcccaggttcaagcaattctcttgcctcagcctcctgagtagctgggattacaggcatgtgtcaccatgcctggttaatttttgtatttttaggagagatggggtttctccatgttggccaggatagtctcgaactcttgatctcagatgatccgcccgcctcagccttccaaagtgctaggattatgggcgtgagccaccacacctggcctctctctttgttttaattctgtaatgtggagcttttctttttcattttatttatttattttttaagagatgaggtcttgctgtgttggccaggttggtcttgaactcctggcctcaagcagtcctcccacctcggcctcccaaagtgctaggattacaggcatgagccaccacacctaactgcagagccgttttttttaatgcatcactaaggtacagtaaaatatgtgcatcttaagtggagagccagtgactgtgaacctgtgtacactagtgtggccaccacccagatcaagatgtagggtgtggcagggaggaaattagataactacttcaaactcagagtggggctggggagaaaccagtgtaggtaacaaagctggtggtgatggcagaaagaacaggcaggcgaagccatcaagagttatggagaggttcaggcatggtggctcatgcctgtaatcccagcaatttgggagactgaggcaggaggatcacttgatcccagcctgagcaacatgacaaaaccccgtctctacagaaaaacacaaaaatgaagttgggcatggtggttcaggcctgtaatcccagcactttgggaggccgaggcgggtgcatcgtttgaggtcaggagtgtgagaccaggccagccaacatggtgaaacccagtgtctcctaaaaatacaaaaatcagccaggcatggtggtgcctgcctgtagccccagctacttgggaggctgaggaggagaatcccttaagcctgggaggcagaggttgtagtgagcggagattgcaccactgcacctcagcctgggtaacagtgagactctgtctcaaaaaaaaaaaaaaaaaaaaaaaaaaaaaggccgggcatggtgagtcacgcctgtaatcccagcactttgggaggccaaggccaacggagcacgaggtcaggagattgagaccatcctggctaacacggtgaaaccccgtctctactaaaaatacaaaatattatccgggtgtggtggcgggcgcctgtggtcccagctactcgggagggtgagaaatgtgtatggcgtgaacccaggaggcggagcttacagtgagctgagatcacgccactgcaacagtgagctgagatcacgccactgcactccagcctgggcgacagagcaagactctgacacacacagacacacacagacacacacacacacacacacacgaaaattagccacacacacacacacacacacacacacacacacacacacacacacacgaaaattagccggacatggtggtacgtgcttgtggtcccagctactgaggtggctgaggtggacccgaccttttggcttaggtgggaggatcacctgaacccagggaggttgagcctacaatgagctatgattgtaccagtctactccagcctgggtgacagagtgagaccctatctcaaaaaaaaaaaaaaaaaaagtactgcaggagggacctgcagagttggccctgggaacctgccggcctcagtgagtgccctggggaggcactagctaaggttatgagggttggttggtttttttggctcagccataatcaccattctgggttctccagctcaaccctaattttaaacatccgccatttccctccagttctagtcgttgcttgttttttgttgtttttttttcaatatacatatcagaaagatgttttatatcctaatctttggccacatttaattgccataggagaaggtaggatgttcatttgttttggtctaagacatcctccatgtacaaactcaggagcagagtgagcccttggaggagtgggaagctggcaagtttgtgactagcaccctttcacacccttccacatcctacatacctcttcacaaaggctgcttctggggctcttggaggcccctgcatccctgaacatagctatgaaagccatggaagtcctgtggctccaggggcagttttctttttttggagcatcatgaaaactcaggggcttcccagcaaaggcttccatcagtgaggcagccatagttatttcagtgaggtgggctttgtctcttgggaagtcctgtttgtccttgctgacagctttccaagctgcttgttctcatttccacttaaagctgatgcgttcccgtcaaggtccccaaagtcatgtaccctgcctggcctgcccctagattagccccaatcagttgtagcattcttgccatctcttagtaaattcaagaaagcaaaactttcacccacactctgcagttctgtgggagcagaagctgcaggaatgcagtctgtctgttggaagatatgggggaggcagacagtccacagggatgcagtggggacccagaggagagggaggttggccctgggaacagaggaaggctgcacaaaggacctgactttttgcagaaggtgaaggttttgagggaacccaccaattgaaggaggggttggtgcaggcacatggcagtaaaagcacaggggaagccgggatgaaggaagttgttggccatttcaagggcccagcagggccagacacagtggctcatgcctgttatcccaacattttataaggccaaggcaggacaatcacttggggccaggagttgaagatcagcctgggcaacatagcaagattctgtctctacaaacataaaaaatttttaaagctgggcatggtgatacaggcctgtagtcatatttacatggacgaccaaaaaaaaaaatgggggggcggctgggtgcagtggctcacgcctgtaatcccagcacttttgggaggctaaggtgggcggatcacgaggtcaggagatcgagaccatcctagctaacacggtgaaaccccgtctctactaaaaatacaaaaaattagccaggggtgatggtgggcacctgtagtcccagctgcttgggaggctgaggcaggagaatggcatgaacccgggaggtggaggttgcagtgagccaagatcaagccactgcagtccagcctgggcgacagagactccatctcaaaaaaaaaaaatgcaataaattgtgagtaaaatttttgtgatcctgtcaaaacctttaatccataaatgcaggaatactgtcacttaaaaactttgccttttttttttttttttttttaagacaatgtctcgctctgtcgcccaggctggagtgcagtggtgcagtctctgctcactgtatcctccacctcccaggatccagcaaccctcccacctctgcctcccaagtagctgggactacatgcatgggccaccatgcactgctaattttcgtattttttgtagaaacaaggtctcactttgtctcccaggctgatctcaaccacctgggctcaactgatcttcccgcctcagcctcccaaagtgctaggattgcaggcatgagccactgtgcctggcccacttaaaagctttttttttttttttttgagatggaatctcgctctgtcacccaggctggagtgcagtggcgtgatctcggctcactgcaagctccgtctcccacgttcacgccattctcctgcctcagcttcccaagcagctgggactacaggcacccgccaccacgcccggctaaattttttttgtatttttagtagagatggggtttcaccatgttagccaggatggtctcgatctcctgacctagtgatctgcccgcctcggcctcaaaagcttttaaaataagtttctcctatcaaacttctgttcagtcatgcatttcctgtgtacatcattatcacacaaacccttcggccttctctgaagttttgtctcttgggaagccctgtttgtccttgctgacagctttccaagctgcttgttctcatttccacttacagctcatgcgttcctgtcacatatgcacccttaatttgaaattctctaacttatttaagacttggtttctgaccaggaaccaccctctcttaaacctctactgtcttatcacttttctcagtctccctagaaattggctttcttggctgagcgtggtggctcacgcctataatcccagcactttggaggttgaggtgggcggatcacaaagtcaggtgttcaagaccagcctagccaacatgatgaaaccctgtctctactaaaaatacaaaaatcaggcctggcacggtggctcacgcctgtaatcccagcactttgggaggccaaggagggtggatcacctgaggtcaggagttcgagaccagcctcaccaacatggagaaaccctgtctctactaaaaatacaaaatgagccaagcaaggtggcacacacctgtaatctcagctacttgggaggctgaggcaggagaatcgcttgaaccagggaggcagaggttgcagtaagccaagatcgcaccattgtaccccagcctgggcaacaagagcagaactccctctaaaaaaaaaaattagccgggcgtagtggcgctcacctataatcccagctactcaggaggctgaagcaggagaatctcttgaaccagggaggtggaggttgcagtgagccgaggtcatgcccctgcactccagcctgggagacagagctagactccgtctcaaaaaaagaaaaagaaaaaaattggctttctttgtgggggagccatttttcacaaagaaaccattgttttcctcatttatgtattaccagtatatatgtgatggcacatagaaagaataaagccagcgttgagatgtgcaggctgaaaggtggccaggcagactcagaagccaagtgtctcttcctactcccagcatggcaatgcactgcccacagtggtgcttagaggagccagttctgtgttctagactttcagtcacagcttccgtggggtgaaatcctggagtgttaaatccttccattcaccaggctctgctgcattctacccatagctggagccctgggcctgcaaaacccttagcttgcgggagtctggacttgctcttgcaagttgggagtcattaaagactttaactgaagaggtgcttgccagtattgctttagaaagatgcgcagcacccatggggagtaaggattggaagggagggaattgaattgagaggcattgccataatccttgttaaaggtaaagaaaagcaaggcaggccgggcacggtggctcaagcctgtaatcccagcactttgggaggccgaggcgggcagatcatgaggtcaggagatcgagaccatcctggctaacacagtgaaaccctgtctctaaaatacaaaatacaaaataaaatacaaaaaccctgtactaaaaatacaaaaaattagccgggcgtggtggcgggcgcctgtagtcccagctacttgggaggctgaggcaggagaatggcgtgaacccaggaggcggagcttgcagtgcgtggagatcacgccactgcactccagcctgggtgacagagcgagactatgtctcaaaaaaaaaaggcaaggcagaaggagaggctgggtttctgggctacttagggggtgggagatcaagagggcgtttgttttgcctggattactgggagtagcgctgtgcagggggagggcaaaaattgcgagtaaccctgattcccagattggctggcgaagtggtcaggctgctgttgagatagaggagagcaggctgttggggaggcacagctcccagctggaggcacctgccataccttagggggctcagcaggatgtcggggatcagcagggcatcaggcatagtctaaatgactttgagttgcaagagctatccctgtctacagccagagtcagcaaactaggccacggagcaaaatcaaagatattttatagggacttacgtgatgagaaaaaaacatactttcacaactttttagtgacaaaatttaaaatataaaaacagtggccgggtgcagtggctcacgcctgtaatcccagcactttgggaggccaaggtgggcggatcacgaggtcaggagatcgagaccattccggctaacacggtgaaaccccgtctccactaaaaatacaaaaaattagccgggcgtggtagtgggcgcctgtagtcccagctactcaggaggctgagacaggagaatggtgtaaacctggtcagcagaggttgcagtgagccgagatcgtgccactgcactccagcctgggcaacagagtgagactccatctcaaaaaaaaaaaaaaaaagtaataggctggacacagtggctcatgcctgcatggctgtaatcctggcacttttggaggctgaggcagggggatcacttgagtaggcacctgtaatcccagctactcaggaggctgaggcagaagaatagcttgaacccgggagatggaggttgcagtaaatcgagatcacgccactgcactccagcctgggcaacagagcaagactctgtctcaaaaagaaaaaacaatttaagaattggccaagcatggtggcttatgcctgtaatcccagaactttgggaggctaaggcgggcggatcacctgaggtcaggagttcgtgaccagcctgcccaacatggtgaaactctgtctctactaaaaatacaaaaaatagccaggtgtggtgggggcctgtaatcccagctactcaggagcctgaggcaggagaatcacttgaacccgggaggcagaggctgcagtgagccaagattgcgccactgcactccagcctaggtgacagagcgagactctgtctgaaaaaatttaaaaaaaaaaaaaaaaaaaaaaaagccaggcagggtggtgagtgcctgtggtctcagttacccaggaggctgaggtgggaggatcacgagcctaggagttagagacttcagtgtttgcaccactatactccaaacttggtgacagagagagaccctatctcaaacaacaacaacaaaaacagtaatagttgagtacagtattctggtaatataagtgcactaatgagaggaatgaaactcttgaggttctaagtttgtcatctgaggtgcacatggtcatctctaaggccattctttgctcatggtcatataaaaacaggtgaaattttgttttgtgtattttaccataataaaaataacttggggccaggcgcagtggctcatgtctgtaatcccaacactttgggaggccgaggtgggtggatcacttgagatcaggagttagagaccagcctggccaacatggtgaaaccccatctctactgaaaatacagaaattagctggggatggtggcacctgcctataactgtaatatcccagctactcgggagactaaggcgggagaatcacttgaacccgagaggcagaggttgcagtgagccaagatcacgccactgcactccagcctgggtgacaaagcaagactccatctcaaaaaaaaaaaaaaagaacggggaaacagtacaaaaacaggaggtgagccagatgtgatcagcaggtcattgtttgctgactgtagtctaaagtaccggtttggttgttccatgtgcttttcatctgcctggtcctaggaatccaggtttccctgagagagggccacctaactcgatgctacactgctttttttttcttttttttcagtaaagacaaggtctcattatgtttcccagatctcacactcgtgggctcaggcaattctcccacctcagtttcccaaaatgctgggattacaggcatgagtcaccacacctggcttagctgccacacttctgaggcaggggtcttcataagcttactgcttggcccactgtgctcctgggagaagctgttgaaatccctactttggtcagaaggagtttggcacagaggaggcatttgatttttagcacacaggcattatgtgaaaagactgataacattgtcataggggtttttcctttttaaacgttttcttttttgtgaacttttatccaaagattgaaagaagctataagtacaagtaaagaacaggaagcaaagtaccaggccagccacccaaaccttagaaagctggatgatacaggtaagtggatacctgtgtgcacagccacatttgaattctggggggagacctctaggtttggcgttggtccttggggggcagtggcaacctctctggggaggtgggcaggggccccagctgctggcatcacccatgctagccaaagggccttagggaccccgcatgctcttgcggagctgggggtgtgcattatggtggggctcctccttctctccctccctccctccatggagaggagaacaaggaagtgagggcctgcattccattgaaaatgagcctgcccggccagcctggtgcagtaacacacgcctgtaatcccagcactttgggaggccaagctgggtgaatcacctgaggtcaggagtttgtgaccagccttactaataacgtggtgaaaccctgtctctactaaatacaaaaaaattagccaaatgtggtggcacatgcctctaatccaagctacttgggaggcttggacaggagaatcacttgtatctgggaggcggaggttgcagtgagctgagatcacgccactgcactatagcctgggcaacaagagtgaaactctgtctcaaaaaagaaaatgagcgtgcccatcattggttcctgcctgtgtcattctcaattgttccagcagtaaaaagccaactgcagaaaaaccccttggtaaatagaatactggcccctcaaagctgtccacgtcctaatccccagaccccgtgagtgtgttaggttatatggcaaaggtggaattacagttgcagatggagttacaattgctaatcagcaagatggggagattatcctgggttgtccagttgggtccagtgtcatcacaaaggtcccttttaagtggaaagagaagcaggagagagagcagcagagtcagagatctgaagatgctgctggccttgaagatagagaaaggggcccacctgccaaggtacacgggtgaactgtagaaactgcaaaaggcgaggaattagattcttcccaagagctccagaaggagtgcaaccctgaggacaccccgactcagcccagtgagacccatgttggacttctgacctccagaaccgtaagacaagtttgtggtcatttgtcacagcatcagtgagggactaatacagcctccagcccaagcagaaggagcagcagccacatggacaaggtgtgcaagacagtgttgatcgaatcattccacttctatcaagtgataggcccagaaacatcccttatctggaaaggaatttagggctcctggggcctcctccataggcccccacaatagccaggtacattgaaattggtgctagaaaccaaaggcttactgtgctgccttcaagaaaacgatacaccatggaagctctggaacccaccatggttgtggttgatgcagctgaggagagcccagatggaggaagagcggggagcaggagagactaacatcatcagcacagttcattctggaaaggcaagtggaggaagtgagtgtaaattgaaaggcaagggctgggaaaaccggcctcatcacaccctggagaaggggcacaggacactgcacccaagacacaattttaaggaattaaagagagtttttatttgtgcagtatatattaacttaaaagactgaagaaaaaatcgacacagtttgcagaatggtttcagttggttggtgctggaggaaatgtgctaagtctagaaagtgaagtttccctgaaagagataaaccgggatgacagggcttttccgtgtgcgtttagaaactgaagttcattcaagccaagaaagataattttaaaaaagaagaaactaaaagttcaaggaagatttcttgtggcaaatgtgcattatttaacatttcttttttttttttttgcgtatttgtttcaagtgcaaagatagtgtagaaataaatttcagaaagaaacgaaattacccataattccatttatgtaacgtaacaatttgtatttttatactttgtccacagactgtgtagttttgcattattgcagttccacttctgtattgtcacttgtgtgactctgtctttcctgagcttgtgcaccaggagttaggtgacccttaatttgagggtgtttgatctcccaagtactgagggaaagtgagaaccctctcctaccccgtggaagcgtctcttcttctggcccatgagcctgcgctgtgctcctccctcatccctctggatagcctcagaaccaaccccttcgttccttccacccattttccagatgaaattgttttgggtgtgtgaagcagcatttgaaggaatgtcaattaaccgctctcctggtgtttccttctaaacttagaccctgtccccagaggggctggttctgccatgagtactgatgcttacccaaagaacccacaccttcgagcctatcaccagaagatcgacagcaacctaggtaagactgagcaccacaccagcttctgtaagccactgtccttcaggcagcttacgccaagcatagcccctgcatgagcatcctccagcttcagttccctcaccacacatcacatcccacgccaagctgggtccatcttgccacctcactgtctctggaatctctccacttctcaccatttcctacttctagcccagccgagccctccccacctctcactttcatgaacagcaccagggacccaggagtccctgagaggccataaagtatagcctggacgtgaccgctcacttcatccttcccacctggccactcagagccctgttttcctccttgtgaaatgggctacctctgagaacagtggaaaggttacctgagccagaaagtgcctgggatggtaagagttagtgctcgtgttgcaattggcactttggccacacagcctccagcatgatgtttcaaaacggaagggtgtgcagggggccgggcgcagtggctcacgcctgcaatcccagcactttgggaggccaaggcgggtggatcacccgaggtcaggagttcaagaccagcctgaccaacatggtgaaaccctgtctctactaaaaatacaaaaattagccgggcgtggtggcaggcgcctgtaatcccagctatcgggtggctgaggcaggagaatcacttgaacccgggaggcagaggttgcagtgagccaagatcgcaccattgcactccaacctgggcaacaagagcgaaactccacctaaaaaaaaaaaaaaagaagaagtgaagggtatattcttccagaactctctcatggaaccccacacactcacagtgcagtccaggctctctttggctgccctagtcccttctgccctcatcacctgcaggctcgtgtgggatttctgatgtgagttctttctgcctcgtggcccctatctgcctggatgggctcccccgactctctgtaggctggctccttctctttctgtcagtcttgcattagtatggcctcctctccctgtctctcaggacccttgtgtttccagggggctgccctggccgtttgtgattgtgtatctgctggtttgcctgctgtcttcccaatcagactgtagattccaggacagcatgggagtgtttccattttgtcactactttgtatctggggcccagcaggcaagcacttagtgattatgttttgttttgttttgttttgttttgagacagagttttgcttttgttgcccaggctgcagtgcaatggtgcaatctcagctcactgcaaccgctgcctcctgggttcaagcgattctcctgcctcggcctcccgagtagctggaattacagacatgcaccaccatgctcagctaattttgtatttttagtagagatgaggtttctccttgttggtcaggctggtctcgaactcccgacctcaggtgacccgcctgtctcggcctcccaaagtgctgggattataggtgtgagccactgcgccctagccagtgattattttttgaatggaaaagtcagttacttgaaattcaagtaggtgttggcctgtgggcagttctgtgagtttattctaagtagtgtctcagacttgctgcctcctcctaccgctactccctgagcagaaatctcccccgtggtgacctgggtcaccctgtcagtctcccaccccctgttaggagttggcaaagtgtaggggacaaataataaaatcctcccctgctgtaaaggtatctagtggaaggcaaaactgaaacccatgaagatgcacatggagtgtctgtgcacgggttttctcctgcttgctgtctgggaagccccagacagctgccacctccttctatgccctggactctgtcctccagagccaaagacttatctgaggcagaaggtgtgtctgcccagatctaaccactccagagaagcccagagaggcgtgaaagccctttgtccttcactgcgagaaagggagaggttagggctagtggtatggttggtgcctgctggcagaagtgggagaagggactttgaggaaggatactgcattcagaggcaggaagaagtgctgagtactgcccgccactaggaggtgctgagggtgcacagttggcactgtggacgagcagctgggcagttaccggcaggacgcagtctagagtaggaggtgggcctgggcagaagggcgagtggctagttcagagctcagccctctggccctgctgacacaggccaggccggtccactctggtggggcagggagtgttgcctttgttcacactcttcccgtcttaacactatctccctgctatttcaggatctcaggcaagctctctggactccagcgccctggcctggtggttttacattatcacacattttatctcagcctctctgtttgcttatcctttgctgccctggctgccagtgagcttcctcctgaggcctgaggcaaccacaggctctgctctccatggagcacgaggccatgaattttagtaagcttaagaagcaaagagctgaagacttatcttttttttttttttaattttaattatactgtttttctctttcttttcttttcttttttagaaatggagtctcgctttgttgcccaggctagtctccaacttctgggctcaagtgatcctcccacctcagcctcccagagtgctgggattacaagcatgagccactgtgcctgacttgaagacaatctttttatttttatattttttaatttctttctgagagttttactctgtcgcccaggctagagtgcagtggcacaatctcagctcactgcagcctctgcctgctgggttcaagtgattctcatgcctcagcctcccgagtagctgggattacaaggtgtgcaccaccatgcccagctaatttttgtatttttagtagagacggggtttcaccatgttagccaggatggtctcgatctcctgacctcaagtgatccacccacctcggcctcccaaagtgctgggattacaggcatgagccaccacactcagcctatctttttatttcattttttgagacggagtcttgctctgtcgcccaggttggagtgcagtgcattgatctcagcttactgcaacctcctcctctcaggttcaagtgattctcttgcctcagcctcccgagtagcagggaatacaggcatgcaccaccacatctggctaatttttatattttttagtagagatggggtttcaccatgttggccaagctggcctcaaaatcccgacctcatacgatccacccacctcagcctctcaaagtgctgggattacaggcatgagccattgtacccggccaaaactacctttttaaaaaaactgattttggccgggcgcggtggctcacgcctgtaatcctagcactttgggaggccaagacgggcggatcacaaggtaaggagttcgagaccagcctggccaatatggtgaaaccctatctctactaaaaatacaaaaaaaattagtcgggtgtggtggcgtgtgcctgtagtcccagctactcaggaggctgaggcagaagaattgcttgaacccaggagacggaggttgcagtgagccgagatcatggcactgcactccagcctggacaaaagagcaaaatgctgtctcaaaaaaaaaaaaaacaaaaaactgattttgcttagatttgtggtaccagtgctaagcctttgtgtatcctgatcctttttctcttagtgttttatatttaatcttgcaagtaagaaggcttacaaagcaccacctcttctctctcctctctggctctttcctggctgctgttcctagtaaaaaggcagaaagcagccctgggcatatctccctacccccagcgtgcacaaacacacacacacatacacacacacacacacagtcacaaacctgggaaaaggctttactcttcaccctgacagaatcaattaagtcaagactcatctctgcagtgggtgcagtccccccaggcaacacagatccctgtctctcccacttacccacaccatcaagaagcatttgcaggtgccgtgactgtttgctcatgcctgcgtgtcatttcctcctcctgcagatgagctgtccatgggactgggtcgtctgaaggacatagccctggggatgcagacagaaattgaggagcaagatgacattcttgaccggctgacaaccaaagtggacaagttagatgtcaacataaaaagcacagaaagaaaagttcgacaactctgaagacagacggatttccactctattgtgatgaaaagatttgaaagatctttttttgaacttccaagaaatttcatttactattttagtatgtaaattaatgtgtgtttgcaaatgttataatagagtaggtcttaagacatttttgctgttataaggaagtgtttgtcccacattttcctagggttaacacctcaccaagttcttccagcaaaatgcttattagagtttttgtctgagcacagtagcctggccctgcatatcttgggcgtttgattaccatgctggaataagaagagttgcatttctcattttaatgagcatatggaaagatgggaacagaatttcagtcttgcagccatgagcctctatttctcattcctaagccttaccatgagtcagagtgttaagggggcctgtgaaccagtcgtttggtggaggagggtccttcccacacctttgtttaggagtcatcattcacacacacacacacacacacacacacacacacacacacacacactctctgagcacattatctgtgattctttcatcctcccagaaaggatcagtgttagaatgggaaatagagtgtgccatcttgctcttttgttggcagatgtccccgcttccctccagccccccatccttggcatgtatattagtaggagggcttcacaccagcactgctcactgcgactcctggaaatgtgtggggaattgggtgagcccctcttccccacgtgctcccatctgtaactctccatctgtgatttgcaacaggtcttccactggctcgaggctgcgaggctgaccgacaggggcgcccaatagagtttgtgggaatggagtattgcacagatgcagctgcacaatggtcttcctccacccctctgggaatcaccattaggcaggcctcagtagggcaaaatgtttatttggtaccgggggtctcctgacctgtctagcattcccacccactcttctgcacttcttgcaaggtaacttgaatcatcacttatttctctgccacctggttttaggactggcactctataaatgacgctgactttgtatagaaggattttgctaagggggcaaaaagcccagataccattttaactggcccagttcattttctcctttcattttacaaaagaaatcatgcagaagcatcaattaaaactgatttatttatgttggtacatccaacaaaatagttggagccacaaggcccttgtctttttaaaaaaacaaaatattttgaagatggtgaaagtgactgattttaataatgagataggtcacttaaaataacagtgcctttgaccttaaaacatggcactggcccatgtgacctttgccatttcccagtacttccctttacagtctgcagcctataaacagtggtgtctcaaagcaaaggaaacctccacaagtgctgcaacagtgcattagtttttatgtagcaatttgtttataaaaattcccatcccataatgcatgaccttcctaaaaatatccacagcctccataggcaaggtgagctttctgtgctacccacttgttagattccagccacctcagggattctgatccatgtcattaacgaccatcccagggtgtgagggcctgattaaagcttatcgaactagacatttgtttattagatgagctcggcattattattttctcaataactggtagaagggaaattttaaacataacactcaacccaaacaaaactacttcgtgaggctttcagcaaaaaggctgcttaaaagcatgaacccgggatgcagagcagcttttgtgcacggttccacttactgtaattgtttctggttctttcctctaacaccttccatgtatgtcaactttttatcaccgtcaggcatagactcgtggagattagtcattatagctcagacctaagctaattatttaaaataaatacatgtaaaggccactgccacattctcagcagacttccacttgcctaatgagattagtgattcaactgacttgaagcacagtaacatcttattttatgcacattccctgtcttttgctggactgatgaagccagtcacccgcccttctctgttttttggttttttttttcttaaccccaggtatatggaaggggagttgccttcacttttctggaaatttgtcttcgtctgacatattagagggcctcgttttgtcctgttcttgttcagaccctctcgttctacgtcctgtgctgaggggactgtccgtaagctacaggacagcgagctggtcctttctgccacttcttccccactcccatgcccaggaaggcctggttgctgatgctactttataaatgagttgcttgcattttcacagagaatgaaggaagacgtaacatggctccagaaacttttcacatgatgattgggatcgacaaaaaaatgctaccctctagactagacacatttcatggagacaagcaaaatggtgccagggctgggctgactgtgggatgggatttggtactgcagacagattttgatttccacagttgagctggaaacaaactgtgccttcaaaaaatgacttttctaacttaaggttggttatatgttaagtgtgctactaacttaaaaaatagtggctgggcgcggtggctcatgcctgtaatcccagtgctttgggaggccaaggcggggggatcacgaggtcaggagatcgagaccatcctggctaacacggtgaaaccccatctctactaaaaacacacaaaaaattagctgggcgtggtggtgggcgcctgtagtcccagctactcaggaggctgaggcaggagaatggcatgaacctgggaggcagagcttgcagtgagccgagacagcgccattgcactccagcctgggcaacagagcaagactccgtctcaaaaaaaaaaaaaaaaaaaaaatagtgcactctctggctggtcacggtggctcacgcctgtaatctcagcactttggaaggccaaggcaggcggatcacgaggtcagaagatcgagaccatcctggctaacacagtgaaaccccgtctctactaaaaatataaaaaattagtcgggcatggtggcgggcgcctgtagtcccaactactcgggagactgaggcagaagaatggcgtgaactcaggaggcggagcttgcagtgagccaaggcgacagagcaagactctgtctcaaaaaataaaaaatagtgcactgtccttcgagaaagttttctaacatctagtaatttgtaacttagaagtggagttgccttgtggatgtcttttttgcattctgtaggaaatgaaacgtgaatttaactcgggttgcaagaaataaaaatgtcagtgcatttaa

SEQ ID NO: 705 - DNA, 32742 bp, Homo sapiens
  source 1..32742: mol_type = other DNA
gagggccgctgtcactcagccccgcgggccaatagaaaaggggtgaaccccgccttcttcctgagttgtgctgcgggcatgcgcactgggcgtccccacgccaccgcccatcagctgagaattgcagctgagggctccggggtaggtgggtgacggcggtcggaggtgtaggagggagccgtggaggtccaggtaagaggaccctggggagggggctccctggccgggcgacagggaggcgcggtgcccctgcggctgctgcgccttcttgtttgtgcgcgtggtcaggtggccgccgccctgcgctctgcagcaggcactcgggaggctaggaagggcgggactgccccagctcccggagcgcctgcggctccccacgccccccggccgggtgcaagggcgcggcgcgttccgcattccgggtgcgcgcggctgtggtcaggtgggcctacccagccacgcacccgccgcggtcccctgggcagagctccggaggcgcacggctggcggagcgcaccccggggagggcgccagagccggctggggcccagctcaggaatccagacacgaccaaatgacctcttcctcttttcaactcacggattgaaaaacacactaaacttcccgaatatagaggaactgaaaaatgtatggctgtagcaggcgaaccgtgtatgtttatttattcagaggatcgtagtattgtttttttaatttggcttgatgactttaacatactttgacattctttgagtatacacctttaattaatttacataaaaacctttaaacgtacataaaatatttctagtatttcctccaccttgttttctagttactttctttaaattcagacaaagaaaaaaagttgcatttctgatcaaatgctgtgtgttttttcccacaaatttcttacatttgtttggctcttatctgtatacgttaatttttgtttacctcagatcgttgtattctgactataattatatataatatataaaacttgcccagaatctggaagaaaagaaagtaattatgaaatgctgtgctatttaataatgttggaagtggacatttcttctgcaggttctctgagcacacctgggcagaggctgataacggtgttaaactgtgttttgtgttgtggacaggccttataggctactttgagaagttggcctcagactcgtgactagttaagaattatgctcttaacttcacagtttctgtagaggttaatatgataccatattaactgattaacatcataatttttcctcagatatgttacttatgttgctcttgataacaaaatcaatccttattttggttatgaccccaaactttaagtgctgatgattgaaaagtaaattatagaaaatattcacagtaagtctgagtgaagtttgctgtgattccatttaatttgcaagtttcatgtgtgaaagtatgaaaaaaacaatcctcggtattgtgaactaaaaccaagtagtacaaaaggtcagtgatgaaagagctaaggccaaagaatacagttaatgtagtttttgcagaggatacttatgtagacagagcaccctcacattccttgagcatttactatgcaccaggcactgtagattacacaggatgacaaggtcatctctctcctgtttatattccagaagtagctcctgtttgtattccagaggtgtagggataaataataaacagtgattaattcgacttttgagtattgtgaagcagtaagttagattgacaaagagtgaccagtggtgagttctcactttcatatcagagtggtcacaaaggtttctctagcatgtgatgaggccttgctggggagaaggagccagtcacgtggagatcatgggaagagccttctagaaataggaaatggcacccagcaaaggcccaaggcagcaagaagcctgggaccttcggtatctgaaagaaggcactggaattttatgttttggaaatggtaatatttaccctcacgctgggtgtgtgttcttaggaggtgggtacattcattcattctacaaatgtttgttaagcacttgtgatgtagccaggcagtgagaatagtgcagtccacaaaacagacaaaaaaatgctcaccccccacccctcagaacttacttggggtagagggtatagagaagtccagttgtttatgctgatgctaatgattaagaaagtgaaattgactacttctttgcccagggtagatttatagagcatgagatatatgctaaatggaaatcttaaggattctacagtatatcggattttaactgggagtagtgtttgacacttcaagattaaattttaacattccttttgttcattcctttgtgttctttagaagccgtcttgagaagactctcatctgagtgttgcactttgattctcccttcctgtttttctctttatagtgtttgtatatcttcatagaaagatgattattgcaatgtggagattagcactgtgcaatagatctttctgtgataatggaagtggtctatgaatgagctgtccaagctgctggccactagccacacagaatttttgaacatttgaaaggtgtctagtgtgactgaggaactgatttttttcatttaacttaattttaattaattttaattttttaaaaacgagagctacaatgtaatttaagtgatacacaatataaaatggtgtaaattgtcacatgaaaaaatgaaatgtagagtaaaagtgtagtttcttactgcaatcagttatcttgttagcagcttaaaataacctgtaataagatttttttgcttttattattttaatcgacagataatgatttacatatttgtggatacatgtgatacatcagtagatgtgtacaatgtgtaatgatcaaatcagggtaattagcatatccattacctcaaacatttaacatttctttgtgttaagagcattcacaattcattctttcttctaagtatttgaaaatatgcaataaattgtaattaattgtagtcaccttttaggggtatagaacactagacttcattcctcctacctagctgtattttggtgttagttaaccaacctttggctatccccttcccgccatccttctctgcttctagtaaccactataattttaacagcccatttagttagtggctagtctgttagtacaggtctaggtaatgaattatataattattattctgagcaattaaataggaattctgagtgggctttcaaaagtattcaacaagagtactttagtgcgtagcagctctgggctaggtaatggagactgatgtggaaagcagacatctgaataactcagcatccatttagcctatatgcagagatcataagcttttaatcaatttgtagttacctatcctgtctgtctatgcttgtatatatattttttaaagacaaccatttggttcctttcctttgtgtgtctcattatcaaaagagccaactgttgttgccttttagataccacttattagcagaataatagagaaaaggagtaagctattcctctgtgttaccttgatcaactcatgtagttatcccaaacatattccttcatcttaggagtgggaatagcaaaacttcatatggggcatgcagaaaagtggtaaatttggtttttcttttgtctttttttattttatgttatgttatgttatgttatgttatgttatgttatgttatgttatgttatgttatgttattttgagacgagtctcgctctgtcgccgggctggagtgcagtggcgtgatcttggctcactgcaacctccgcctcctgggttcaagcgattgtcctgcctcagcctcctgagtagctggcactacaggcgcatgccaccacacccagttaatttttttagtagagatgagatttcaccatgttggccaggatggtctcaatctcttgaccttgtcatctgcctgtcttggccttccaaagttccgggattacaggcgtgagccaccgcgcccagcccaaatttggtttttctaactgagttcacctgccctcaattttgttatacaaggaagcagtatggcttagtgtttaaaaaatgtcggctctgtggttattttcaaatatttgctcctttgcttataatgataatgaggcataatgatatgcctcagtttcttcatgtaaaaaaatcacattagcaattatacccacatgataggcttataagaattaactgagaaaataaatttaaaagtcataagcacaatgcttaggaaatgtaagtcctggatgagtgttggccattgttaactttgttttattttacacatctttcttctctatcttttgcaaattgcttttcattcttcacacatgattcctggctagatacagtggctcaaacctgtaatcccagcactttgggaggctgagactggaggatcgcatgagcccaggagttcaagaccagtctgggcaacaaagtgagacccccatctctataaaaaaatcaaaaaattagtgggatgtggtggcaggtgcctgtggacccagctactcgggatgctgagatgggaggattgcctgagcctggaagtcagggctgcagtgagtcgtaatcacaccactgcactccagcctgggtgctcctgtctcaaacaacaacaacgccaaacaaagaaaaagtaaaacaaaactcataattccagtcaatctaagtagcacctctttgggtgaatgaagccacttgccaattgtctcaccagcaggaactttctcacatttagtagcttgaggaaagggatgaagaaaattgattgtgtttgtgactaagtgattgattttccagagaggaaaaaaggtggccttgaaagaaaacagtgagaagacttgggctacactggtgtgagttttaagggtaaggaaaatgctgtagaatactgtccttgacttgatggaactctttatgggagagagagtaggcctcaggtgtgcttgcatggttttgagacaggtgatgagtttctcttggtcttgtgctgatgctggtcctgcagctgcaagaacagatcataactttcctctgtgtagggtggaaaagcatttgttctctggatgtgcattatctcattttgattctggcagtgggcccaaatgctaagtgtcttgcccaaagtagaaatttccagttgctacttccatggtgtgccgcacaggcaatggctgagttcttgtagcttcacagacatgtagacacgagagaaagccaagggtacgagctggagacatggatgtgcgactcattcaggtatagattaaaatggaaccatgtatatggaggagcatccccagagattacatgaataacaaactgaacattttttcattcaatgtgtttgttttggcttgtaagccagtttttccagagatctacttgatagagggaaaggagaaaggaagatgtcattgaaccaagagaaaattgtctttctccataccttggaatattatttggcaataatgaaggaatattatttggcaataatgaaggaatgaaggactgatatatgatacagcacagatggactttggaagcatactaagagaaagaagctagtctcgaagaacacattgtatgattccattcctatgaaatgtccagaatagcaaagctataaagatacaaagtagattagtagtcacctttggccagtgaggttggggagaaatggagagcgattgctaatgattacaaactttccttttagcgtaatagaaatgttctaaaagtgatgattgtacaatgttgtaaatatattaaaaaccattggcttgtgtacttcaagtaggtgtattgtattgccatatctcaataaattatatctcaataaagccattttatttatataaatttaaggggtgcacatgcagttttgttacatggttatattgcatagcgtgaagtctgggcttttagtgtaatcatcacctgaataatgtacattgtacgcattaagtaatttctcatccctcaccctcccatccttttgagtctccaatgtcttcttattccactctctgtccatgtgtacacattatttaggttccacttacaagtgagaacatgcagcatttgacttttttctgagtcatttcacttaagataatggcctccagttcatctgtgttgctgtgaaagacataacttcagtcttttttaaggttgaatagtattccattgcatttatatacactacattttctttatccattcaggaatgttaatagacacttgatgggcacttaggttaattccaaatctttgttcttgtgaatattgctacaatagacatatgagtgcagattatctttttggtataatggttttttttttcttttgggtagatacccagtaacgaggttactggatcaaatattaattctatttttagttctttgatgacttgccatgctgttttctgtagaggttgtactactttacagtctcaccaacagtgtgtgtgttcctgtttctctgcattcttgccaacatctgtacttgtttgactttttttcttttttttccgttcaagatgtgtttgtggatgaatttttaatagccattctgactgttgtgagatgatgtctcattgtggtattaatttgcatttatctggtgcttactgatgttaaacatttttcatgtgcttcttggccatttgtatgtcttcttttgaaaaatgtctattcatgtgctttgccccctttttaatggggttatttgtggggttttttgttgagttgtttgagtttcttgtaaattctggatattaatctcgttggatgtgtagtttgcagatatttttctcccattctgcaggttgtctgttcattctgtttattatttcttttgctgtgcaaaagctttttagtttaattaaatctcattttgtctgttttttgtcttgttgcctgtgcttttgaggtcttagtcataaattcttttcctaaaccaatgtccagaagagttttccctatattttcttttagtattttaatcgttttaggtattacttttaagtctttaatccatcttgagtcgatttttttttttatatgttgacagataagggtccagtttcactcttccgcatggggcgatccaattttcccagcaccatgtattgaaaagggcgtcctttcctcagtgtatgtttttgtcaactttgtcaaaaagatcaattgactgtagatatgtgactttacttctgacttctctattccattccattgttctatgtgtctgtttttatatgaatatcatgctgttttagttactatacccttttagtataatttgaggtcaggcaatgagatgcctccagctttgttctttttcttaaaattgctttggctattcaaaacctgtgtttttttttttttttttttttttttaagtgacttggagatgcatttaaaattgcatggtttcaaggatgttccggatggtgttggtgtcattgaatccccatgtctactcttgttctgtctgggcccaagtccaaggctacctggaaggaagtttattcctgtctccccactgtagtggtccagctgtctgactttaggtttgaatttaccctttaatgaaattgcttttggatccatctctaggatttggtgagacccagagagcccagaatagatcagctgtacctgagagggaagttggagaatatctaaaagccaccaggactttcagcgtggccaggcacattcaaagtgcaccagagttccaggcatagaaccagtactgttctaatggtctcaacagttcagctgttgtacttcctgccaacactgtcccttagagcaaagacacatacttcactgtggcttcttctctaccagaaatcttctgtggcattagttctatgtggtagcaagcatggatagccttggcatcagaaccctgggactgaatctcacctccacctgtgggtgggttgggttaccattacttaatcataataagcccgctgtttgctcatcattaaaacaagaataatgccacttaattgaaggaggttgtgaaaaaattagtctgtgaaatactttttgtgtcgcagatgtgcgagaaatgttaggccattcctctctttccctttatgttgttttccccttgtcccagctgtgaatcatctgatccagggttggccaggaaccttcccttccttttgtaaataccatactgcatgtggcctttccacgtgctctgggtctctccaccccagccttcacgtccttgcctttgttgttctgcatactggtcataaccaagcatccaaatcctatgtttctatttcataaattctttccagacaaggatgatggtcattttttctttttgtagcccttctcattttagcctagcacgtgatcttttatggatttgtggggttttttgttggtttgcattattaactttatccttcctcctaaatgacaaacttgatttgagcagatactgtgtcagtgtgttttgttttgtttgcatctcccaggtgcttagtttaatgctgggcatgtaccaggctcttagtagagagctagcttacaaattgaccaccaacaattttgcagtattccagtgcatattcatggaaaagatggggtggcggtagttgaaattctttgctgtgcgcagttctgtatgcagggacattccttttcaaccttctttccaaaccctgattggagtggtgtggattgaagaggtagagaatgtcatctcacctgcctcctgtggcagtatctcagtgtctcttctattctgagatgctggctgctgaaaggggagagtcattcgttctccttcctctgtcaggaaggtttgataaacattttatatgacatttgcttcgcagtagttggctctgctatttcagatttaaccttttccattaaaattagagccctattaatcatacattcctgagcaggtcctgtgtgtgtgttaaattagatattaaggttggtacaaaagtaattgccatttttaccattacttttaatggcaaaaaccacaattaaaagtaatggtaaaaactgcaattacttttgcacaacctaatacagtgaaatttctggggatagcctgaagtctgtgttccatttaataaatatttaaatgcctgtttgtgctaagagttgttttaaatattggagaaagataaataagcatgtgggccctgccttataattgtttggagtttagttaaggaaaaaatatgtaaacaactaaaattatatacaggtaagggatttaataatttttcttgaagagatcaaagacgttttcaaaggaaatatgcaatttgaaccttattttaattgtttgatgtgtttaacatgactctgtcctttgaagtccagtttttttttttttagtagacatgagagttttgctatttgatgtgtcactttgccagatttcaactctattagattaatcaagtttgtccttgtaacttcacagattgttaatttggaaaatgtaagccagtaacttaaaaaatatatctgtgtgacttttatattatttaggtgactgcttagaaaactgcacagcatctgatgaaattagcgaataagaacatcaaccatgtcttacactccaggagttggtggtgaccccgcccagttggcccagaggatctcttctaacatccagaagatcacacagtgttgtgagttgagttttaaatggacttcactatttgtatccactcttaactgaacttggtggaggttcataaaaggacaactctgctgattgagagagggaggagcattcctctaacaacaggttttaaagggctcgaactctttagaatgaatgcaagagaattatatttgagataacacttactgcatttttctataggaagtcagggccaggcacataatacattatttcattaaataaaataaagatttaaaaggataatggattcttatatctgctttaaagctatctggttctagatgagatgatgagacctgatgactcagtctcataggtttggaaccaggtagcactaccaagggcttaaggaacataaagtttattaaaaataaaatctgactggatatggattaggttaatcttatgatgggcaagtatgtggtaccttattaaggagcaagaggaactaaggagaggacgttttaatctattgaggaaggtattttagaaaatcagacctgcattccccacatattcttttttttttttagagacagcctcactctgtcgcccaggctggagtgcagtggtacgatcttggctcactgcaagctccgcctcccaggttcacaccattctcctgcctcagcctccccagtagctgggactacaggcgcccgccaccacgcccggctaattttttgtatttttagtagagacggggtttcaccgtgttagccaggatggtctcgatctcctgacttcgtgatcctcccgcctcagcctcctaaagtgctgggattacaggcgtgagccaccgcgcccggccaaattattctttgctatacttgtcagagatagattaccagtagactgatgcagtgtggcacttcattcggaagtattcatcgtcaggatatgtattaaaaaaatcattatagcagatttgagtggataggtttttatttttttatttttttttacttttttttgtttgtaaattatggttaatcagataccttgggtgattctagtcttgctctcagggtttggccctcggggcattacctgaactctttcatccttcggagtatgttaatatagttttattcttcagcctagttccttacaaggctattctttttaacagaatgttaacacattgcagaaatagtgttttcaaatgaccatactctgtttctttatctaatcattaactcctcaacagctgttcctctacctgaattatttaaatgagatgctagtgtgttttaggagcaaagagaataaaactagactctaaaaaggtgctgctgtgcacagtggtataaaataacccttattctgatttggggtgatttctgggttttttacctatttctggaagaacaaggaagtgcacagtgccaggcaccacgttgtccacagcagggactgtaggaatggtacattgagaactgctgcagtttgtcacaggccaccggcgttggctctgctttgctcctctggcatcagatctgttctgatggtggccacagaagagcctctttccttttcttttttttttttaatggctcccttgctgctggttagaaatagcactggtctgccccaagtgtatctggctacctgtgcaaaaattaaggaagtttataattctaattacatatgtggaaaattaggacctttatgcaagaaaggaggccaagaggcctttctccaaagaagaggataagcatcctgtgttgggaaagctaaacagtgttaggaattgaggatgaggaatgactgtcctgtactgagattgtagaagtagcaagcagtaggtagtatgaaagatacatggattgaagattgtgtgtgaacatgaactggaaggagaaaagagttgacttaaatcaggccatgttccctaagaaagagatcagttgatccagaggatgagaagtgacagattgggccagagttgaatatttatggcaggttggtagctaagtgtgcgagtacatccggggcagtattggatcatgtgaaggtctggctatgatactccacagtctatgtgaagagctgttaagaagactgggactgttggcagggcatggtggctcacacctgtaatcccagcactttgggaggccgaggcaggcagatcacgggaggtcaggagttcgagaccagcctgaccaacatggagaaaccctgtctctactaaaaatacaaaattagctgggcctgttgtggcatatgcctgtaatcccagctacttgggaggcagaggcaggggaatcgcttgaacctgggaggcggaggttgcagtgatcacgccattgaactccagcctgggcaacaagagcaaaactccatttcaaaaaaaaaaaaaagacagggactgttcatgcaggtgaaggtacagtcaccatctgcagatgtttgaatcactgtcatatgtgaaacagaagccatatgtcctgcatgaacataggggcctccacaaatgtacggaagctacaggtagtcagatttcaccttgagaaggaggaagggcttttgaataatccaagttgttaaggtagaattgcctccctcaggaggaatgagattccttatcagtgaccagaaaaaggatggtcagatatttctcagacttattaataagaattttaaacataggaataatggttcagactaagagggttttaattttgatattctattgtgattcattcaacaaataatttttgggatacatagtacttgctagatactgttccaaactgtaggaatgtagcagtaaacaatctataaggtcctgctctcattgtagtttacagtgtagtaaggagaaataatgagcaacttaactttctgtaaagaaaatatagtgaaagtgaggtgagagcaagtgactggggaagctacctttactttagatggtctttgaatgaggatgaggagggactggtagtgagaagattcagagaaagggcatttcagacagaaggaataactagcattaaaaattcaaaagcagacctgggcttgaaatactcagaaaatagggaaaagggaaaaagctagtgtggctgaagcacagcatctggggcaagagtgccaggagatgaaaccagaggggtctggcgggtcagctggggccttgcaggtggttcaggaagtttagatttcattttaagaggcagtggaaatcactggaggcatttaagcagaggagagacataatcagatctacactgtgaaaaaattactttggctgctgcttagaaaatagacattgagggaatagcagggaggtatgctggtcatcacagaggtctggggagagctcggatgctggcttgcaccagggtgatggcagtggggatggagagaagcaatgagtgtgttttggaggtagagccagcgggacttgctgatgcatgtgggtagggatggtagaggaaggaaggagttaaagatgactccatagtttttgcattgagcaaccgactaggtggtggcaagtgtgtactgaaacgggagggactacagttcaggacaagtaggggagagttttgttttgactaagtatattttgagatatcatttagatatctaagtggagatatcaaacatctactttagatacaggaatttggaagtcagagtgtcctcagagtataaatggtatttaaaaccataggtgtaaagtaatcacgtaagagtgaggaaagagaagaggcctggaacattaaaaaatgtggaaatcaggaaggtagcatgaagaatctaaggagtgacctgtgaggtaagataaaaatcaagatgtggtagatttctagaaattaaagaatgtttcaagaatgagtgaggcattatctctccctaatgctgctgagagactaagataaaagcagataattggatttggtaaactggtgactttgaaaagaacattctcatagccatattgcaagtgtagatggaggaagggaaggagaagcacccactctttccattttaaagagactttccagattttctcctcatctctgcttatgtcattgatcaggtggctacacctagctgccagagaggctgaaaacatcttagcaggatttcagtgtgctcactaaaattggggattattctatttgagaaagaaggatgagagaatcaatatttagtaggcaactagcagactctgctatgaaagtagaaagaggatcaaagaaagggttccattttacactgcaacagagaaattctggtaagcgtataattgcaaaggaaatgttttgaaagtgagggcatgggaatggaccactagcaagttcacatttcatccaccgtatagaggtgaggctacgtgtggtacagatggaaacatggtgggcaaacatgggagatttcctgtttgagtgggtctgttcttaaatgaaatgggaagcaaggtcatcagatagagaatgggcgggaaagaagggggtttagcaaatgtgttgagtatacatttaagatttggggccatgaatttagtgaaaccagtcatcactgtactttttctaattctgagattcaatgtctaaatgaaggggagtttagattagataaagtattgttaaaaatctaactactgtcaagtatgtgtactgataagggctatgcagaaatcacgtggaagtgaaaggcagaagtgtgaaatttcagttcacttttttccccatttggtaatgctaataatactgggtgcgattgaataaaatgatactttgcaccacatttaggttctcttcacactacatttgcaacttttgaaattgtgtcagtacaattatctgattttacaaaagaaacctaaagagaagatgctgtaagtaaggtaacctgtaattagaatatgagcatctgttaaactaaagctaaagtcttcttgagtgttgcagtgggaaagtttattttcacattagttttgatgaaataaacacttataaaatattaagttttatggtttagtttatacccccaaaaaaggaaaatggcagtcaaaaatatttttaaaccatttttttggtttaagaccatctgcagtcttttgaatttgtttcaccagtaaagcatttaaaccatattataatgatataatttatattaagcataaaatatttaaatattgtaaatgcttacatgtaaaataaattagaaatttaattatattaaaataataaaactggtaaatagttataacaaactatgactttattacaggctctgtagacagtttaaaatgattaagaaaatatttgtatcctatgagagaaagcgttgactccgtaacagtcaacaaggcccttgtgccacccatgctccatcttttacccatggcatagacagtattctctgttgctggcctagcatgccatccagtctttttcaacccaaggctccaggcaaccattcccagtagactggagttggcaggcaaacaaaatcgtttgttatcacaggtctagaagatcaccatgcctcttagaaaggcttagatttagttttcaaactttggattgagatgttcaaaagtgacatttttattagcaacatctatgcctgtttaccttctatcatttctccatattttctgtcagacatactcctagctgtgatgtatagtataaggataagcaagcctttgtgggtttataagtataaggtacctatcatataggtaaaccagagtaggcattttcacaagggccattcatccttgcccaaacacaaacaacatagaaaaatgtcttgagaacacacagagaaactcatgtttttaaaagcagcagaatcaatatatcaaaatacatcacataagtaaacacaggcttgctttttcagactttttaaaaatggaagtataatgtatacattgagtactagacaaattatttgtgtatagctgaatgaattttctattgtattaccacaaatgtcaagaaatagaacattccttagtcccctaaaaccttcttgtgcttacaccccttcatgcccttcggagataaccagtgtcctgactttgttaacatcattgattaattttcctttttttaatctaatagaatcaataatcaaatagaattattttatgttgggcttctttcattatgtttgtgggattcatccatgcagctgcaggtcatttgttttcgttactgtatagtattccatatttaaacatactacaatttatttattctttctactggttgtagtgtttccagtttttgattttgtttttattttttgctaggatgaacaatgcttcccagaacattcttatatgttcttttggtgcatgtatgtgaaggaattgggttactggctcataggatatgtttatgttcagcttttgtggataacagctaaacagtgtcctaaagtggttgtaccagatatgagtacagccagtgtatcagagtttgtgctgctcaaagtccttgtcaacatttgatgtttacagctttttattcattttagtcataggtttctcatgatttactttgcaattctctgattagaatcagagtttttagagtgtagctgagctaaagaaatcaatgagataatcggaaacatttctaatcaagcaagctgtatgtgattgcatgtacatttcctgaaatcagatccaaatagcggtgtgaccttgagtaagctctcgaaccttccaagacatggttttctcatgtgtattttctgtgggctaggttatggtctcttcaaactttaacaggcaataattctaaccaaagttttttaagagtcccgaaactcttctaacaggtacaagattattctatgttttgttaagaggctgattgccatatctgaatccataatgcatgctcataaaatcccataattgaagaagccatcacactcaagactagctagagttccaccaaggcttatgtattatttttaagtgttaggagatgggaaagctggggcacagaggtttgtatcctgtcagaattaacaaaattttgtattgaaggaaattggtgaatagaaatgagaatagctatgaaacacagtccttgagataaaaatttccctaactcctaaataacatagtaagcctttccactagtgctaatgtgaattctcgcatttgagtatttttttttaaaataataacctgaaagaggaagatgtagtgtggctaaagttggaaagtgaataaaacagatatattggaaacataaaatctactcatcagaatttatgagtatagaagtttctgctaaaatatgcatcatgtatcacatgggcttgtggatgtgtgttttttccagaaaatttggaaagacagaaccttctaggggcacataaagtatgaacgtaagcttttaagtgctaagagaaggtgactgaaaaatatttttgttgaatcttcacttgtttcatttttaatcatctctcctacagattaaaggtattagttcagcatagactttagtttaaaatcgaaacagatgtttttggtttctctgtgttataattagcttcctatgctgcaagtatacttttcaaaattgtttattaagaattggtgcatggctcctgtccccataaggttctttgagatgaaattaaaagtctatgtaaaagtgtgagcccttttgttacttttagaatgatcacagttcttttaattagttagggtctggtgaaggggacacttgtttttgcattttaacacatgactgcacaaaagggaagctaatattatcacttttttttttggtgccagggcaaatatttttttaaaaaaggagctccagtcctgagaaattaatgaatttactggaaccatatatttactcaggaattaagaatgtttcctttttttctggggtaatctgttggtgggatgggaaggcagtttattaaaggaaaaagagttgaaaaattgttgcttccctcctcctaaaatgctgtttgaaatatttatgtctaagattgcacatctgaaaatgtggttggatggttttttcccccacttagaggagaaaaacttcagtagtttttatttcattgtgattttcttcatgcctaaggtgctaacataaaacagagatagatgtgaaagttgctatcttgtccaaggaaattttaacagagtgtgacaacttttcttctcttcagtgacttttcctttatgactgaacatggtgtttatggccggatatgagtgaattctttgttttatgaactaaatctttaagatgtggctccaagatgcttcaaggagctttatccctcactctcctatctgtgaaccatacatatgcttctgccctgaacatgaactttcttacccttggttccaaccccaaaccatagtaatgggtgtcttcactccctctgtttaatctaagtgtaaatcttagtggttctaccggtcagatctgtctgtgtctctccatctctgccattaccacatatgctcaagctgctgctatttctttggatgactgcagtctccaaattgttctcctcacttccattcctgcctctttccgtcttctccaaatagttgccaaggtaaacctgtaaaactgtaaatcagatcatgtcatcctatagcttgaaaggcaacagttaaattctgtggcttttataatcagatataaatccccaccatgccccacaatatcctcaagatctgatccctgcccccacttgtcaactaccactctctcccatggtgctgctctgctgctccacattccaccaggtagatcttctttctgcttagtgaacagtcagctcatcctcacctcagggcctttgcacttgctcctcttctgcttcagacatcttcccagatctacatgtaactggtttctttctggcattcaggtcttagggcccaaagctcacttgtttagcaatgtcttccctgccttatcattttgcttcctccagtcattctttttctcattaacctgttttgtttttatattgccttttatcagtaaattaaagtactattattgtttacttatttttttactttcctactaaaaccttggcccccagagataaagggctcatgtcttggctacagaagtatttacacataattttattcgttcattttttaatgaaattgagatcacactatacaggttttttggtgcttactttttttttctcttgttattggttgcttacttttttatgtggttatgccattaaatgattttaattaatccttcattaacagacattttatcctaagtgtatatgtttaaaaacctgagaacctaaccatttgtggtgcctccacaaatgaatcctctgagttctctgtagataaagtgtcatggtgaccatgtgataaaaatcctcatgtgtatgttttgatactacatttatttaagaatttctataataatgactagttattttccaacatgatctatgctcagtaattgtatgacagggtagtttctctttgattacacatattcatggttagttgtgtagtggctactcaactgccctgtgaggctgtccctctgtacattttggttgatttggtgctgaagtaggaatcgaacagtataagttaagcttggcatttagttttggtttcctgtagtgattttggcaattatggtcctcatctctttgatccctttttgttgttttcaccaattactgaacaatgtttttattaaacagtgtattagtccattctcacattgctaataaagacatacctgagactgggtagcttataaagaaaaagaggtgtaatggatcacatttccacatggctggggaggcctcacaatcatggcggaagacgaaggaaaagcatggggacttcttacatggccatgggcaagagaggacttgtgcaggggagctcccctttataaatccatcagatctcatgagacttattcactatcatgagaacagcacaggaatgaccaccctcatgatccaattatctcccactgggtccctctcacaacatgtgggagttgtgggagctacaattcaagatgtggtttgggtggggacacagccaaaccatatcaaacagtgattgccctttatacttaatccaaactttttttcttaaagcaattgttaattggtgtgcctattagttgcttaggaaaaaactagaagtcatacaagatattattctgcaagtcttggtacatttattttcctactcttctttctcattatagtatcattatcattatcattatttgaagttacgtattaatgatattgagtatggccacctacttctttaagatagtttgccttttattccatataaagtcaaagaaaatgcccacagacatcaccaagatactgtcctagtctgtggactgttctcctgcttgggagcatggaaaccttcaacagatatccagccaaggcctgcttatttgtgaatacccagtacactgccttgctgctgggcatgggaggagagtggggcagggtggcccaagtacacccagtgattttagttgtatggtatttcctatataccctgctttgttcaataatctctttctggaagatatgtaagctagtattttaaaactatttttaattaactgtttactttgtgccttgtattaggtatcttttattcctttttttgtgcattgcttttgatcttccagtcaccctggtcaggtgagaaaatttaggtttggagtggttgtcacttgctcaagtttgtacaactgttaagtggcaaagctggtatttgagcccaggagagtctggttcatataacatggtgtatttggatcatgctgtatattgtaccagggtgttacttgtgcatttatgttcattccctgtgtgagtatttattaaacacctgtgatgtgctagggactgtctggatgctgaagctatgtcagcgaataaaataaaaatacctgcctttatggagtgaacctttaatgagagaagacagacataaaataaataagtaaattatgtcatatgttagaaggagatgttaagtgttacaaaaagaaacaatgacaaaaacataccggcatgtgctggagaggggtttgcatttgataaatagggtgcacggggagttgggatggaccatactgaggagttcctcgttgagcacatatttgaaggaaggaagggaatgtgtcccacagtatctagggaaagagtattttagatggggaaatagcatgtccatgggccctcagagttaagcacccctggccattagaggaatggagaggagggaagagagagagttggtaccaggtcaggtagggccttgcaggctggtgtaaggacttttactctgggtggagcaagggttatgaggagaggagtgcagtgctggtgcagaggcagtgcaatgttggactcaaccagaattttagattttgtcaagtggttaagaagggagagaggggcttaagatatatgcaagagtctggatatggactgactccagagtttaagttggttagggagtgggtgacgacattggaggtgaggaaatgtggcagagtggcaggatcaatggatggcaggttggagttggggccaggggagtgagctggacatgcaggaggtgatttctaagtagattgcctgaaaccaagattatggaagagtgacagttcctggtaatgagaaggtgtttgatgggatcttggagtgtgtggctgagggagggtggaggacagaatcatttcagtaggagacgtgtgcaaagaatggaggccagcaggatggtggaaggatcgtcagcctgtgtattgaaatcacaaaaaaattaagataggagtcatgttggacagaatggcagcgagccagaaactacaaccaatgaagagtgaggggcggcccaaggaacctaaaatgactaaacctgcagtgggtggtgatcatgaggcctgatgtgttctgcgtctgtctgttattgtgcttcttgtcatggggtctttatttttgaatttgtccttcttttctgagttccttcagtctctagttagtcagtgcatgcatgttatctggccatctcttaagagttcttttgtgatcttcctttaaactgtgattacttcattgagttttttttttttcttttaatcctgtgggtattttggggtataatttttaccatattcactttgtggcaacatgttctcctgctgtgagttcttttagggagttttactgttcttttccacattttaaaatagtcttttgtgtggttactctccccatttttttttgtttttcaatggaatgagtttgattttcctggcaggagattcctgtggagggagagggaagtgcccatttctctgctcaagggctctattctctctgctgtgctgtgctgtgctgtgctgtgctgtgctgtgctgtgctgtgctgtgctgtgctgcactgagggactgtttctttcctcctctgcctctcagcccctagcctggtgtaggagggcttcccgctccatccctgatgtcatcccaatcacttcatcggccccaagatgcacagacacctctttccaaggtgttccccacctggtttttgagtagggtcggcagcccatggcctcctgaatctgttccgtgtctccttttcccaccttctccagcagagtccccggtgcttctcagccctgcttctgcccattctcactctgggtgggatcagctcttctgatgatttgctggtgacagtgtggagctctgcaaccccggttattctccgccccacccatacggcttcctgctcaggacctgctattttctgttgcttttggccgtatgtacacgtttttgagaatttggtcatatttacacattttgtgttaatttctctgaaaatgtaatttttatgggttttctacctgctcccccattctataatatgccttgaggagggaagaaggaggaatattcagaaacatgcttctaccgtgtttctataagaagcagaaatcgattttcagtgttttagaaacagctgccagcatgtgttggcagttagaactgatcagaaatgactgaagtaaaaggtttgggaatcactgcctgtaaactagaggggaactcgtgacaacaattcagctgcttttggagcagtaggagaattattgggccctcgagtggatgacaggaaggaagctcatcatgatgggcaaaagatgtgtcagcggggttggggaattgcaaggcgcaaggcctcaccactgcccagtcctttcctgtttgcttcttacacaaatcacattgttatggaaccgttgttgcttctgattccagactacctcagagcaggtaaactgagcagatccatgtgaaaaatgttaggatgaataaatttgctaaaagacccagcttgtaatgttccagccatctagaagtccaaattattgtttacatacaattttagatgacttgtttttgtactttatttttaagaactgtgccctcagatttaaccctttattaatctacaatagctttaaaatgcccccaaatttccactgatttgacctttatgcctttctacctttaaagtatccgggaagagaaccaatgacaaagtgaaaattaagtgtgttgtaaatttgagattgctttgtggaagcgggctatgccttcagatattctgtgctgggaaggggagcacaggaagccagtgtagttgggccttgcgggtggatgctctccattgagcttccagcctcgagactcatcctttagaagatccttctccatctcccttcccacactttctcgtctctgcagtttggatcagtgcttttgctcacaaagaagacaagtgttctcttcaggtcataagacagagcatgagatatactagtgctagaggggaaaagccagaattattttagtagccatccttcacattctccaggaagtttttctacttgtgatacactttttagaattttaatacacttttcttggtttttcttgaaaaatagatagacatgggtatttctaatgatacatttttctctacacattgtaccctataacgaacctggatcctaactctaattgtacaagacttattagtaataacatcttgtacttttattcttacaaagatctatgccatttctaaaatgtttacatatatatcatcctttttttttttttttttttttttttaagacagagtcccactctgttgcccaggctggagtgcagtggcacaatcttggctcactgcaacctcttcctctgggttcaagctattcttgtgcttcagcctctcgagtagcttggactacaggggtgtgccaccatacttggctaatttttgtatctttagaagagatgggttttcgccatgttggccaggttggtctcgaactcctggcctcaagtgatctgcttaccttggcctcccaaagtgctgggattacaggcacgagccactgcgcctggcctatatcactttgtttaacactccaaaccaccctctaacaaagctagagggtttgatagacgaggaaagattggagtctaaaacagagtttgtttctttcaatatttagattttttttctagtcctgttttaaatatgtcacttatatgcaactgctagatacatgtcactggcacatagtagctgactcctccctcccaattacgggctataactatcttttgtcaattgatatttatcatctctacaattcttataattatatcatagattattaagtattagcactcaagtatggttcacattagatagtcaagaaatgtaaataagaagctgaacacttaaaaaaaactgagaactccctcataagacagttttaaaatacatggagcaaacactgacaaaactgcaaggaaaatagacaaagccacaattatggctttcggtacccttctctgaataattgataaaacaagtagatacaaaatcaggatacagaagattcaaagtactaatcaccttgatggtgacagccacttatagaacagtctattcaacaacagcagaacacacgtttttctcaagtgcacccagaacatttattaagatagactctattcctgtcattaatcaagagtttcaacaaactttaaaagattcaagtcatacaagataatattccttgactacagtgaaattaaattagaactcagtaacagaaagatccctggaaaatcccctaatgtttgaaaaccaaacacatttcaaataagctatggatcaaagagaaagccaaaaagaggaattggaaaatattctgaactgaacgtaaatgaaagcatcacatatcagaatttgttggatggtattaactcagtacttaagggagcactaaacacctgtattagaaaagaagacaggtctcaaatcatgacgtcagttttcaccctaagaaatttagaaaaaacaaccgaaattgcaaagtcagcagaacaaaggaaatacaaatcatagtggaaatcgaagggagaaaaaaaatcaatgaaaccaaaagctatttctttgagatcaatagaactgataaacatctaaccagactgaacatgaaaaaaatagaagaaacaaattactaatatcaggaatgagagagatgatatattataaattctacatattttatatgtaaaaatctatacatatttacatatattctgtacattacagaatctatcatatatttaaaggttttttcctttgaaatggtttttattttatttatttcactttaagctctgggatacatgtgcagaacgtgcagggttgttacataggtatacatgtgccatggtggtttgctgcacctactaacccatcatctaggttttaagtcccacatgcattaggtatttgtcctaatgctctccctcccctgcccctcatcccctgacaggccctggtgtgtgatgttcccctccctgtgtccatgtgttctcattgttcaactcccacttatgagtgagaacatgcagtatttgcttttctgttcctgtgttagtttgctgaaagtgatggtttccagcttcatccatatccctgcaaaggacatgaactcattttttttatggctgcaattaagagagtattataaacaactttatgacaataaagttgacatcttagatgaaatggataaattccttgatagacacaaattatcaaagttcactcaaaaagaagtcagtaacctgcctagctctatatcaagaaattgaaattacaacttaaaaccttctcacaaagaaccagactcaaatatcttcactaatgtaatctatcaaatatttaactaattgtacacaaactgttccaaaaaattgaagaattcgttttagcaggtcagcataatccttatattgaaaccagataaagacagtaaaagaagagaacactactaggctgggtgcagtggttcatgcctgtaatcccagcactttgggaggctgaggctggcgaatcacctgatgtcgggagttcaagacaagcctggccaatatggtgaaactctgtctctactaaaagtacaaaaaattagctgggcatggtggcgggcacctgtaatcccagctacttgggagactgaggcaggagaatcgcttgaactggcagcaggaggttccagtaagctgaggtcacgccactgcactccaggctgggcatgacagagcaagactctgtctcaaaaaaaaaaaaaaaaaacccagaaaaaaacactacacatccatttcatctcatgacataaatgcagaaaatttaaacaaaatttaactaatcaaatcaccaatattttaaaaggatgtaacaagtggagtatatcccaggaattcagggttggtttaatactgaaagagcaataaatattgttcattatgttaacaaacttaaaaagaaaacctatataatcatctcaatagatgcagaaaaagcatttgacaaattctacttccattcctaacaaaaattctcagtaaactaggagtagaagtgagctctttaacctgacaaaagatcatctatgaaaacttacagagtgtcacacttaatggtgaaagacagaatgctttcctttataagatcaggaacaagacagggatgtcttgccctcaccacttctattcagaattgtactagaggatccatctagtgcagatggataatataaacaaataaaaggacttcacattaggaaaaaaagaattaaaaccatttgtattcacagacataaatgtctatgtagaaaatctgatggaatctacaatttaaaaaagcctgctagaataaaaaagtcaatttagtaagtatctgatcaatgtacaaaaataaattgtatttctctatactggcaatgagcaatcaaaataaaaatttgaaatttaaaaagctggcatttacaataacatcaaacattatgaaatacttagaaggcaatataagtgaaacacttgaacactgaacagtacaaaatattgctgaaattaaagaaagcttatataattgggaagatataccttgatcatggatcagaagacaatattgttatttgaacagacacttcaacaaagaagatatacagatgacaaataggacataaaaagatgttcaacatcattagttattaggaaaatacaaattaaaagcacggataccactattaacctatttggcaaaatttaaaagacggagcataccaagtgctggagaggatgtagaggaacagaagttttcatacactgcaggtggaagtgtaaagtggcatcactttgtaaaatagtttgactgatttaagaaagctaaatgtaacacctgtcatactatccagccgttctacttctatttatccacacacaaaaattaaatatatgcccatacaaagacttgtagggcatatacttataggagctttatttgtaatggacaaaaacgggaaacaacacaaatgtccatcaatagtgttgtatcatacagtggaatactcagcaataaaaggaatgcactattgatatacacagcatggatgaatcataaaataattaggctaacttaagccagacaccatcctttttcaaaaacgaataaatactctgtgattacatttatataaaactttagaaaatgcaaaatacagaaagcaacagaaagcatattagtgattgcttggtgatggaggggggaaggaacagatatgcaggagggaggaaattgcaaactacaacaaggaaacttttgagggtgaagaatctaataactgtcttaagtgtgatgatggttttacagatgtacacatatgtccaaacttgtaaaactatagtttatgcgctttgtcagttgtacctcaataaagtggcatttaaataaaaaacgttaataagaatattcctattattcatttctgaccttcaagagaacaacagactctgttgagcgcttactatatccagtacacggtgcctacctatattgttctcggttaaagtttatgacagctgagaaataggtgctttctcactgttgaagcaattatagcttggagacattaggtaaattgcccagggtcagcagccaggaagaagtgagatatcaggctgtctggctccaactctacttgctggtcagccttcaattgtacttcttcctcagtgtgatgtggctgagtctgtgttggaatctcaaaatcacctgtccagggattttactaaccattatttttttttctatgtttggctgttacaagttggttattttacgttgaaaacagatgttttctgctaaaagagaagatagctattcttagttatttggagacagttctttaaaggtactctgtgtgtgtgttaggttgatctgccatgccgccacagcctggccagtctcatttgtcagacagcatccatttgctggtgaagtctgacgggtggtaacattatgtattaatagcccctgataccaaattcagcctacaattttatgacaaactattctttactgtaaagcttttttcttaaataatccactagatggcagcagacccacgtggaacagaatggatcttcattgctgtagaagagccagaaacgggacactgttttgtttttgatgacccagtagtgcatctttttcggatgtgtaggaaatggtattatttttctgttatgaaaaatgtaacatactctttgaagtcacgtctgtggaagtgagtagtggtacagatagttcaaaattgtagataatgcaaaaataattttttctttgtattctcgtagagacacatgttgatttaatcctacctgtatgcattagatgaacttttcttcaagaaactgtttattcttaattctttttatggttggaaagactgcggcttgtttcatgagtttttttctttaattggacctatgccaatcaaaatagaagatgactgtcctataaattcatagcacctaaggctagataatgaagtgaaatcctacagactggacttgggagaaagtaggaggattatttatttttccagatcaccatactgcttgtcatctgactagaaacctcttatctccctttctctaagcttatttttctcaagcatttttgaacatggtcaattggggtgtcgcagaagatcctgtgaaccacatatcctactatccataccttctagaaggggaagaacttaggagatggccaaaaaccagagagtaataacatgatagagtgctaacaatatttttgcagcaaatatgctataaaaatgctcatccaaaacaatgaaaaagtgttttgtttctaaattagtataagagcagcagatgaaaatgaggtactcaagccagcacctatgatgggtgaatagcatattctgagaatcaaagaacttcaactcagtgtacatgcatgttcaatggaaattttgtgacattgttaaatattttactagatagacttaatgcagtgactgcagtaggccctccttttccatggattctgcatggattcaactaaccatggaacaaaaatattcagaaaaattttaaaaataaaacacagtacactataacaatttacatagcatttattatatattaggtattgtaagttgtgtagaggtgatttccaggaggatgtgcataggttatatgcaaatactatgccattttatattagaaacttgagcatctgcagattttgttgtctttgggaggtggatggagggaggcatggaaccaatcctctagggatagtgaaggatgacagtacattcaaataacatgccaagttgagtttttaaatacaaggttttagtaatttttaataactgaggacaaagactggccaactttccctgtaaagggcagattcttttagactttctttcattttctttttttttttcttttttgttaaccctttaaaactgtagcaacagttcttagcttggaagtctgtacaaaaccaggtttcaggctctacgggccataatttgttgaccctggtgtaggaggctaatgctagtagtatataaaatcaagtctgtggaatcttggcagttcataaaacccagagaaagagcaggcgtttcttccttgatcactttcagctgggaagaaggatccttgtgatccactgccagacctaaacttactttgagcactgctggaaacatctaacatctcaattcaactccttcaaattacttcttcaatctagacacacttattttttctttgtttgctttgtcaactgtcacacacctggattatgaaataatgtgttttaacatcttttactttcagtccttttagcacattgaaaaaagttttttgaaaaccaagaaatctacattctaaccctagctcttgtactaaatagctatagtttttggaacaagttattctgtctggttctcaacttctttgtttataaaataggattgaactaataccgtataatattttttccaaatttgatttagtagtttcagatttatgttcctataagccctttatcacctgatcagatgatgcctttaattgatcctcaagtgtagacctgctcaatttaaaggaatgcaaccaaattaatgttcacgttcagaagccctctcgctgtgcctggtacgtagcagatgcccagtaaatgtttgtcgagtgaatcaatgaatgaataataaatgggcataactacctttcttaactctccatttatttatgctgtatgttttagaaatatatattatttcttacgtacgttttgatcttcccagtattctttttatggttcactcataaaactattcattgagggtcaacaatatgataaattctggaaaaaccaaaatgaataaaacttaggccttgccttcaagaaatttgccttctagttagggtgactaataggtattctgatcatttcagtgtaggtctgagtatgatattagaggtttgaatctccaaactgaaatgtcctatttcttacccttcaaaccattacaaatgccaccttcattacagctttttggattgtcctccaatagaacacacatattataggtcattgtttgaaacattgttatagcatttgttgctgctgcaccctctttgagtttatatggtgtttgtacttttggggtttttttgtccttttctagtttgtatgctgcataagtgtagggggccttgtcttccatttctgttcatgagaagctctcattagttaaatgcattctattaggcaataacataatggttgttttctgagaggcttcattttatgagacattgtattatcttaaaaaattgtttcagagtgacaaggaggttgttagccagagcctttgatttttaagaaatttcagtatctataaaacctaaatctacaaaaccaaaagcacagagtaaatgtagcttttgattataactagattgttagtgatagtgactaatactttcattattaatcacctgtatgataatgaaggtaagcaatgttcaaagaatcttaaaacagttttgttgctttagcaaccagtttttttccccctccaaagattggctctgtggtgctacttctcagtggtcatattataaccaaaaagatcccaatctaatagtagttttgggtattaggtggcccaaaataaatttcactataatttatcccttttgttttctacagtgaacacgcctccttttttcatacctaagcttaaaaacaaaagctcctgcgtgacacactgctgctatccctcatgcaacgagaactcctttcccatttccacagaagggataaaactgaggtctattcagttcctgtagccaatgccaaatttagggggtgatttcctgtgtgctcctcctctttcagcaaaactgaacagcagtattccttagcctgtggaacagtgtctcagagtaaccacaaatggtacattctatatataacagtggaggaaatagggaaggagacgaacagttaatatatctaaatatatacattgcagagcaagaaaaagaatactggcaggtgctaagttaccactctacaactgatcacaggctgcagtttgtattactattttcctgttataataaccattccactttcctcttgccttctttcagcacctctgctgtttgggataacccagattttcagccctgggtccttgttgctcctgctcacaggctatgtggtactcacttttatgagtgaagatggcagtattatcaggccccctccagttcatctcccttttacttgtgtatgagcgtaccccaaattccgcttaataattacctcaatcaacatactaccttggccctaaatgaccagttgtagtcttgaaaacgtgattgttttcctcccttggatgttgtctctaagtcaccttgagagatggaaaaaattgtacaaa

SEQ ID NO: 706 - DNA, 32744 bp, Homo sapiens
  source 1..32744: mol_type = other DNA
aaagttgcagctttttccgcctcccgggagggtgagaagggccggctgccggagctgggttgcgatcttcccggagccggagaccctcccttgaaaccggcactgggacttctcgatctctggaggcacctgttgcaagtgacaggtaggtcaacagccagcggccggcccctcgccctcggtccggtgctccttctggacccccagctccttttcgctgctgaagcgcccccacccccatctcggggtcgtgcgtcttccctacccgctctctggtcccccaatttttccttctccctagctgaccgcgtctcccctctccccgtccgcctctcccgaccgcatccccaggcttggactcccgtctgcttgggcggtccctcccggccacttttctttctccagggcttcttctggccccttccctgacccacccagcactaatgcggtctgtgcccctctgggagccgcctcccctctcctcttcggctcccctcgcggggagtgcccgggcttttcccgccagcccgagctggtgcccctcccgagagctggccctgggggcgggggcggggccgagctcctagcgggaactgcgccctccaaggcgtccagtcaccttttcgtgggttcctctcacagcgctcggccgtcgagcggggtcgctaacccgcactctcttcggacctacgacatcgcggcttctctggcgttggccagtcagccacaggtaaaggctggaggctggttggctggagtcctgcctcagtgggctccctctgcgcttggggctggggacctggctgtgtgctgtggagctgctttatattgccgctcttcaagcaggctgtgagagatctggtactggaggagggtccccgagatctcagaaggggcacagaatgcttctgtctcctgtgttggtttgtaatggggcagaaaaaggtgttcctccaacccttaacattgaatgaggtgggatttggggtggtgaaatcatttggttagaattctggtggcttgaaaagtggtgactttctaatcaagcttttcttcccccagtaccctgcttcttcaggattagaggacgtaaaattccagagtactgtgcttggcagggttgaccctagaccttgtatatttgtggcaaaaatgagtcttctgtacatcctggacctcctatatttaactggcttattttctgctctttaagctccccacccccacctctcataaatctattaatattgaggtattaatgacttaagacttttgtcgctgtgggaacaatgtttaatgcagagacgtggccttgatgaagttttctgcgtttttggttgtttggtttttagcaccctagtagaaaagcaccaccaacttggcttgtgaggccctttttgggcagaggatgaacatttctggtaacacaatttcaggtgtctcactcttggtcagagcagtgaaatggagctggaggcctgttctggggtaattgatctgtgagtatatgtagcattctggctctctgagcttgttaggctctggttgttaggctccattgagctggacactgtgataagttctttacataaaaatgcaatcctcacaataactctatacagtaggtgctacagttataaccatattatgatgaaaaagagactgagaagttaagtgccttgccctcaaaatctcggaggcagagcttgtgttcctatcctgtcacaccacctctgttgtcttagatgttgggaacactgaatagctcatggatgaggactaagtgattaaaaaattgtcttccaagcccaagtatatgtttttctccttgcttccaccttagatgcactgccgagactatggactacttaccttactgatgtcttacccacttcatttccaacatgggccagttgccacgttaccactataagtacacatccctgagtgtaattagatgaatgaaatctcccgggttttcagctctgtggtaattgtcctgaagttaggggagggtaaccctggattctagggatgtgtgcctgactcaacttcttcctctcctgctggctaggggagaaatgagggagtggtaagtgatatggatttcctgacagccataccagagagcctgagggtgatcgtgtgctagttttgtcatgggatggatggagtaccatagacaaggataggaagaaaatgtcctccctattcccatctctgggactttgctcaaactgttcctttttttcttcctaaaaagctaactttcctccctcattccccctcccctgacattaattcctatccatccctcaagattgagttctaaagtcacctcctttggaacggccttactgaacacatacttcttcccccaagcagaattgccagttatcctgtgtcctaaagcactttgtttacacctcagtaaagcccttaacactgcttagttgtttttccacctggaaggctgtaagttctctaagggcaaggtctggatctcggagctccctttgtcttaaatataagatgttggcaaatatttgtgccagtaaccggacataccatgccattccttcaaggggctgaggtgtagtgatggtggggttgaggtacagaagacaccttcctgaggcacttgaaataccacagctaggaatttgccctgaccaccctatttaaacgtgtaatcccttccctgaacattccatatgccctttccctaccttattacattgttcttgcttattgtctgccctcccactccctcacccaccataacataaacaccctgtgggcagggattgctgtctgttgtattcaccagtagactcttggacccagaacagtccttggtacatcataggtgcatactaatatttgttaatgaattaatggcattgccattctaggaatttggcactcttggagttaggcactcctggacctgaaactaagcctacccagtttgtcgccctacaggtgtaagtttgccccaggcccaaaactcagctttacttctgctgatttttgctttgagattgcattcctgatgccaactttgacctagttggaagtacttcctctctcttacttttttttttttttgaggcagagtttcgctgtgtcgcccaggctagagtacagtggcgcgatcttggctcactgcaagctctgcctcctgggttcatgccattctcctgcctcagccttctgagtagctggaactacaggcgcccgccaccatgcccggctaactttttgtgtttttagtagagacgggatttcaccgtgttagccaggatggtctcgatcttctgacctcgtgatctgccctcctcggcctcccaaagtgctgggattacaggcgtgagccaccgctcctggcctctctattttttaaaagtatgagtctctgggtggaaatctctaaagtttaaaagtggaaatgtaaaaatgttgtgcttcttgttggtaggaagggggactgcactgggaggaaggggtgtggattgtcagatgtcttgaggcttttcaggcttctcgcaagatcaataagaggctggagaaagttactgtgcaatggggaagtgaacagctcaaaagaataacggatggcacaaattaggcttctggtttcaagttacccatagccttttaggtatgaggtggttattggattatggaactttatggaaaagccgtagctgagtgctatttgtgttgtacttaactagttttctaccaggatgactgtgcagtctggagaaaccactgtgtaacataaaagaaaaaagtgctattctgtttaaaagtgttttgaaatgttcagaaaggaagaggccagaatctcttagaagacagacttggaaggagttgggcccttcaaaaggtggtaaatatgtgattctcatcatttaatatatgttaacttatttgaaactcaaatttgtacaaaaagctgaccagcttctttttctactaaatttgtctccccagcctttgaacattgcagtgacctggggttcagtccctggacttttctccatctaaaatcttcacagaggctctcatccagctgcatggctttgaagaacatctgtctagactgttgtcactcccaaatttatgtttgttacccaggcctttcttctaagctgcagcctcatatatccaatgacctatttgacatctctgcttgcctatcagatagacctctcaaatgtaacgtggccaaaacggcactcccgattgcccttgtattcccaccctcttccctcagcactccctgtctcagtaaaatgtcaccatcatccattcagttgctcaaaccaagaacctaagatcacccttgattcttctttttctatcactgctctccacccaatttaattcatgagggagtcctgctgacctgatcttcagactgtatcatgtgttctgccacacgtctccatctcctctgcctgtcaccctagtccaagccaccacacgtctgccacaaacattcttgcataatgctcaaggatatatatatacacaagtatttttgtgggatagctttctaataggagaattgttaggtcaaaggacatatacattaaacaatttaaataggcatcaccagagtgacatctaagagggtttaccctttcaccattgcgagtggttttcctcctgcccttgctgaggatggatgacgcttttaattttttccaatctgataggtgaaaaatagtatctaactgatttaacttggcatttctctgatcactagtgtggctgagcatcttttcatttgtgctagctatttgtatttttccaagacttgctcctttatatcctttgcacatttatcttttgggttatatatttgatttgtttgtaagaacactatatttattagttatatttacccattgcctattatatagtgcaagtttttttctctctagtctgtcatatgtcataactttgttcatgatgtgtacccctctcgtaatcagataaaacccactataaaacatttaaaaaacacgttcattagatttggcaattaggaggccaatgacaacatcagtgcagcaggaggagagaaggcagatcgtagagggttgggcagtgaggactgagaaggactgataaaaaatatggtagatacacatggacatggagagtgggatgatagacaatggagactcagaagggtgaggggtgggagaagggtagatgatgagaaatttcttaatgggtacaatgtatgttattcaggttatagataccctaaagtctctgacttaaccactgcatatgtaacaaaattgcatgtgtaccccataaatttatataattaaaaacatgtagtatatacattgaagaagcttggctatgatgggaaggagagagtgttccttatagacagtaaggcacaggggataaaaaggctgttttatttaattttgttttactttaaatataagagatagatgagcccatttatgtgcagatggcatacagcttgatgatgcaaggtccccgagaaagtcagagggtgggagtgccagagtgaaagaggagaaaagactagccttagagaaaaagtggtggctcttccattgaaacaagaggattcaccaatcctcttggtaaaaactatggagaaggaagtacctgtggagggacaggattttgagagagcccctccgcccccaacaagagagtgaaaggttcaccagagagtaaagaaggcaagaatggtgaagggttggaatagcatttgagagagacgaaaagaggagttctttaggggcatatcatccaggttatgtatgtgtatttcaaaatatcatgctgtacaccataaatagacacaatttttgtcaagtatacctccataaaactggaaaaaagttttaaaatggcttgggtaacttgaatttgtctctgcctcaagtcgcagaaccctgtatccattctgtctggcagcactcatcagaccaggaacagagtgtggacaatctagtatggggaattttttccgggtggccgtgacagaaatagggagagggctggagattggatggccctggcagaagaatagttgaaatgatggaccactgtggctttcatattcatatctgtgactatctaaacctaacttgaccttgagtaatttttaagaagtagaaaatttccatggcatctacactgcttcttgtttgtagctctatcgattcaggcatcagaataccattagtatcagtgtctttaaactcatcagaaagcgtgatttgatttactgagggcctatgttgtgccatgctctgtgttgatttactgaggatttacgttgcaccaactgagagcctacagtcaggatcctacaatgtagatttatccatctatccatccatcaacccagctagatgcttgaggtatggctgagaagaaggtagacaatggccatttttctcctggaacttatttcggcaggggaagtgtatattaaatattgtatcacataattttttaattacaattgtgataagttctgtgaagttcagttttcttagaaatcagattgtcacattgctttttaacaggccttactaatttacatttgccaacaaaatatgagaatatctcttaaatcctttttaaaaactgaaaattgtctttctgaaattttgctgaattaataagcaaacataaaaaaatctttattgccagtaagagtgaaactttttctttttgatgtgtattggccatgtgatttttcccctttaagaattatctattcacgctctctgtctattggatacttacctcttcttgtttttaatagatctctcattccatgtttgaaaccattagctacacttctctcctttctctcttagccctggtgaccttaaaatattttcccctagtctctacggccattcccttttgatctcctgtgaaatttttttcttacctagaagtgttgctgtgcttagggatgggactacatttttattacttgactcaataaaaggtaacatataaatcttctgttcctgcttatcccactctccagaggtaacaatgttaagattgtatttctttctagacatttttccattcatccatgatccaatctgtctaaaatgtaaacaaataaaaatggaatcataatatatatgatttgcaatttttttaatttaatatgctttcagtgtcagtatatatagaactacagtaccttcttctttttttttttttcttttttcttttttttttttattgatcattcttgggtgtttctcgcagagggggatttggcagggtcacaggacaatagtggagggaaggtcagcagataaacaagtgaacagaggcctctggttttcctaggccagaggaccctgcggccttccgcagtgtttgtgtccctgggtacttgagattagggagtggtgatgactcttaacgagcatgctgccttcaagcatctgtttaacaaagcacatcttgcaccacccttaatccattcaaccctgagtggacacagcacatgtttcagagagcacagggttgggggcaaggtcacagatcaacaggatcccaaggaagaagaatttttcttagtacagcacaaaatgaaaagtctcccatgtctacctctttctacacagacatggcaaccatccgatttctcaatcttttccccacctttcccccctttctattccacaaaaccaccattgtcatcatggcccgttctcaatgagctgttgggtacacctcccagacggggtggtggccgggcagaggggctcctcacttcccagtaggggcggccgggcagaggcgcccctcacctcccggatggggcggctggccgggcggggcgctgaccccccccacctccctcctggacggggcggctggccgggcgggggagctgatgacccccccacctccctcccggacggggcggctggccgtgtggggggctgaccccccccacctccctcccggacggggcggctggccgggcagaggggctcctcacttcccagcaggggcggccgggcagaggcgcccctcacctcccggaacgggcggctggctgggcggggggctgaccccccccacctccctcccggacggggcggctggccgggcggggggctgacccccccacctccctccctgacggggcggctggcctggcgggggctgaccccccacctccctcccggacagggtggctggcctggcgggggctgacccccacctccctcccggacggggtggctgccaggcggagacgctcctcacttcccagacggggtggctgccgggcggagggactcctcacttctcagacggtgcggctgccgggcggaggggctcctcacttctcagacggggcggccgggcagagacgctcctcacatcccagacggggcggcagggcagaggcgctccccacatctcagacgatgggcggccgggcagagacgctcctcactgcctagatgggatggcggccgggatgaggcgctcctcacttcctagatgggatggcggccaggcagagacactcctcacttcccagatggggtggcggccgggcagaggctgcaatctcggcactttgggaggccaagggaggcggctgggaggtggaggttgtagtgagccgagatcacgctactgcactccagcctgggcactattgagcactgagtgaacgacactccgtctgcaatcccagcacctcgggaagccaaggctggcggatcactcgtggttaggagctggagaccagcctggccaacacagcgaaatcccatctccaccaaaaaaatacgaaaaccagtcaggcgtggcggcgcgcgcctgcgatcgcaggcactcggcaggctgaggcaggagaatcaggcagggaggttgcagtgagccgagatggcagcagtacagtccagcttcacctctgcatcagagggagaccgtaccttcttctttttaacaaaggcacaatattccctaatatgtgtgtacaataactagtcagtttcctttgatggatgtttatgttctttaatttttttttttttgctgtttcaaatattgagcatcctcagaatatatatttgtgaatttacttgaatatcagcagaataagtttctcaaaatgaaatggctatgttaaaaatatggtcagtggtactaaagatccagagaaatctaggaagaccaagaactgtctattggatttaggaagttcttggtgaccttagagcaatttcagagaactgtgaggcagaaagctaaactatggtgggttgagaaatgattggagagatgaggaagtgaaggcagtgattatgtacaattccttagagaaatctgtctggctttgaagagcagagaaagggtagtagcaaggaaggagttgagattgaggacctgttatttatttatttatttatttatttaggaaggacttgagtttctttaaaggctggtgggaaggagggactaattaatagagcaaaatccttggaaggcaaagtccttatgccagatgggaggggatccagattgaggtagaggattatcctcaataggcatagatgaaagtaggttcatagatttggcggcaggaacttgtctgatggtatttctatttctctatgatataatagttaaggccaacctcttagagcaggggttaagatgggacaaggtttgagttagatatttgtggtatttgaagaaggtttgaaatagttattgtggagaacaggagagcagcctagggaagcatagttgcagtgccaggcagggttaagatgagcttggtgaccaagaattcatatggataataatctaccagagtgtgattttttttttctccagtagatctcaggagtccttgtgcatgcataaagtataacagttgggcttagaagagctatggttttttaaatcagatatttgcagtgaaattatgcattattgaggatattgacaagagtgcagttgaaacaatagaattggctgggtgcggtggctcacaccagtaatcccagcactttgggaggctgaggcgggtggatcacctgaggttaggagctcgagaccagtctggccaacatggtgaaaccccatctctactaaaaatacaaaaattagccgggcatggtggcgcacacctgtaatcccagctacttgggaggctgaggcaggagaatcgcttgaatccaggaggcagtggttgcagtgagccaagatcatgccactgcactccagccagagcaatagagaaaaagtctcagaaaaaaaaaagagaaagaaacaataaaatttaaatgttattgggaaggaagtaaagatgggaaggagctgaggaggtgaaagcagaagggtctatggaagactgcccccatccaagaaatctgagaacaggaatggggctagttggggggctcattggctgaataggctagaagcacagcaggttgtggtcagagagggggtgttgaatcagtgatatcaaaggtggagaagtcctagatgataagctcttgggtgtggctgaatatgatatatggtattcttgatgccagctcattcattcaacaaatatttattttgtgcatattatgatccaggcagtgctctaggcaccaaaggtacagaaatgaacaaaacaaagtcccttctgtcatacagcttacaatctagtgggggagattatttttataaactaaaagaacatccttattgatgtgctgattcctgtatgtgtagctttatttgtaactaatgataataccaggatcaaatatttacatatatgggggctaagaaggtccatctaggcattttgagtatcttgctttatctcaagttatacttactgaattatgaaaactcatacctcttttccccttagaactttttaaggtatttttacttactatgtcagtattgaaaataaacaaatatatacaaatctaatttgaatatttcattggttttaattttttatactgtattttttaaaaatattaggatattgcttcaagctgtagaccagatgttgataatgcatgtactaatcttgctctagggatttgatgtaatgtgtaaagtaattatggttaagcagtttaggagggaaagagggcttgtaataagttaatattttatgtttatttttatattattctccaatttattttattatttatacctaccttttaatgtacatatggtcatgtatatatttattaatattttatttgaaagaaataagcatttatttggcatcttataggcctcaagtaacactttaaaattacctgccacgtatgcaattcaatttaaattcaactacaggttattttttattgttttaaggtttctgtggccatagccagatcacagcatccctaaaattaaaaagaaaccaaatgcatgaaatcacagttatgtgtgagcatgggctggattagtcatgaaccatgatgatttcacatttaaggggactgtgtgggtaatttttaggtgacatggtctgcaagaaataatcagatgccagttagagttcagtttagaaatccccaccatctgtgatcccagcaggagaagagggtcttccctgcgggagtgctgcattatcaaagcttgttgactaaggaaagataatagtgttctgcgtgggaggtgatgaggcttattgaaaaataacaatgtgtcagctctcactggacttaaaaatgttttgtacatataaatgacctagattttaaaacagtccattcttttagttggggattttagattttttaaaaatctaaaaaatggggctgtcaaggaaggggcttttggcagagaagagggtaaactggccatcctgcacccatcagcctatgaggctcttgtgtctggctcatgttagaggaagcttcaaatgtagattttgaaagctggaaagctaaatgggatttgttttaatatatgtattttccctgttgccaagtagggtgtttggacacatggtctttataatattttagagttacttctatgtatcacatttatggaaatctgccttctaggattggtggtgggtttaaggcaccttctagagttgctgaggagcaggggacaaacgtgtagaatcatgaaggaccacatttccacatatccaaaacaaccattctgcaggagaaatgaatatatagtattaagatatctgacttccttctgggacttgttttagagttgtatatattattttaagtgggaatttctacaaaccatttatgaacagaatttgttggtattgaaaggtagctatgtggattccatctggaggaaattgtccccacatatgattctaaaagctaacaaaagaggcattttagttactaccactgccttcttccaccctgctgcccacccccaccccctgccccaccattatgcacctgccatcttttaggatggatgtcctggatgaggggaatgagttattgtcttgcgtataatgttgctttgagctagagttgctctggcgtgttacacatattgcaggaggaggtcaggggtctgggaaagtaagccagactgagggcctctcaaacattgtgtttgttattagctgaagacttttagaaaccccacctcaagttcctgaggttgatgttcccttttccaaaaatcaccatatagagcaatattgccagaatatgaagagacagtataatgtaatgtaacggttaagagcttggactctggaaccagacggcctgggtccaaaaaccagactgtcacagggcatgtgaccttgagcaagttatttgctcaatctgtgcctcactttcctcatttgtaaagtggacataataatttagtacctacctcatagtgtgattgtgaggactaaataaagtgcttagaagagtgcatggtacataataaacattatagaagtgttaactatcattgtcatcatcttcatcagttggtggatatcttaaaaggagtgaaaaccggccaggtgagatggctaatgcctgtaatcccagcacgttgggaggccgagatgggcagatcacgaggtcaggcatttgagaccagcctggccaacatggtgaaaccctgtctctactaaaaatacaaaaattagccgggtgtgatggcacacacctgtaatcccagctactgggaggctgaggcaggagaatcccttgaacccaggaggcggaggttgaggtgagctgagatggcgctgcctaactccagcctgggcaacagagtgagactccatctcacaaaaaaaaaaaaaaaaggagtgaaaagcacaaaatgcctcagcacatgcaaactctacttttgtagaatctattttgaaaaggatcgtagggagccaaaaccttactgcaaaatcagaattttgtaaaattaagagctagttgtaaatttctcattgttagggaaaaatacagctttgctcccatacaacttttgagaatggatttgtgaaggcaggccctaggggattttatgtgaggcatagatgtgctccatggatggacaggtgagggtctagaccccagctgactcctaggaagcctcagttgccctttggttttggagccttgatactgactctaccagtttgtctccactcctatttttcttctttttgatcctatttttaaaatttatgatattttttgatgttttatgaatctttgtaagtcactttaaatcctgtctggaacagtgtataaataaatatcctttaaactgatcatatctaattactaacatttgcttcatatttatgcttgtcagcctccctccatgcagagaggtacggtgaccttccatctaggcaagaatactgattagatttctcaaatttcatagaaagatgtcaaaactgccatatgctcatatattttccaaagcatatggttaataataattaaaactaaacagctaccaatattgggtgcttactctaggccaggcactatgctatgccttttactcatgatgcatgcttgaatcctcaaagccataggcaggagctcttattattaatcctcatttttacaaatggggaaacagactcaaggaggttaaataacttgcccaaagttaattcagggaaaaagcaaagctgtgattttaacccaggcagctcagatccagtgcttttaagcacaattctatgctatactgtccttaattagaaatctagcacatcagaactccaagtcctagtataagaggccgtacttgtgttacagaacattcacaggtcctgcagattttctctccgtgtaatgtctttaatatgcccctttccatctctagtgccactgccctctactcttggctcttgttatctttcccctggatttatgccacagcctcctcaaatccatagtctgcaaaattgtcagtgtgccctaacaagtccttgctttacataaaactcttcaatgatttctgttgtcaaaggctaattagccgtgtttttgcgcgtagcatatggagcacccgccagccacacatgatgtgattccccacctgcctcttccgcattctcccttacaatttaaaccaaccagcatcattgtattacttgctcataccacgttgctttatgcctccatgcttttgtaagtgctacgcactttgcctggaaagccctcgttctcctgcttatccagctgaaaaacattaatttacaatcagttcatgtgctactgctggatattctctttctagttccctttccccaagctgaattatgtgccctcccttggtattcttataatatctcatgcatatatttctttggttaccatgttttttttttaggattatttaagtgtctctgttactaaactgtgaactctgtgggcatggactagctctgttcttttcttcttagccagctagtgtaccgcttagcacatagttggccctcctaactagtgagcattctgtaacagtgcagaatacagagctctaggacagggaaagaagtaagatttggaaggcctgaaactgtgcacacattcaaagataattaccaggacagcagaaggagctcttgcagaaaaatctttggggccaggtaatttacattatttaacccaagagccagaaaggatgtggggagatgggagctggggtctgaatccaaagggaactttgaaacttctaagaagccagacttagcagctttataaattgaaacttccttgaatttgtctgagtagcctggaataggtatctaagacagttacattttaataagaatatttatagttttctaggagagacatcaccctaaaattgaaaggggcagttgatacaataaccaacacaatatcccaaagcaattattttattgactgtaagcaatgttgtatgctcatgcaaatgttaccagtaagatgttatccattggtatttttgtgcataggtggctggatccagacaaggggattttaggaagccctgcatccctggaagctttcttttctacttgagtttttttcttttttttttttttttttttaagttttgcagaccaccatatactctggatttggtttcatttttccgtgctctaaaatcaacttttttttttttttttttgagatggagttttgctcttgttgcccaggctggagtgcagtggtgtgatctcagctcaccgcaacctctgcctctcaggttcacgtgattcttctgcctcagccttcccgagtagctgggattacaggcatgcaccaccatgccagggtaattttgtatttttagtagagacggagtttctccgtgttggtcaggctggtcttgaactcccaacctcaggtgatccgcccgcctcggcctcccaaagtgctgagattacagacgtgagccaccgctcccggccaaatcaactcttttacctttagattatcaaataactagtcccccgcccatcggtactagattttgctaccttttagggctatgcttcacccatgttctggaaacccacacaaataatacgtattagttttgacagtactttagcttgatctgctttagatgctgtcattgcctttgtcacaattagttaatagagtccactttttttttttttttttttttgagagagagagaaaaggtcttattctgtcacccaggctggagtgcagtggcccaatcttggctcactgtagccttgacctcccgggctcaggtgatcctcccacctcagccttccaagtagctgggattacaggcacataccaccacacctggctaatttgtgtgtgtgtctgtgtctgtgtgtgtgtagagagatggggtttcaccgtgtagtccaggctggtctcaaactcctgggctcaagagatcctcccacctcggcttcacaaattgctaggatgagccacctcacctagcctagagtccacttttgaatgtgtcttatgacagcaaaaattcttattcattatgctgtactacttgcataagagcaactgcattacaatcatcagaatgatttattctttcctaattaacatacatcatatctctatgcaagtagaatcatgaaaatatatggcaatttgtagaatagtttcccttaaccagcctttaagtaaaggacttcctagcttttttgattactcacctttatcaccccaaatttttatcactcctaaaataagtatttataaactacattatttaccactgtattggtcatatattataaagcatgcacaggccaggtgtggtgtctcatgcctgtaatcccagccctttgggaggccgaggcaggaggatcacttgagtctaagagttcgagaccagcctgggaaacatggtgaaaccccatctctacaaaaaataaaaacaaagtagccaggtgtggtggcttgtgcctgcaatcccagctactggggaggctgaggtgggagaattgcttgagtccaggaggtcaaggctacactgagctacgattgtgccgctgcactccagcttgggtgacagagtgagactctgtctcaaagaaaaagcacaaaaatggaaataaagaaggatgagagattaaatgaacttttaaaaaataattctaatatttattaatggtacaataacctttgctctcattttgatgaggccagtgacattaaatgtgcttcatttaaacaaaattttggtttatgatacagctacttgaacatctgattctaacttctgtttatttttatacttgattttaatgactgatgcctcacaaagtatatacattttaaaataaaagaagtatattgtttggatgcacttactaaataatcatactcatattacagttccaggcaccagttatgcaaacattttattgctgttcctgaacctgctgtcttttatgtttttgacaaattgaaaagttaaaacgtgaaacatcttttagataacaaaactgtgtagtaagggaaatatttcaaacctactctgtattgtttattctctattaaaaaaccttggccaggcacggtggctcacgcctgtaatccccgcactttgggaggctgaggtgggcagatcacgaggtcaggagatcgagaccatcctggctaacacggtgaaaccctgtctctactagaaatacaaaaaattagccgggtgtggtggcgggtgcctgtagtcccagctactcgggaggctgaggcaggagaatggcgtgaacccaggaggcggagcttgcagtgagccaagatcgtgccactgcactccagcctgggcaacagcaagactccatctcaaaaaaaaaaaaaaatcttgacataaaatattttagtgtttcaattaatttaaaggctcctagtgtcttgtaggtattctgggattggaaaacatgattacaagaagaaagtttagttacatttaatattaaaatgtttaaaaacattttattgaactacaatagacaaattatatataaagtatacaatttgacaaattttgacatctgtatatatccatgaaactatcaccagaattaagatattgaacatctatcacctccaaaagtttccttgtgccatgttgtaatccttccttcttgtccctgtgtgctattaccctccttacccccgtcaactcctgaaaccactgattctgttttctgacactatgtattttctagaattttatataaatgaaatcatacagtgttttttttttgcctgacttatttcagtcagcataattattttgagattcgttcatgttgctatgtgtatcagtagttcattcttctctattgctaagtagtattccattgcatgggtatactacaatttgtttatccatttacctcttagtaggcatttgggctgtttccagatttgggctattaccaataatgctgttaacatttccatgcaaatctgtgtaggcatatgctttttttttttcccccttttgaggcaaagtctcactctgttgcccaggctggagtgcagtggcgcaatcttggctcactgcaacctccacctcccaggttcaagcgattctcccacctcagcctcccaagtaactgggattacaggcatgcaccaccacacccagctaagttttgtttttgttttcttttgagacggagtttccctcttgttgcccaggctggagtatagtggcacgatctcagctcactgcaaccaccacctccctggttcaagctattctcctgcctcagcctcccaagtagctgggattacaggtgcctgccaccacacctgggtaattttttgtatttttagtagagacggggtttcaccatgttgatcggctggcttcaaattcctgacctcaagcgatccgcccaccttggcctcccaaagtgctgggattgtgggtgtgagccaccacgtccggcctacgtatgcttttgcttttcttggataaataccaaaagtggaaagcctgggtcatatgggagatatatgtttaactttttaagaaactgctaagctgttttccaatatggctataccatttcacattcccactgtagtgtatgagagttccagttgcttcaaatgccggccaacatttggtgcattttaaattttggtcattctaataagtatgtagtgatatctcattgtggttttagtttgcatttccctaatgattaatgatgttgatcatgttttcatgtgtttatttgctatttgtatatcttctttggtgatatgtttattcatatcttttgtctattcatatcattgtctattttttaaatttgtgtttttaaaaatattgtagagttctgagagttctttatatatgctggatataagtccttatcagatatactagttgcaaatattttcttccagtatactgcttatctttttattttctaataaagttcttacaaagcagaggttttaaattttgatgaagcctaatttatcaagttctggatcacgttttacgtgtcatgtcagaaatgcttgctttttttgtttcatatggatatctagtttttccagcactacttgttgaaaagactgccatttctccactaaacttcccttaacctttatttaaaaaatcaagtgactataaacatgagggcttatttccatactctctattctgttcgtttatttgtctgtcttcctgcccagtaccacattgacttgattactgtggatttatagtgtctcttaaaatcaggttaagtttccgctttgttctaccatatgttttgaacctcacaatatatcgttatttttcctttaaacggtcgattatattttaaaagagatttaaataataagaaaaaagtatttttacctacattgttaccattgcatgtgctctgtatccctttttgtaaacctatatttctgtgcagtaccattttctttctgcttcaaggacttcctttaacactttttatagtgcaggtctgctggtgattaattctttcaacttttgcatgtctgaaaaagtctttatttcacctctgtttttgaatgatatcttgctgggtgtagaattctatctaggttgatggttgttttttttctttcagtattttagagaggttgttctgtctttacacttgcattgattccaatgataaatttgcttttatcattatctttgttcatctgtatatatataatgtgtccttccccaagaccccaaccccaccccaccccaccactctagcttcttttaagattttcccattgtttctggttttaagcaatttatggtgtgccacatggtatatttttctttatgtttctggtgctttatgttcatagagcttcttggatctgtgagtttatagtgttcaccaaatttgggccattatttttggtgacatcaatgacatgtatagaaggtagcttgatgttgtcccatagctcattaattcctttttctttttttcagttttttctgtgttccattttgaataatttctattgctatgtcttcaagttcttaactcttttctactgtaatgtccaatttgctgttaatcccaacgagtgtgtttttcatctcagacattgtaccttttatccataggtttgatttgagtctttttacatctcccatgtcccctgcctagctttttgaacatatagaatgcagttataataactgctttgatgactttgtttactaattctaacatttgtgtcagttcttggtctttttgattgatttttctcattattatggatcatattttcttgcttttttgcatgcctgttagttttttactgggtaccaaatattatgaatttgaccttgttgagtactgcatatttttgtattactataagtatacttgctctctgttctgggatgcccttaaattacttggatacagagtgaccctttcaggttttgctgtttagatttgttaggcaggaccagagcagtgcataatctgggctatttcccactactgaggcaagacccttctgagtccttcagctagtgtcccgtgaatcatgacgttttccaatttggctggcggaaacaggcactattcttagccctgtgtgagtgacaggcattgttcttttgaatcctttcaggtagttctttccctggcctagagtaatttcctcacaggcataccatgggctaatcagtcctttgctaaacacttgagtgaaaccttctgcaggcctctgaagatctctttctctttctgtggagctctctcaggtcctctgtcctatgaactccagctacctggtttttttcccagactctcagctctgtctccagaactcagggagttcactaggctctacctgggttcttcctttctgtaccattatctggaaattctcttaagacagtaagctgggaaaatcaaagggctcaccttatgtgttttccatctcagaaatcataatccttcattgcctgatgttcagtgatttgaaaaccattgtttcatgtatttggtacatttgttgttgttgttattgtttcaggcagggtggaaattcattccaccttgacattttataatctccaattatgaccaattaaaatttgtagcccaatttaaattctcatctttcgaaaaaagtgtagacaccatcacatttcttgacgtagctaaatcagttctgaatacccatgttcaaaagtatacagaatctggcatgcagcagtataaatctcacatcagtataaaactcattgatcagtttcggtgtaaaacatagtatcattttaaaaagagcagtttaattcaggcttcttggttaaatgaatatattttgaaagactctggttcactttttcatgttcagtgaggtattgtccattgtccttagcctaaacagcaaaatacttttattacatcactttggcaggatatgataatccattagaatgtatttgcaaaaccatcatataattactacttataactttagagaataatttaatatcagttcagccttttggcccttgagcatgggtcaatttttaagaaaatcttctgtcatctataaggctgtcagcatggttcctcacttcaaaaacagtggcctgtgattaatgcattaaaattaatcactataaattcatccatgtacccaaaaactacttgtaccccaaaagctattgaaataaaaaaatttaaagaacaataacaatagcctgaaactttaactgacgtctagacagtttaactcacaattcatctgcattctttaaaagaaaataaatgtcattttctaagacctagttaagtccgaaagcacaaatgaacatatacaaactgacaaaaataggtaacacttagcattctttgtgttctcattactttaagcactttacgtattttaaaaactcatttaatctttataaaaacaagccccaaaggataggtacaatttttatcttcattttgcaagtgaggaaattgaggtactgagaggattagtaacttacccaaggtcacacagctagtaaatgtggaagttgggattcaagttcaggcagtctggctcaattccaagctttttgtttgtttgttttatggacacagagtctcactctgtcgcccaggctggagtgcagttgcaccatcttggctcactgcaacttccgcctcccaggttcgagccattctctgcctcagcgtcctgagtatctgggactacaggcgcaagccaccatgcctggctaatttttttttttttttgtattttttgtagagacagggtttcaccatgttggccaggctggcctcaaactcctggcctcaagtgatccacccgccttagcctcccaaaatgctgggattgcaggtgtgagccacccacctggcccagagtccaagcttttaaccacagctcacacactgcctcaggaaaacaaaaacatttttctctcagctctattacagctcttcaatttccatgggtttaagtttaaacatgtaaacacagatagatttctgggtaaagacattcactagacttttgttgaactcatactgtgtgtcacacactgtgccaagctcctggggctatgatatccagatatagtacctaccttcaaagaggttacgtctggtagatgtttctagtttgagcataagtaccatatattaccatcttcacttttatgtgtggcctgcatgcaacacagcaaaatctgttgtatttgctgtccagggcagggacattacttgtgtcttcctaattcacatcagttttcattttgggaacaccaatgattacttttaatctgagtactattcttacaaggaattctatattttagtcatctttttaatattctagtctcatgcccaaggtcatatagctaaaaatagcagagctaggatttgaacccaagtctgtctttcaccactattttcattattctatgcttcctgtcaagttttgcctagcttttcatttttaaaattggtctttagaatttgaaataatttgagatagctcacccatccccttcttgaaaaccagttgtgttagtgtttattttcattcattgttattatttctcaatcattaggattaggatatagactggatatatctagttggatatggaattctacatatgtcctttagatcaagcttattgtgttgttcaccttgtctacatatttactaatttttcatctgttatactatcagtaattgagagaggtatggtaacttcccatttttatggtagatttagtttttcctttggttttgtaagtatttgcattaacatattatcctcattttttagtagtaaatatgtataattgctaagtaagccatcttttcttttttttaattttttttattatactttaagttctgggataccagaatgtgcaggtttgttacataggtatacacgtgccatggtggtttcctgcacccatcaacccgtcatctacattaggtatttctcctaatgctatccctcccctagccccccacccccgacaggccccggtgtatgatgttcccctccctgtgtccatgtgttctcgttgttcaactcccgcttatgagagaacatgcggtgtttggttttctgttcttgtgatagtttgctgagaatgatacaaaccaccttttctaaaatatatttttatgggcatgggtcccacaaggatgctatattaagatacttcatctgagtcttgacacctcaggactaacacagaacaagttgtccatctgagctcagattctgacactcatgttacctgagccgtggtcttctcaatagataatcttgcctttttgactgtacacctgggactgaatgtaatgaagggtcttaagttttcttgggctttggtttctctattaaaccctagtagccataaattgggagtatccgattagtcatagcttttctaacttcacatctatctggttttcttattataactgtatttgtgcctccattattttcctgagttctagttttcaaaatatgatgtactatttaccataaaaatatatcacttggtttattgcatatgaaagctgtatttttctttcatattttcctttttgaatttctagagaacattctatgccatagtatggggagtagtgatggtagtgaggtaggaggcaggtattttcctctaagatgttaaggatagatttagtaccattatgatctcttctttgacatgtgggttatttagaagtgtctttataaattttaaaaaaaagtattgtgataagaaattaccttattttaaattgatttcttatttaatttaatttcctcgaagtcagagactggtctgtatgggaaggattttttaaaaaaattatgcagacttgcattacagcctagtacatggtcagttttgggagtaaatattctatatgtgcttgaaaataatgtaattctccagttggatatagattttttttgtattcctattaaatcaagctcattttgttgttcaacttgtctatatatttactagtttgtatctgcttgtaccattcataattgcaacaacaaagaagtatatgttaacctctcattttgatggttgatttttcaatttctctcttttgttcctttgtatatttagtgatgttttattagtgggtgcatatttattatctctatgtagtgatcttatctaacctttataaagcttttattgtcttttttacttttagatattaatatagctacctcagctttcttttggctagcatttacctggtatatcttttcctatctttttactttcaattttcccttcaatttatgttttagatgtgtctctcataaatggcacataactggattttttccttttatccagtctgttaattcctgtatttcaaagggtgaattttgctcatatatgagtttcatattcattgatatacttgaacttgtttttaccattttaccttttgttttctctttgtctcagttttttctgcacttacctttgtcttcttgccttttaatttttgttcttaatttgttttctgctcctcattactgattctgcaagatcccattgcaaacaagctggctgttaacagggttagtgttggaaacaacagcaacctatggtggaaggtggggcttggggtgggatatggcttttctgaaaggagtcagattggcaagtgatggggaagaggaggcagggagctgatagagtccatgtctgatggtcttacaaaaacctttttacaagtatgagacaagcatgtctgatgggactggagggaagggaagtgggagtgtgagatgaatgaaggcttgaatagaacccaaagggactaggtaaaggaattgaacaagcataagtaacagaatttatgggtgacaatgagggttcagctgaggttgtagaccaggaattatgtagaacctgggtataggagcagacaaggcaggctagagcattagcacaggtttgggattttcatgggcagttgtggcagagggatgaaggtatatggatatggaaggtactggtgagagtggttcaaatgttgagccatctggagtccaggatgggtatggggggaagatagatcagcagaaggcaagtggaccaagagacaatgtggggctcaagagactgtggtcttgataaagttgaagaacagatagagcaggagtgagctgtggttggaaagtgggaattcttgaatttaagatttcagagggggcagttctggttggtcaggtccataaatgaaaaagaaagggcagatgtacaatattggtagttccattttcttaagatactatctttatttcctcaaggatcttcttacttccctggattttgatattacttggtctcattattatgccaacgtgcctttctcatcacaatattctgctgcctctccacaagcaccagtttttaaatctggtatggttctcatttctagtgtgcctgtgctatccttgctttttagctgacaggtaactgataatacctcttttatccaggagccactgatttttttgcgcagtgtttcagccgtaatcacacatatgggaattcatttccacaatgcttttgatttgtctgtttagtactttatagttgctttggttataattctgcctagactgagcctgtagagcaccaactctggtgtcagattgcctgggcttgaatccctgcaatttcacttacttgctctttattcttgggcaagttagcctaacctctcctgaatcctaatctatacaatgggggtaataatagtcactcattcttggtattgtggcaaggattaaattagttaatatatgttaggtacttgtttggcgtatagtcaattctcaataaaagatactgttggggtgacaatgacagtgattgcaatattggcagcatatgcaaaattgcataccagatattgcattaagtgctagggcagatacagaggagaagattgaaaaagtccttgttttcatggagggtatatattctccttggggataagaactaagaacacttcctcaagactgtctaagaaagggtgtgtgcaagaggcttaacatcttatagttcaataaagaccaggaaatatacaagttgaggaaatattgaggtttcaggaacctgtatagctttgccgtgttgtttatgttctccactgttttgtagggaactagtaaaaaaagaaaaagaaaaaataaagtgaaagaggcgtgttgtctagtttcaaaggagaggagagaaggtaagtgtgattctcatttcctttttcactctctgtctaccttgggctctttgactcccatgactaccaagtgtatattatcagatacattttttcttcctgaggtccagccctgtgtctccaactatttcctgggcccagttacctggatatcaagtatgcaacactaacttaatagggttaaaacaaaactttttgccttacttccaaacctgtttctttccttacatcttctattgctatgagggctgtcactagccagtcagttgtttaatcttgactgtgaactaggcatctttgacttcaccttcttcatcctctctgctcagtcagtctccctattctgtcaattctacttctcaaacctattctgttttttcttgctgcctggctcaggcctttatcattttagaagattcagcaagtatttgtactccaaacattgtgattggccctttaacacacattatttaattttttaaacaacgtttgaggtgggtcgttttgtagatgagaaaccaaagagtcagaaataaaatgacttctgctgggcacggtggctctgtctatagttccagctacttgggaggctgaggcaggaagatcacttgagcccaggaatttgagtccaggctgggcaacatagtgaaactctgtctctaaaaatgaaaaataaaatgaaatgaaaaataaaatgactggtctaattgtttagaggcacagttagtaaatctagattgtcttttgctgcagtattgtaataatatctctgcctcatttgtattgttttcttttttgagatataaatggaagatatatgtaaaaacaaattagaactatgtgaagtaaaaagtgaaagttgccccttcccaattctactccccaagggaaaccaatgatagtggcttttgttctagacctttctctttgcatatacaaatatttagataaattctttataaaagatcattttttattgtcctacaactactttttcactcatggccatatttttatgtcagtacgtgtgtatctaccacatttttaatggcgacataatgttccattatggggacatattattttgtttaatgattcctatgttaaataactgtttctgttcttacaaataatgttgcagtaatagtcttgtgcatatactcttgcttgtgcatttgtatgaatatttctattaggtaaattcttagaagtcatattgcttggttaagtatatgcctattttaaatgtatgtactaccaaattgtcctctgatttgtcctctaaatcagtctttcatattataactagagcgatatagctataatatgtctttgtaaagtgaatttcatcatgtgatttcccagcatcaaaaagcaacatcagagatgtttggtggatttctattgtctatgcagtaaattttaaaattaaaaaaaattttttccagacaggatcttgctttgttgcccaggctagagtgggccacatgtgatggcgtgatctcagctcactgtagcctcaacctcacaggctcaaacaatcctcccacttcagcctcccgagtagctgggaatgcagccgtgtaccatcatggctagctaagttttgatttttctttttgtagagactgagtcgccctgtgttgcccaggctggtcttgaactcctaggctcaagagatcctcctgcctcagcctcccaaagtgctgggattacaggtgagagcctccatgctgagccaaaattcttaaaattttaaaaaagtttttaagagttatgtaatctggtcccaaactatctttcctaccattcttccctaccaggaaatttgtcctctgataaggcaaaatccacctcttctgtgaaatttcccatgtatactgctctctttcctctctctatgcaagatagaatgagttgctttcttccctaagttctcatagcacttaatttatagtcccttataatccctctgatagcacttaatgcgttgtactgtatttatgtgtgtctgtctcccctgctactctgtgattttcataagggtaggaactgtgccttactcatctttgtatccccagcactttacacaatgcctgtcagcgtagtgctcaacaagtgttcatgaatttgggaaagatatcctggaggtagtgctagagtgctagtatgataagaactttgagagatagagtagggggtggaagttttgaagtatagcagaaagctgactgactcctgggagaatggaagctggttaggaatagacaactgggcttaaactggcaggagccttcatgtgcttttctccttcactgcagagaccagctgcctggttatttgggttaataggcttgagatttgagaacatttaaagtattaaaaattggatgattgaggactcacttggtggagggggagattgactcagctgttctatgttctttccagactaagatgcatatactgaataaccaatccttttcccagagtcacgaataactttttctttctgaaaaatcaaggactcttcattttcagggcatgtttcggatgggagtaggaagactaaataggtcagatacttctactttgtctctttagcttggctcaaggggaaaggaacctattgaaagggtttagggctgtgggcctattcttgagtaaatcatctgtgtgaaattagttcttttgtcatttcaggcaactctggtagctctccttgtctggttgttttgaagaaagaagagtagaagaaaaagttgagtaaatcatgtcggagttactggacctttcttttctgtctgaggaggaaaaggatttgattctcagtgttctacagcgagatgaagaggtccggaaagcagatgagaaaaggattaggtaagagttccccaaaacgcatggggtcccaggcctttgaccaatgatgtctgggcttttccttatgtctcccacctgactttcataggaatttgtatatgtgatgtttaccactacttattgggtcacgctgggctctgagtttgttgcttccacagaaccaaatagtcttactgtctttacctctcaacccctctccatccaatctatgcatatcctgaatccacttacgcttctgttttgggtcttggcaggcgactaaagaatgagttactggagataaaaaggaaaggggccaagaggggcagccaacactacagtgatcggacctgtgcccggtgccaggagagcctgggccgtttgagtcccaaaaccaatacttgtcggggttgtaatcacctggtgtgtcgggactgccgcatacaggaaagcaatggtacctggaggtgcaaggtgtgcgccaaggaaatgtgagtgtcacctatggctgagtagagagggggcgaggccttggccgtggtgagaatttctttcctcagcctttattagacaagaaccattctttatccatctgtcattttcttttatttcttcccagagagttgaagaaagcaactggggactggttttatgaccagaaagtgaatcgctttgcttaccgcacaggtagtgagataatcaggatgtccctgcgccacaaacctgcaggtactggacctgtctagagatggttcttggtatggaatcctagtgtattctgactggtagcatcttaactccatgggctcagccagttagtggagaatagaagattgtattgtcatcccttctgcaagcatggtgtatttcaggggatttgctatgagggttgtttcctttttcccctactcataaccaccaccctggcatacttttctttgtcttgaagtgagtaaaagagagacagtgggacagtccctccttcatcagacacagatgggtgacatctggccaggaagaaagatcattcaggagcggcagaaggagcccaggtaagaatcaagtaattgtttaaagaaatgcttacaatatccctttaattcttttactattctttttacttcttctgtttataaaataatagatgttcattataggaaaacttgaaaagtacagaaaatagtaaaggagggaaaaaatcattcctaatcccactactcatatgtagacattaacattttggtatatttacttagttctttattttttatagtttgcattcgctttctcaggttgaatagtttgttctttatacgaacaatttgaagacaaataaaaataacacatgctcattattaagcaacaaatcacccacattcctactaccccagttttcacattatgtgaaaattatttcgtatatcttctatgtatatacataacgggttgactggatggataaactgaaaaatctttttaatattggatcatagtataataaattaaaatcatcctatttaattttacttgaatttaacagaataaaacactgaaataaaatgaaagaatagctaatcttcagacaaatgtttttttaaagtaaaagatattagttgttaacattcctctaagcttaagaaaaaatattatgaaagccattgagcagttggtcacttttttagtggagtttttttggtaacagccttattgagatatatataattcacatactatacaatttgtccatttttggtgtacaatgcaatagtttttagtatattcactgagttttgcaaccatcccttgaatcaattttagaaaattttcatcacctcaaaaagaaaccctttacccttttagctgtcaccctccctgatccctaaacaatcactcatctactttctgtctctctgtatttgcctatcctgggtatttcatgtaaattgaatcatacaatatgtggtcctttttgacttgcctctttcacttaacattaacgttttcaaggttcatccatgttatagcatgtatcagaacttcattcctttttatagccaaataataccccatgatatgtatttatcacattttatctgttcatctgttgaagaacatttgggttgtttctactttttggttattaagagtaatgctgggccaggcgcagtggctcacgcctgtaatcccagcactttgggaggctgaggcgggtggatcatgaagtcaggagatcgagaccatcctagccaacatggtgaaaccccatctctaccaaaaaaaaaaaaaaaaaaaattagccaggtgtggtggcacgcacctgtagtcccagctactcgggaggctgaggcaggggaatcacttgaacctgggaggcagaggttgtagagagccgagatcgcgccattgcactccagcctggcaacagagtgagactccgtttcaaaaaaaaaaaaaaaaaaaaaaaaagagtaatgctgctatgaacattcattaagagttttgtgtggatgtatgttttcttttctttttttttcttttcttttcttttttctt

SEQ ID NO: 707 - DNA, 32744 bp, Homo sapiens
  source 1..32744: mol_type = other DNA
gagtcacgtgggtccccccggttccggcgcggttgaggccttcggtggtgaacgagtctccagcaccatgtctggtttgtctggcccaccagcccggcgcggcccttttccgttagcgttgctgcttttgttcctgctcggccccagattggtccttgccatctccttccatctgcccattaactctcgcaagtgcctccgtgaggagattcacaaggacctgctagtgactggcgcgtacgagatctccgaccagtctgggggcgctggcggcctgcgcagccacctcaaggtgcggcattgggcgacgtggggccgggagggaagacggcaggcttaggcgaggggaggctcgggttcgggggagtcgggccggcggaggcctgggagttgttctggcctcccgggagcgcaaaggacgtgcggtggagcccgccccctcaccccgctggttgcctgtcgcggggcggggcgggtcaccaacgcctgggaaccccaagaagggctgcgaggctttggcggatgtggtgacacctgagctggggcggttgtcaacgtcctataccagttttggtctcagatacattgaaccgtaatttggttctccaaataaatgttggggtgttgaatatttatacggattggcatcataagataccgcgatacctgcaggaaagtaaaggagacagagctaaccgtgattaataaaatgttatttattgagcatctgctgtgtcagttactgtgctactttgcatatattaccatttggttcatgcactaccctatgaagtaggtaggtactgttagccccattttacaaatgaggaaactgagactcagaggtaggataaactagtaagtgtcacagatggaatagattcttttttttttttcaaaattattattatactttaagttctagggtacatgcgcacaactttcaggtttgttacatatgtatacatgtgccgtgttggtgtgctgcacccattaactcgtcatttacattaggtatgtctcctaatgctatccctcccacctccccccaccccacgacaggccccggtgtgtgatgttccccaccctgtgtccaagtgttctcattgttcaattcccacctatgagtgagaacatgcggtgtttggttttctgtccttgcgatggaatagattcttacttagtttggtagttaagtatgttgagggaaaagcgctgcaaccttattccttccttgttttaaatttgtaatttctgtagttgattaaagtcgattattggttacaaaatggtctcagtctctagtcctttttctttggtatgccagaatctggacttggctcttttatgtaaataccaactatgctcttggatggtgacaactactgccataataccagtttgattctgttttgtagctaagagtagcctggcctggtctttgagacattaatataatttgatatctgtcagtatttggttgcattttaggtaattttattcattcacaataagcaaagtgtctttttttttctttgtaacacaatggggcttttgttatactaaatagaaacatttttactttttttttttttttttttttttttgagacggagtcttgctctgtcgtccaggctggagtgctgtggcgcgatctcggctcactgcagcctctgcctcccggtttcaagcaattctcctgcctcagccttccgagtagctaggactacaggcgccagccaccacacccagctaatttttgtattttagtagagatgacggttcaccatgttggccaggatggtcttgatctcttgacctcgtgatctgcccgcctcggcctcccaaagtgctgggattacagccgtaagccaccgcgcctggcctcgtttttactttttaaaagggtttcagatataataagaccataacttatgttaaagtagtggaacccagtagtgtggtaatacatgtaatttatttctactttatttgggagagacaaactattttcagggcaattaatctgtgacccatcattttattattctgtttgggtatcaaactctctacccaggaaaatagtgatggcatgattttagaagcttagatatagtgtttccggggtgggagatcatgcttccaactcttcagaggatgttcatggactcagggaatttcagcaatgaaagagaccttgctctcatctcgtgttgctgtctgatttgttcttatattttaaagcccttcagtggctcactattgcttattgatagtttaaatttctcaacatgctttgttgtgctcttcatgatctgtttctgagctatacgtgtggtcacttcccactttgcattctacatggagccaccctggacagtaccctgaactcacttattttctgaactgtttttgtttatgccttgacctacttactagactgttagtatcctcagggtaggaactattttcaggttcatcttttctagaatgccaagcatgttaccttgcttctagtaagtactctataaataacaggaactgtagtttagcatggccttatgggaattacattgaatttagggctgctgaaggcacctcaacagcaggactttaggccgggcttggtgggtcatgcctgtaaccctaactctttgggaggccgaggcgggtggatcacctgaggtcaggagttcaagaccagcctcagcaacatgctaaaatccagtctctactaaaaatacaaaaattagctgggcatggtggcgtgtgcctgtaatcccagctacccgggaggctgaggcaggagaatcactagaacctgggaggcagtggctgcagtgagctgacaccgtgccactgcactccagcctgggcaacagaacaagactcggtctcaaaacaaaacaaaacaaagcaaaacaaaaaccagcaggactttgtgcacacaccctagcactttactatcactcagttgctctcctgtgtctgctctgttcttttgctactaaccagcttaatggaaccacaagggtcctaaacccaaatgccaaataggtaatatcattgaataaattggaccaggtattttaaaaaaaaaagcagtgatgataaatgggagaataattggacgtagtagaaactgttaattaggggtgaccaatacttagttcttgatgagacttgccatgcaagcatgtgggcctttttgccacatctgatttttcccttcccctcccctcccctcttccttcccttccttcctttcttcctccctctctccctccctccctccagtggcaccatcacagctcactgcagccttgacctcctcagggcccaggtgatcctcctacttcaggctcctgagtagctgggattacaggcacatgccaccatatccggctagttttcatatttgtttgtagaaatggagtttcgccatgttacccaggctggtctcgaactcctgggctcaagtgatccgcccatctcggcctcccaaagtgctcggattacaggcatgagccattgcacctagcccacatctgatttttcaaatgaaataggaacaccagattttgatgtgaaagctccagacttttaaatttcatcagccaggtttcagcactgcagagcttgggagctcccggcccacccgagggccatggatctcattgtcctcaccactgctttgccactccattttcctcaataaaatggtttggccccctaaaaattaaaaaaaaaaaatttcaccagccaattcagattggttcgggcattgatttgttttcagtgttatagggaatagtatagtgagttcacctttctacccattactcatattcaccaattatcaggatctttccacacgtgtcatcttaactgcttctgccatatcatttcatgctaaattgtattaaagtaaatcccagatgtcatgtatttcattcctgcctacttcagcatgcatctctttaaaaatataaaccacaatgttacgtggctaatcacgcctcacaaaatgaacaatgatggccaggcgcggtggctcatgcctgtaatcccagcactttgggaggccgaggtgggcgaatcacgaggtcaggagttcgagaccagcctgaccaacacggtgaaaccccgtctctactaaaaatttaaaaaaaaattagctgggcgtggtggcacacatctgtaatcccagctgctctaggctgaggcaggagaatctcttgaacctgggaggcggaagttgcagtgaagtatgattgtgccactgcactcctacctgggctacagagtgagactctgtctccaaaaaaaaaaaaagaacaatgattccttgatacccagtccatatagtatgatcccacttgtctcaaaaatatcttttgaaagttaatttgttgtctctctcaagtgtctaatctagagcagtctcctcttcctctcacctccttttttatccttgcaattgaattgttggagtcaattgctcttaaaagaatgtacagcatttcggagttgtcttttgcttcctagaggtgtcttttaaccagttcttccactatattttttgtaaaaggaatcagctgtaaagatgtaaccagaggttcagcaaaccaccatggcacacgtatacctatgtaacaaacctgcacgttctgcacatgtacccctccagaacttaaagtgtaaaaaaaaaaaaaaagatgtaaccagattcaggtttaatctttctgtcgagggtgtcactgcaggaacacacagtactttttgtgccccttattgctgctgctaagattgataagtggattaaggtgtgtcttagtgtcctattgctgctgtaacaaattaccacagatttatggcctaaaacatcagggatttgtcttaatcgttctgaaggtcagaagtcctaaaatcagggttttggcagagccatgtttcttctggagactttttgggagtggggtggggatcagttttcttgccctttctagcttctagaagccacttgtattctttggctcatatctccttcctccatctttaaagccaggctgggcgcggtggctctcgtctgtaatcccaacgctttgggaggccaaggcgggcaaatcactgaaggttaggagtttgagaccagcctggccaacatggtgaaaccccgtcttcaccaaacatacaaaaattagctgggcatggtggtgcacacctgtagtcccagctactcaggagactgaggcaggggaatcgcttgaacctgggaggcggagattgtagtgagccgagatcgtgccacggcactccagcctgggtgacagagcgagactttgtctcaaaaaaaaaaaaaaaattaaagccagtagcatagtatctttaactctctccctttccttcccttttccatcctctgctttgttcctcaccaccccttcttcctctcttcctccctccttccccggctatcatcatctcatctcattctcttactcacctgcctccctcgttcccttataaggacccttgtgataatcttctccacctcaagacccttaatctgatttaatcacatctgcacaatcccttttgccatgtaagataacacattcgtgggttctagggattaggatgtggacatctttgtgtgtgggaggcatttttttctctacccgggtggtaatagcccaaagccttcattgtaaagtttcccattaacctttcacttaggaatccactgatgactactgtgtgcatttattatgtcattaaggttgtgaaatgatgactttctaattccgttactccttccatatttattagctgaaattattcttaaggaattaatatcatctgattatcctaaaatttatcattcacattggtaggataaatgcagaatttatttcttctaattgataattgtcagagtaaggaattgttgcccttgtcattttcagtgttgtccaagagtttttgggtttttttttaaagtattttactgaactctttttaattgttggcttcaacttttagaatcattgtgttttaggcagttgtttccattctttatgcccaatttgtccctttggttccttcatattggctcctgtattttttcaacataatcctgttaggttttgatagcatccttgttttctggcacaacaaagtgttctaggcttatcttgtatatgtctatcctctgacctcagaacaactgtttctctaaggaattctagttcctttttgtggggattggtatttggagaccacaagctaggtgtcatttttgaaaatgtaatataccatgcaagccacagaacacatttgtgagcagatgcagcccatagcggctttcagtctttttcatggtgtccgttcacttagttccactttttctttttttgttgagatggagtctcgctttcacccaggctgcagtgcggtggtgcaatcttggctcactgcaggctctgctccccggggttcacaccattctcctgcctcagcctcccaagtagctgggactacaggcgcccgccaccacgcccggctaattttttgtattttttgtattttttgtatttcaccgtgttagccaggatggtctcaatcccctgacctcatgatccgcccgcctctgcctcccaaagtgctgggattacaggcatgagccaccacgcccggccgttccactttttcttatattttgacgactgcttcaaggattctccctatgcatcattttagcttctggagtgcaactcctaagtgccagagctccttttcatatggtaggccacattctaggtctcagttcagccaatggattgtcttgtctttggtcatatttccacccctgctttaggcagctgtggtttgatttgaggtaggaggagaactggagactggtgcagaacctggccagctgagcttagcatttggtggttgtgctgaatgaggcagtcttttttttgagatggagttgcgctctttttgcccaggctggagtgcaatggcatgatctcggctcactgcaacctctgcctcccaggttcaagcaattctcctgcctcagcctcccaagtagctgggattataggcgcgtaccactactcccggctaatttttgtatttttagtagagacggggtttcacaatattgtccaggttggtctcaaactcctgacctcaggtgatccgcccgtctcccaaagtgctgggattacaggcgtgagccactgtgcctagcctgaggcagtctttcttataagggtctctgtgaatatagtgccttggttaatctgactgattcaccttctttctgtctaggaacatctcagtatccagtgaatgcacctatgttatcatataccactctgtgttgcagttgtgtatttgcccatctcctgggataaactataagctgcttgaacagagactaggtttcattcatcattgcaatgcttgtctaaaataaggcctggcacatagtaggaccttatcctaaggaattagtgaacagacgagcaagcactgtctttgcctcatctctgatctttccctcttccattctctttatttgcttcctcccactctgactctagctatactgaacaccttacagttctttgaatataatgttctctttacctggatcaatgtttgactttctgtgtcccctatgtgtcccattggcttataacttcttttttccccctcaccaaaagttgtatgaaaagatactgtagtaccattacatcctgttttacatggcacttttcatgtagtgtagtgtttactttgtgaactctttaatgtcttactcatctttgtgtctttagtttaacgtacacattgttgtataactgagttaaacatcttagtcttcttgagaagccttgtggtatggtagagactagatctgaagtaagatagatttggttcagatcccagcagctccaccatttaaaggttatgtgggtcttgcagggattacttaacccttcttctctggtcctgtttctgtaatatgggaatcgtagagctcataaacttgttagaaggactgattgagatgggtgaggtttttattgtgcagggcccattatggtgctccatagatgttagtactcttttctttcctctgtattgaatgaaaattgaattgcttctcagagcccctcatgctatatgtcattgaaataagtagatatggagtattttaatgagaggaattatgagtagtttgtgattctttcattcattcaacaaatatttatgtaatatttagtatgtgtcagacctggctgagaatatggggataaacgggacaaggtcctcaagctcttgtggggaacaaagacaaaaaacaagttaaaataatagaatttcaggtagtgataagcactataatgaaagttcaggcactagggagtagggggtgactgatgggttaaagggtgtttgagtggtcaggggaggcctttctgaagcagagagagataaatggattgaaatgatgggtggtcctctcctgcaaagatttctatttcagacctatattgagatgcattttgtgttaagatctccaaactgagtctattccatacttccctactcatttcataaagtgaggctaaatcaggctaactagtgtcaggtataaagactttgctgcacataattgaagcaggaagtatcaactcgtcatttacagtgaatatagaagtttcctccattacttcaggtccataataaaagcctgttgtagggactcagaaatttgggtaatatttttattattattttgctctggctggagtgcagtggcatgatcatagctcgctgcaacctcgaactcctggcctcaagtgatcctcccacagcactgagattacaggcatgaacccctgcacctggctgaaaatttggatcttataccaagttatgatttctgtccttcccaactagcttatagataagaaagccaaacagatcccttaaagagttcagccttgaatcacaggcctaccacaacttaagcctaaaaattatgaagaagtaacttggcagttgggaaactattggcttataacttcttttttccctcacccaaagctgtatgagaagatactataggccaggcatgaggacagagaggagagggaggaggaaggagaaaaggacagtggtgggggtgggggcgaggaggagaaaagagagagaggcagaggggcgaagaggcaggggagggaggaaggaaggaaaagatggtatatatgctatagttttcagattattttgtttggaattactgtatttcagcttttttattactggtatctgtactgaggtctgttctgtgctgacaaggagaaagaataggatgcttcggctgggcgtggtggctcacgcctgtaatcccagcactttgggaagctgaggtgggtggatcacgaggtcaggagaatgagaccatcctggccaacatggtgaaaccctgtctctactgaaaatacaaaaattagccaggcgtggtagtgtgcacctgtggtcccagctactcaggaggctgaggcaggagaatcgcttgaacctgggaagtggaggttgcagtgagccgagatcacgccactgcactccagcctgggcgacagagtgagactccgtctcaaaaaaaaaaaaaaaaaaaaggaataggatgcatgttgctcagtcatcgaaatgaaccatcctttttatcaataacgatcccatgaacccttacttatgccagactttttctgtagggagaaatatggccctttcagcgtgaatttaacgtgactgttgttcactgggttagaaacaggtcaataaatagatggttcagtacagaaggctaattggtacattgacatttaataatataaatcgaatttctttttgtattatatacaaagttcctagcttttaattataacttgacctttgcgtccttctccataaaagttaaaggatacattgcttcatttaaatctctcttattcagtaaacagttgtctacagccttccctgttttgaactgatctagagaagggggctgcttccagtttgaaattgctacaccatatctttatgctgacttctgaagactgagtctggtttctaggaaagtggaacaaatatataaaggtaacccagtaggggtgcagtgacttctatgctgtttcttgtgtgaattgctgactggtagtttgatcctgagccattgcccccatatgcatatagagcctggcagcctggacagtagagccctctgtgaaatcagccagctggccacagacctgaacttgggctcccaaacaagtctccgacttgagggaggttgatgtcatctgctttatcctgtgctcccaacctcattgttcaacataaaatgtgggaaatcaagggaatagttgttaagaaagaacaagactttgtttgtgctcataatgaaagggtcacgctggaggtttttaccgtaaataactttggaacagtatgaaaaaaaacatttgatctggcttcacccccgcagtagtattgttagggcagcaacgggtctttcgttctcgttcccctcctttcctccctctctttctccccttttcttacccccccactcctcccccaagtcaagcatgacgtattgcctatgttaagttaatgtagcaaatgctgatagaagcaggaagagagcatctatccattatcatgccagtgcctggaaatttgctatttctggttttcagcatttctagaaaaagcctcctagcctccttgatcatattttagcttaagcaatacttatgtactatgttatactatcagtgaactgtactagaaatttgaaagaatttagtgttgccaaatgctgcctgtgggctaagtttgactttgttctgggcaaaatctagatgtgatccttttatttcaggaatatatttgatagactttgtacatgcttttgtttaaaagatcagcttaaattcattttatgcccattaaatgtagcacctaagccgtcagagtttatgtttttcgtttttgagatacagtggtcccttttgaaagtgtttctgaggctgggcatggtggctcacgcctgtaatcccaacactttgggaggctgaggtgggaggatcacaaggtcaggagttcgagaccagcctggccaacatggtgaaaccctgtctctactaaaaatacaaaaattagccgtgcatggtggcgtatgcctgtattcccagctactcgggaggctgaggcaggagaatcgcttgaacctgggaggtggaggttgtggtgagccaagatcatgccactgcactccagcctgggcaacagcgtgagactgtctaaaaaaaaagaaagaaagaaaaagaacatgtttctgatatatttttctatctaaagccatagcatctttaatgagttggtgttctttctgcttttttatatcttaggggaatagaccctttggctcagtattcacttgtgaattcttatgaagagtagagataattatatatgcaacctcaatcctctctctctttccgccatatctaatgttggattcttcatgtagtttattccttattaagttaaaaaccacatacaggaaaagctggcatcatcttggattccttactgtctctctttttatcagctaaaaggatcaaacatctgctttcttaggcattttgtatcctttcattttctaaatcttgctgctgcttccttgagagtgtacctgactacccctttctctctgtttccatgcaatagccatttgggccctaatcatccctggatttagtgaacatagcacaatttatctagtttgccatccattagtactcttaggttagaacatatggttaatgggccagagatggtggcttacgtctgtaatcctagcactttgggaggctgaggcaggcggattgcctgagctcaggagtttgagactagcctggccaacatgacaaaaccccgcctcttctaaaaatacaaaaaaaaaaaaaaaaatatatatatatatatatatatatatatatatatatatatatatattaggccaggtgcagtggctcacgcctgtaatcccagcactttgggaggccgaggtgggtggatcacatggtcaggagttcgagaccagcctggccaacatggtgaaaccctatctctacttaaaaaataaaaaattagccgggcctggtggcgcacacctgtagtcccagctacttggggaggctgaggcaggagaattgcttgaacccggaggtggaggttgcagtgagctctgatcgtgccactgcactccagcctgagcaacagtgcaaatctctgtctcaaaaaaaaaaaaaaaaaaaagccgggcatggtggcatgcatctgtagtcccagctactctggaggctgaggcacaagaattgcttgaacccgggagtcagaggttgcagggagctgagatagtgccacttcactccagcctttacgacagagcaaaactctgtctcaaaaaaaaaaggaagaaaatgtggttaatgacctaaatatttatggagttctgagttatcaccaacagttataacaataatataacacctattgaatgcctgctatgtgacaaacactgttccaggcagtttacctgtataacatttaatcttcacagtagctgggcgtggtggtgtgtccttgtaatcccagctactcaggaggctggcacaagaggatctcttgagcccaggagtacataaccagcctgggcaacacagtgagaccctatctaaaaaaaaaaaatcctcacaataaccttatgatgtatgtacaactgttgtccttattttacaaatgaggtagacaagttaaggaacatgcccaagtgtttacagctggtaaacggcacacctgtgatttgagcacggaccagaaagtctgactctagaaccttccatcttaaaagtactatgttgtatggtctctcagagagagaaaaggctagctattcctgtttccgttctttttttttttttttttttttttttgatacggagtctcactctgtcgcccaggctggagtgcagtggcgagatctcggctcactgcaacctctgcctcccgggttcaagcgattctgctgcctcagctgcctgagtagctgggactacaggcgagtgccaccatgcccggctagtttttgtatatttagtagagacagggtttcaccgtgttaggcaagatggtctcgaactcctgacctcaagtgatctgcctgcctcaacctcccaaagtgctgggattacaggcgtgagccaccgcgcctggcccgtgagttttttgtttgtgtgtttgttttgagacagggtcttgctctgtcacccaggctgaagtgcaatgacatgatcacaactcactgcagccttgacctcctgggatcaggcaatcctcctccctgaggcttctgagtagctgggaccacaggtatgcaccaccacaccaaactaatttttttttttttaattatttttagaggcagggtcttcctgtgttgcccaggctggtctcaaattcctggactcaagtgaccctcccctttcggcctcctaaagtgctggcgttacaaggtgtgagccagtgggcctggtggaccttgtgagttttgaggaccctggccaggtattttgtaggttgccctctattgggcatttgtcagatgtttttctcatgataaggtgaggttatgggttttggggaggaagaccacagagataaaatgtcattttttttttcttgtcaaaaccatgattcacttataaagtgtcattttcatcacatcatatcaacatgatttgtcacgttgatactgcccttgatcatttggatgaattagtgtttgtcaggtttcttcactatacaatattcttttctttccttttttcccccttaatgatgttttggtcagtccactacagagtaactcttttttccccctttctattctgtgttctttagaaggaagtcactttatgtagcccacacttaaggagtggggagttatgcttcacactccttacgggtgcctacataaattatttgagaatcttcacggaagatttgtctctcttccttatttatttatttaatcaatcatttatatgtaagtgtagattcatggatgtttactatgtactttggattataaaccagtactataattgttgccctgattgtttcagctttagctattgggagccctttaggttcctgtgtccctttgacatacccgcattcttgtattttttggattttcatttttgtttgtttgtttgttttgagacagagccttgctttgtcacccaggctggagtgcagtggcataatctcctctcactgcaacctctgcctcctgggttcaagtgattgtcatgcctcagcctcctgagtagctgcaattacaggtgggtgccaccatgcctggctaatttttgtatttttagtagagatggggtttctccatgttggccaggctggtcttgaactcctgaccttaaatgatctgccccccaccccgccccggacctctggtttttgtttttgagcacttcttactttctggcactataagatgctccaggctcattttgtacatttccttcctcagtcttaggatcatttctccaaggagccctggttgcttttattggagaagggaattaagtctgggtggatagtgttatttttaaggcatctttttctggtacctttttttttttttttaaatgcagttgtgctagcaagtggccaaaagtagtcccgtccttcctgcaactttagagtaagggtggaattctgtgagcagcaggagtgggctaggatggggagaaatgtagtgcttaggggcagggcagagaaccaggtctcacctctgcattagatcaggtcattcattgttagggagggtcactaaaagaactcatttgaactgtacttgtatctttagcaagatgatggttgaaaatgaagagtctgttagttacagtccttttacgaggatcttcctgataaattgttgttcgtggttacttccaggaaaattgtcccttagataaatttgtgagctttcatcagaaaacaaatgatgtctctttagtcttttaattttggcttccagaaaacttagaaccaaatttattttacagatatcatttgctcaatttaggttcttgataagacttttttcttccctcaggtgaactctattccattttattcctaattgccttattgacctaagctacttatagatccttttgaagttttattttgaatgtttggtaaaggaatgagagcaggcttcagtggcaggacctgctcaaaaatctgtttccagccactgcctagcacggtccaagaaaatccaattttaaatgagtttatcttcccagttacctgttttcgcacttctcacaggctcagtgtgagtattcacatattcttgacatcacctactctgcatataaaattaacacttttttttccttctctttttttcttgagatggagtctagctttgtcgcctaggctggagtgcagtggcacaatctcgggtcactgcaacctctgcctcccaggttcaagtgattctcctgcctcagcctcctgagcagctgggattacacgcgcctgccaccatgcccggctaattttttatttttagcagagacagggttttgccatgttggtcaggctggtctcaaactcctgacctcaaatgacgtgccaccttagcctcccaaagtgctgggattacaggcatgagccaccgtgcccatcccccctactttttaagttgtgaactttgttttgcttttcttcagaaggtgatatctagaaacaaatctttattacttcctattccttgatgtcatatgggcaaattttatagcttggtattacctttgtttaattaaagaactttattatcactattataagtatttattgttaaaaggaaagaaaagaatccttttaaggtcttgctattatagtaggtaaaagtagcagttattgattcaccaaggtggttctctaggacaatttaagaagaaaaaaaaaacctctcacttcttgagaaaccagatgaccttttaaggtgatctgtaattagaacattttaatgaaaggaaattaagctatcattttatttttttagcctattagactttgctggctctggttagtcattgagtttggcccagtttcctattccctaattttagctacctggtttatgtaatgatattggggttgggagatgtgatttttgttttgttttgtttttctttaagactaatgacttggctcctaaataactacaaagttatatgaactagataggaaacctactgattttcagaaaaatcgtgagatgttttagaatgcccaaacaggccatatgagtgagccccacctgaaagttcagttgtcaggttgcctgcctggatttccaaatatccagataaattccctcatgtagttgtgtcatctgaaggttatagggagtgtagacatgtggaggccttgggcgaacttccagcatcatcacacactatttctgggaggtaaatttcatgttgataaaaggtgcaggctgcagtggcgggccctttgccttcagcctcttgaaatgaatttcagtttttgccttaaaatgagtctttaataatcttcggatgtcatagagagaagagacaatgcaaatggttcttctgtgattgcagttcctcagtacaatgtggtagaggacaatttaaatagtatttacccctttggagtaccagctggagatgtgattttcctgaagtctttcagaaaaacatagcagatttcttaattcattttgtaaggtacttttagcaatgacttaagaattttatgacgtgcatttaagctcctttatgatgtagagagactcctctccttaagttaaaataaaaaaaagtttttgaaggacactgttcatatcttggaggaaaattaagagattataatctcttcttccaggaaataaggtggttgggcaaatgtgtgcaaatcctgcaaacactgttaaattcagttgtttgtcctaggccaatgacttagtctctttccttgccttagcatggagatgatgaaatctgtgatgactcttttcagtactttcaccttgatgcttattccaggctgtcctctaccagtttcacttacatttagacattttcagcaacctgtaattattagccttcttccttcagaattaagccaatgcaatgagcaaatctggaaagttatgttacccaagttcaatgttgtctgcaactttattcttaggaggaaagtccaaatccaaattagggtctctagattggcttggaatgtgaaaaatctgttattcctgctgtctacctttttgaacttcttctttgctcttaaattttgtctttatgctttataaagtgagaatcttggggaagtgagtatctttgtgggtcaactgattctgaagaaaggaagagaggcatcacactgatgactacacattactttgtgatttggttagttctcagacctttttgactgatatgtgtgtatccagggttctaaggtatttatttatttatttatttattttgaaacggaatttcactcttgttgcccaggctagagcgcaatggtgcgatcgcgactcaccacaacctccatctcccgggttcaagtgattctcctgcctcagcctcctcagtagctgggattacaggcatgcgccaccatgcctggctaattttgtatttttagtagagatggggtttctccatgttagtcaggctggtctcgaactcccgacctcaggtgatctgcccgcctcggcctcccaaagtgctgggattacaggcatgagccaccacacccggccctctgaagtactttttggctgggcacggtggctcatgcctgtaatttcagcatttgggaggccaaggtgggaggatcacttgagctcaagagttcgagaccagcctgggcaacatagggagaccctgtctctacaaaaaataagacaattagtcgggtgtagtggtgcacacctgtagtcccagctacgcggaagactgaggcagaaggatggcttgagcctacgaggttgaggctgcagtaagctgtgattgtgcagctgcactccagcctgggcaacagtgaggccccctctcaaaaataaataaaaataaagtagtccttttttatgctgcttctttcagtttatgattcagaaaaattatcacacaaacaagaggcctttaagaatcttcaaggctaaatttcccttgattgtttagctgatgctaacttcaaggtctttaccttgtggctgcctgctgatctctctaaggtggagaatgcagactgatcagtgctgtgttaacacttgagaggactctcaactctgatttgcactgatgcaaagattctattagtctttcttggccactgtacattcctcttttttcagacattccttttgggggaaggcagcatgggatgcagaaagagagtgggttttggacatttctcaaatccacgtaacactatttatttatttttacttctttttttttttgagatggagttttgctcttgtcactcagggtggagtgcagtggtgcgatctcagctcactgcagcctccgcctcccaggttcaagcaattctcctgcctcggcctcctgagtagctgggattacaggcacctgccactacgcccaactaatttttgtatttttagtagagacggggtttcgccacgttggccaggctggtctgaaacacctgacctcaggtgatccacccgcctcggcctcccaaaagtgctgggattacaggtgtgggccactgcacctggctatttattgagacatgttctcactctgttgcccaggctggagtgcagtggcacaatcacagctcactgcagcctcgacctcatgggatcaagcagtcctcccatctcagcctcctgagtagctgggaccacaggcgcatgtcaaccacacccagctaattttattttttgtagagacggcatcccactatattgcccaggctggtctcaaactcctgggctcaagtgatcctcccaccttgaattcccagagtgctggtattacaagtgtgagccactgcacctgaccaacacgatttatttattaactgctataatggacaagttactaagtttcctcatcagtaaaacaggaataacaagaccagtttccatggagttgctgagaagattaaagattatgtttgtaaagtatatagcatgattctttaacccttttatctttccaaaccactcagttgcagaaccccaagctccgatcagttcatgcatgtgccttttcttttcttctgcatcctggctgctaggttgtaccgctagaaatgtgtggttcattatcttagctgagatctcagtgctacccagcagtcattctatgtgatgttagtcagctttctttctgtcctgtggagagggcaaaattgttggcccagaagaacttggttctataggtgtgttttgtttttccttgagatagtttttcttttcttttcttttcttttcttttcttttcttttcttttttttgagacggagtcttgctctgtcaccaggctggaatgcagtggcgtgatctctctcaccctggtttcaaacgattctcctgcctcagcctcccaagtagctgggactacaggcacgcatcaccatgcccaactaatttttgtatttttagtagagacggggtaggatggtctcgatctcttgacctcatgatccacccacctcggcctcccaaagtgctgggattacaggtgtgagccaccgtgcccggcctgagatagtttttcaaatgttgggattggttgtaaagatttaaaaattaagagatttcaaatgaaagttaaaatgtctaccttctcttgaaaaactggatgatctgaaaacctggagtgccatggcagtcattggcttttcctataacacaggccatcttttctagtttgctgtgtatggcttgtgctggtccagtagactcagtatgtttctcacttgatctctgtgggcatttactttttggttttgtcctgtagactctacctccttaaaatccctcaaactcttcagttcatgggttactaaacttttttgtaattacataaaattatttaattaaatacaatttaataaaccttaataaaattaaataaaatttaaaattattttaattaaataaaatctgtcaccttctctctatactgaaggcccttctcctttcttacctggagtactggaatagtgtcccaacccacctccttatctctagggttctctctctatagtctgtcttcatagtactggtagcgtcatctttctgaattgtcattgactcacatcattctgtttcaaattccttattgcccttccactttgtactaaatgaagcttaaactccttagcatgctattctagttctacatgattgggccagtacctctccaggcacttaacctctctgggcctcagtttcctcccatggaacacgggggaaataattcttgccagtagggttatagtgaggattaaatttaaaatgcttataaagcagcaacacattatttgacacttagtaagtattcagtaaatactagctattagtaatatgataatgccatatttttgttttatgtttttctggacccaggccttcatatttgctgtctcttctaccctgaacttctttacccctctttcccttgattgaaattcatcctttaggactcagctcatgtgctaccccctcctagatacactccctgaccctccataatcccatggcacttgtgcatacctctggtagcatgccttgcacattgcagtgaagcgctctctctctgttagctttattgaggtataattggcaaataaaaattgtttatattcaagatatataatgtgatgttttgttatacatacacattgtgaagtgaataccacaatcaagctaattaacatatttcatcaccccatacaaatgtctaacaaatacattaaaagttccccagtatcactaaccatcagggaaatgcaaaccaaaaccactatgaaggcatatcatttcttatcactctcctctcctcatttagactcataagccctttgaagacaggaactatcttactcatacttgtatcccagtgaccagcacaggtctaggtatcttaaatgtttgataaattaggccgggcgtggtggctcacacctgtaatcccagcagtttggaaaagccaaggcaggcggatcacttgaggtcaggagttggagaccagcctggccaacatggtgaaaccccatctctactaaaaacataaaaattagccgggcttgggggtgcatgcctgtagtcccagctacttgggaggctgaggcaggagaatcacttgaatccggaaggcggaggttgcagtgagccgggattgcgccactgccctacaacctgagtgacacagcgagactctgtctcaaaaaaaaaaaaagggccaggtgagatggcttacacttgtaatcccagcactttcagaggccaaggcaggtggatcacgaggtcaggagatcaagaccatcctggctaacacggtgaaaccccgtctctaccaaaaatacaaaaaattagccgggtgtggtggcatgtgcctgtaatcccagccacttgggaggctggggcaggagaatcgcttgaacccgggaggcagaggttgcagtaagccgagatcgcatcactgcactccagcctgggtgacagagcgagactctgtctcaaaaataaataaataaaaataaatttaaaagtttgacaaattagcaaatggtgctggatggcagaagacagttgactaatactactgtttattagggaatttagaagatgtgccataaaactttttttagttaatctgtcatttcaaatttatctagtagtgataacttttctttagttattatcaattttttccaaaataaaataactttattattatttttgaatataagtgatccagtgatacatgcctttttttttttttttttttttttttttttgagacagagtctcgctgtgttgcccaggctggagtgcagtggcacagtctcggctcaccgcaacttctgcctcccgggttcaagcgattatcctgcctcagcctccaaagtagctgggattacaggcgcccaataccactcctggctaatttttttttttttttgtatttttagtaaagacggggtttcaccatgttggccaggctggtctcaaactcctgacctcaggtgatccacctgcctcggcctcccaaagtgctgggattacaggtgcgtgagccactgcacctggcagagctaccacgcccggctacatgtcattttcaaaaaaggccgggtgtggtggctcacgcctgtaaccccagcactttgggaagccgaggcgggttggattatgaggtcaggagatcgagaccatcctggccaacacagggaaaccctgtctttactaaaaatacaaaaaaattagctgggcatggtcgtgggtgcctgtagttccagctactcgggaggctgaggcaggagaatcacctgaacccgggaggcggaggttgcagagagccgagatcacgccactgcactccagcctggggacagagtgagactccatttcaaaaaaaaaaagggaaaaaaaaatagaaagtctcacccctcagaaataactactgttataaagtacttttaaatatataagcttaaatgtgtgctacttaattttcctgcttaaaatttccccttaaaagaattatgttttaacaaatagcattagaacatccagtttaatgtaattaagccactacttttgtgttccacattgcaaagtagcttccagtcttaagtgatgaaatatgctttctactaagacagccacgtgctctagaaatgaaggctaagatccagtctgttaaattaccatggaattcccttgctttgtatgtggctgtttacttagcagtatatgccctttattctgtgctgataggccattctttggtaatagagcagcttaagtctgaagagctaaagctaaggatctagaagaaaggaataatcatttatggaagccaaagatacctttttttttttaggataaatttctctcctttttgtttttgtttttgtttttttgagacagagtcttgctctgtcacccaggctgcagtgacacggcaagcttcccagtacctgggactataggtgcgcaccaccatgcctggctaatttttgtattttttgtagagatgaggtttcgccatgttggtcttgaacactttttttttgagacagaatctcactctgtcatctgggctggagtgcagtggcgcaatcttggctcactgcaacctccgcctcccaggttcaagcgattctcctgcctcagcctcctgagtagctgggactacaggcatatgccactgcgcccagctgattttggtatttttagtagagacgaggtttctccatgttggttggccaggatggtcttgatctcttgacctcgtgatccatccgcctcggcctcccaaagtgctgggattacaggcgtgagccaccgcgcccagccaggtcttgaactcttgagctcaagtgatcctcctgccttggcgttccaaagtttgggattacaggcgtgagccaccatgcctggccagaaacttcttttttgtttcctgtgttttgttcccactctacctggccgttgacataattaacatgaaatttgcaggaatagatctcctggattgtcttctctatgtatgcttttcttcctgctgtccttgtattgtgtgtcctaattttattctccacccacaccccttccccatcaaatttgttttatagaataaatgtgtttttatatatctttgtccctcttgtataatcttttgataattgtctactttcatttttgtgacatgttcctctatgcggaatgatactagtgagtttttgccaataaatccaatgtatgtaacttggagcattagctagattaactttttggtatggtaagacatcctatagcagcaacagattttagcccacagtgtgattaggctatttgaatggatgaaatttgctgtatttggatttaatcttctaatccagtttttgtctttggggatggttggaacatagtcatcataatgagaactatcaattgtctttcatagatagtgtctctatcttcccagtttctgtaagttctcttcctgagtgttatttgctgcctattcttactacttttcttattttagatcacagattctgctggccatattctctactccaaagaggatgcaaccaaggggaaatttgcctttaccactgaagattatgacatgtttgaagtgtgttttgagagcaagggtgagtaatcaagagtgtttctctggattaagaatcttctccaactctaatgctccttaatacagtcagcacttaatatctagtttcatttgtattctttatttattctgatttggagacctgttaccttgtagtctttggagcaccttttaaaaggtcgactacatggaataaaagattgaataggtggaacagagagaatttttagggcagtaaaaatattctgtatgatactgtaatagtggatacatgtcattatatggttgtccgaacattacatttggaatgtacaccaagagtgaatcctaatgtaaactgtggactttggtagatagtgatgtgtccatgtaggttcatcatttgtaatgaatgtaccactctggtgggaaatggtgataatgggggaggctatgcatatgtaagaggaagggggatatgggaaatctttgtgccttcctctcagttttgttgtgaacctaaaactgctctaacaaagtgaagtcttaaaaaaaaggctgggcatggtggctcatgcctgtaatcccagcactttgggaggccaaggcaggcagatcactgaaggttaggagtttgagaccagcctggccaacatggtgaaaccctgtctctactaaaaatacaaaattagctgggcatggtggctcgtgcctgtaaccctagctgctcaggaggctgaggcaggagaatcacttaaacccaggaggtggaggttgcagtgagcaagattgtgtcactgcactccagcctgggtgacagagtgagactccatctcaaaaaaataaacaacaacaacaacaaaaaaaactggccgggcgcagtgactcacgcttgtaatcccagcagttgggaggccgaggcgggcggatcacctgaggccaggagtttgagaccagcctggccaacatggcgaaaccccatctctactaaaaatacaaaaattagccagatgtggtggtggcacatgcctgtaatcccagctactcgggaggctgaggcaggagaattgtttgaacccaggaggcagagattgcagtgagccaagatcgtaccactgcactgcagcctgggtgacagagcgagactctgtctcaaaacaaacaaaaaggattgtctgtttgccaggcaaatgcagagagaaaaattatgaagggtccttttacaaaggagactctttagggctatgatgtcagctaagaggataggctgacagttctatgcaagagactgtatagtctggactcgaccattctgagaaatggtggttaggtgatttcgttgtgcaaatattaagtgtacttacacaaacctagatgttatagcctactacccacctcggctatatggtatagcctactactgctcctaggctacaaagctgtaaagcatgtgactgtactgaatactgtaggcagttagaacacaatgctatttgtgtatctaaacatagaaaagatatagtaaaaatacagtattataataatcttatgggaccaccttcatatatgcagtctgtcctcgactgaactgtcttcatgtagtgcatgactgtactgtgctgtgacaatcagggaggtagttggaagaccttgtaagaaagaagatatcctgatcatttggaccaggtggggctgtgaactgcttaagtttcacaactttttcaatgaggaagtacatcttccatggacaatgtcgtaatcaggattacacattggatttgggagaacagaacactctgggtgccacattttgttttgttttgtttgaagacttgttgttttcatgctcagaagacacatgtgacttgtcttactttgttctcagtcttaccctgtgcagtcttatttatatttctcttgctttcgagttaatctttccagtctatccaaaagaagtcctttttttgtgtgtgtgtgaaacaagagtcttgctctgtcacccaggctggagtgcagtggtgcgatcttggctcactgcaactttaccgggttcaagtgattctcatgcctcagcctccggagtagctggaactacaggcacgcaccactgcgcctggctaatttgtgtatttttagtagagacgggtttcatcatgttggccaagctggtctcgaactcgaacctcaagagatccacctgccttggcctcccaaagtgctgggattacaggcatgagccaccgtgcccatcccaaaagaagttctttactgtctttcaagcatgccatactccgattttaatatctgagcctttgctcatgctttgccgtctgcctagagtactttgcctaagtcctgcctttaggtgttccctttttagtgaagtctgtccacaactacaatcttctctcctcttccctttgctccatattggaattgtctgaaccagttcctttggcttaaacttttacagtgctttgcattttcaccatagttgttttgtgtatatgtcttagatcccaattgaattatttgaaggcagggattgtatcctggcttagtccattttgtgctgctataacagaacatcgcagagtgggtataaacagtagaaatttgtttggttcatggttctggagtctggaaagtccaagatcaaggggccacatctggtgagggcctttttgctgtgtcacaataacatggcagaaggtatcacatggcaagagaatgcacaggagagcaagaaggggctgaactcacttttataacaaacctacttctatgataatgacattaaatctattgatgagggcagagccccatgacctagtcaattcttaaaggtcctacttctccgccaggcacagtggctcatgcctataatcccagcactttgggaggctgaggcaggaggatcgcttgagcccaggagttccagatcagcctggacagtatagcgagaccctgtctctacaaaaaatacaaaaattacctgggtgtggtggctcacgcctgtagtcccagctacttgaaagactgaagtgggaggattgcttgagcccaggagttcgaggctacagtgagccatgatggtgcgtgccactgcactccagcttggaagacaagagtaagaacctgtctcaaaaaattttttttaattaaataaataaaattaaaggttttacctctcaacactgttgcattggggattaagtttccaacacatgaactttgagaggggcacatcgaagccgtagcatatctctttaaaatctccagcacagttttagtacttagtgagttttcaatgagtagttattgaattgacttcagttcatttcagaaaacttccagtgtctctcaggcatcagagggtacagtaccattcagtgtggcttatggtttcaggaaccccagtgcttcagtggcactgtttcccacaacttctaatttcatgcaggcagttgtaaattttataactaggtgaattccaggggattggggctgaacagttttctggggctccttgggtcttttcctttctcctacttgatgatttaagattagaatgcttctttgatccagctgaatcagattgactcttctaacatgaactctattataagaagcatccctgagatttgaacacttaaagttgttttttttttttccttgagctgttgtaactcttttaagggcttagtgggaatagctctatgacattgtactcctactgaactaggccatacattgatcaaaatgtttgaattaaagtggaatattagataaaacttatgttcttttcagtactcagatttatattaagtaaatccaagcttagcacatatccaataatcctaattcatcatggccttccctcaaaatttgacagggcaaccttttcagatgtggaaatacacattttcagccgaagttgttgcctactatctcttgatttatatgccactcaatttcacactgttttgatttttgagttttatttcccaattcaataagcctgtgtggtttcccttctgttctgttcctctgtagtaccagttgcagtatcttgtgtccttgcctgctcagagatgtttgccagcagcatgttcttgttgctttccggcaccccacacagatagaggctttgtctggaatgtttgtgattttagccagagccaggaattttctgcaactgagcagggggaggagttgtggctgtttccctctattgagagggtaggggttctgtagagggagggcgggcgggtgggtgggtaatttcccagaattttaagtatttcacacaatgattcctttgatttctttctcaggaacagggcggatacctgaccaactcgtgatcctagacatgaagcatggagtggaggcgaaaaattacgaagaggtatgtcctgctctaacagccagaggaggcagcagtgtgctatgctgtgaggtttctgtgacctcggcaggccaacaggctgtgctttgcccaaagggctgtggtttcttagcagtcttgtgacagccagccatgatcttactgatacaaaaagtggtattaacagccttagccgggcgcggtggctcactcctgtaatcccagcactttgggaggccaaggcgggtggatcgcctgaggtcaggagttcgataccagcctggtcaacatggtgacaccaagtttctactaaaaatacaaaaattagccaggagtggtggcgtgcgcctgtaatcccagctagtctactcgggaggctgaggcaggagaattgctggaacctggggggcagaggctgcagtgagccgagatcgtgccactgcactccagcctgggcgacagggcaaggctccatctcaaaaaaaaaaaaaaaaaaaaacagccttgaagaataattctggctgtgctgtcagccaaagactgaacaaactgtcccacagaatgttggtttgataaaacactgaagcatatggcattagttctcttgaactgtgtgtgtgtagagagagatattttaaattttttaaagctggaattcagttatttgttaatgcccaaggttaagaaaagtgatttgtttttaattcctaagactttttccccaagaccaacagttgtatatctatctatctatctatctatctatctatctatctggggcatggattcagtgctgtttagtcttgaacaactgttttgtgtttgggaaataacaatagtcaaagatagtttttagttaaaataatttcaaactttcaaggaagagggcaggatggaggaaaaagctgcaagagactaggaatggtgataatagaaatttgatgctgataagaagttatttattatagactaataaaaactgacacttatttgggtgacagggagatggaggtgtacacagaatgaggagaaggacaacagcctttttcatctctgcgagacttgggggcagcacaaaagggttcttcaaatgaagggcacctttgaaaaaccacaagaactatttaagactagataattgatctttacagaaagataagagtatttttacccaacaaaacagtacgtaagggcatgaaggaggagtggggtacaggaaatagaatgggcttttgaagaatgcaaactaagtaaatgaaggaaaattggtttaagtgatttaggaaaattgtctaggaatagtggaacagaagttgctctctctttggacagcactttggaagggaaatatcctaaaatggaagaagattggaaatgactggttaattctgcaacaggaagtagtacaacagttgcagctctttccttgttcaaatcctcaattgaatgaaactaggtagcgttatttagaggcagtaaataggagcaagtgatacagttgtgaatgggagacagtttccggtagagaattttcaattgtttgtttctgtttccaggctagtttaatttaaataaataaaacaagaagacctctttatttgatgaacttgagtaaattgaaaaatttttttaaaccttcatgattcagaagaatcttaattatatttaaataagattatgttaaagtgcttttataagatataaaacactagggagaatgttctcattattataaggtagaagaataggtaaaatgatttccagtttgtggttactgcttctgttcccgaactgtggaccattctcagttgaatttgtactctgtggaattttacctattgtaatctttttctccaacatgatgcctgtcattaagggtatttatttatttatttattgagatggagtctcgcttggttgcccaggctggagtgcagtggcgggatctctgctcactgcaagctccgcctcccgggttcacgccattctcctgcctcagcctcccgagtagctgggactacaggcacccatcaccacgcccagctaattttttgtatttttagtagagacggggtttcaccatgttagccaggatggtctcgatctcctgacctcgtgatctgcctgtcttggcctcccaaagtgctggcggattacatgcgtgaggcaccgcgcccagcccaagggtatttattaaataacaacacatcaatgccctattagacagtagacatagctagttcccctcaaaaacagatgacattattgtgggtttatataaagaatgctttggacacagctgtcgtatagcattttagaacccctatacctcctggaatttccatcatccttggactttatagacattaggaaaggggctttatctttcctgaccttttgcttaacccaagaggggaatccctagcccaaagaaaaccacggtgcttcctttgcctgcttcctgcttcagacgtctgacatgtcctaagcctgcctttacgcatgtagttacaacacagctccaaggttctgcttcttaaccaagaaactcctccccactactttctttaacatctatccccaccctcctgcccttcacccctgctccccagcagcagaccagattgatgtagaggaggaatggctatgacacagtccgaagaccagccctttcttcagtctgcagcaaggctgccttgaaccttgcttagaaatggctgttagctggcagggcacggtggctcacacctgtaatcccagcactttgggaggccaaggtgggtggatcacccaaggtcaggagttggagaccagcctggccaacctggcgaaaaccccatctctactaaaaatacaaaaattagccgggcatggtggcgggtacctgtagtcccaactactcgggaggctgaagcaagagaatcacttgaacgatttaatttcaggcccttgagataatggagaggctttatctccagaggatttggaatctttggcatcagcattaagattcgggaatgtggcatacttctttaattttcatgtccaacacatctctccctcatatctgtggactcataattctgaaatcccatgtggtcctgtaagattgaatagtaattgtaccacactacctacctaaattgttattaattaatccatgtgaaattgctatgtaacacaatacaaatgtaagatgatattatttggaagacagaatgcttgtcatactgtgaagaagcattaagtcttgttgtttgaattctttaaagagaaagaatgcctttgtcctcggaaataaagcacttttgattttgatttcttgcattttattttatgaacctctgaccactgtctcacttctgcccttcagagggtgtatctttgtagattcaggatgtgaaccgagccacttctttttagtttgtcatctgtgaactagagcagttgtttgtagggacttactgtctgtgcagttgggagaatgcaggcaattactgtccgacaaagaaggagctatctgacacatcttctaactcctgggctgtgtgtcccacgagtaaaataccgctttgcctaggcgattctatttgtctgtcatttgctatcaatctatattccaaaaacacagctgccctggttggagcaacagctgaagactttccaaaagttctgtttctctgagtgctctcaggaaggaggaactctgattccatgtactagatccaaagtcctttttttttttttttttgagacagagtatcactcagttattcaggctg

SEQ ID NO: 708 - DNA, 32742 bp, Homo sapiens
  source 1..32742: mol_type = other DNA
tgcgcacgcgcgaacgcggggtgggccgggcctcgcgtagcccatctcctcttcctcctcgcggtcgcggccggacggagggtggagggccctgcgcctgcgcggagctggagtccggctgggccgcagccgctgggagaccggcggttgccgtggggaccggtcgggcccctccctcctccggtcccccgccccaggtccttccccaccgagacgcgccggcggaccgcgggcgagtgcagccggtgacccggcgagaggcggcgccgctcccaagatgtcgcagacggccatgtccgaaacctacggtacgaggcccgggctggcggggcgcgcgggtcgggccgcggggggcgtcggtggcgcggggccgggcctgggctgcgggggtcttgagggtggcggtggcgccggccggagccgggggacggatctcggaggtgtctgggcttgggaccgggatgggggacgcgggccgctgggggctcgggtggggtagcgggtgcgcggggcgcgggggcgctgtgcacagcgcattggcgtgatccgccttttcaagtttcctcttgctctttctctgctcttgcactcttagcgcttttcccctctcagtctaatgtaaataactgaaggtttgaaaagccagcttgatgttcggtttcagctgcgatattatccccagcgagcctgtgaagggcttagggcgacgcctgtgttcctcaaatacttcagtttgacctttcctggtttggaattccttgctttacattgggattacagtgaggagttattaataggctaattcattcatctcttcctccggagacctcttgcttcgtttatttctccctccctctcagtgttttttagccttttctgggttgcattttggctatttataaacatgtcttgtctccttcttaagaccgtaagcaccttggaagcaaagccctggctgtttaatctttgtttcccctgcagcacccagacctggaggtgcttgacaaatactgttttgaataagcgaaagctttcccagtgcatatgctgtgtgcttttttttttttctccccttttttggccttgcgtggtaagaataaacaacttgtactttgtatcagagttgaatattaatagatgtttaccagtccctaatcactctttcagatgtatgtattctcagattaagactttgatttggagttttacagtcccagagagaggctcaagttcaaaattacatacctcaagccaaattagtcctgtctccatctgtcctggcatgctgcttccttctctgcaacaaatactgtggaatggcattagggaagcgagcaccgtgctgggagggctgtacatcctgcagaaacacagcagacacggctctggtctcatggagcgtagtctattgagggaatgcagtattaatccaattgtgatactaatgagtgaataattaaaaaccaggcaagagttctgaaggagtgtggtccgtgaaagtgtgttagaaagaaagatgacccagacaggggtgtcagggaggcattaaccaggcagcacgcagaacatctcaggcctgtgggaagggtaactcaagaagggtgtgttttgagtaccacgctggagaggtggatgaggaggcagagaggagagggtcttgaggaaggcgtcagtttgtcttgtaagaaaaaatgggaacttttggaagggcttccatgctggggtcacagtgcatttggtccaccttcagtgagtgactcctgtgactggtactgccctgttcttggtgacaaaggggcatgacatctgttcctagaaggcgtaggaaatcctccagtaagtcgatgccttcatcaggacaagtgtttgcaaatgtttctgcaaatggcagtggtctggttcttcctgtagagaaccacagtcagaaatgttgtaaggaaaacatggtctttagcaatttttggttacatctttgcacttctttattttcaagtgctctttagcccaggcttagtttctttaacctgagtaaggagcacggagcactaggggaagggtggaatgtccaaataagaaaagcaagtgggggtcatgaatcagtaagaaaggattggaagagttcaggagatagagcttttatgtttcatttttcgtatacgcatgataacaactgataaaatagagcttatctttggcatctccacttcagacacagttaactgaacttttgagcttcacagattgattacattctgatcataaggctttgaccattagtattcttatttcatggtaacttccaagtatgtttttactttgcaactctgaattgaatcttttcttctaatagaggaaattaatcgaaaactagtagaaactaataaatagaaaatgaggccagaggtgatggctcacgcctgtaatcccagcactttggaaggccgagttgggcggatcacttgagctcaggagttcaataccagcctggccaacatggcgaaaccccagccctattaaaaatacaaaaaattacctgggcatggtggtacgcttgtagtcccggctacttgggaggctgaggcatgagaattgcttgaacccaggaggtgaagtttacagtgagccaagattgtgccactgcactccatcctgggcaacagagtgagactctgtctcaaaaaaagaaaatgagttttagaaggagcaagcaggacagttgaagtttgccaagctgaagtaaaagtcacctagaaccaagtcctaggctgtcactttgacgtatcagtggccatatttatacagcattgttccttaaaagtgaaacagtcaggctctcttctggacatttgcctctgagctggtgaaggaatgtttgcctaacctttaaactcctttgtactctgtgcttatttgctcttctgtaaaaggaggctctgtgtagcttgacagagagatgaggaatgaaatgtactgggtttttgtttccctttttttttttttttttttttgagacaggacctcgctctgtcacccatgctggagtgcagtgacacaatcacggctcactgccacctccatctccccatctcaagtgatcctcccacttcagcctcctgagtagctgggaccacaggtgcatgccaccacacctggctaattttttttttttttttaattttttttgtagagacgaggtctctgtctgttgctcagtctcatcccgaactcctgggctcaagtgatcctcgtgcctccacctcccaaaatgttgagatcacaggcatgagccactgtgccctgctgaaatgtactgtttatgagctacctctcattaatgtgttcatttaatatgctttttaacatattaaaacagtatttcaccttccatagactgagtagtgttgaacatttttgttgctttgaagtcaccacatgaatactgtactttatgtaatatcgtgaaacaaattgaaatcttaggttttggatgaaacccttagtctgaatatgaaacagttctaccaaatgccattagatacactacattcttaaagccctggccagttagtatggcttgggacttcccaaggaactctgcttcagccatctgagacctgggagattacaaattggctgaaagtaattttgatgctaagcagcgatgttcagaaaggagctgaaaagtatatgtagtgggaaaatgccaggaatttcttttgaaattaagtgctggggcagttcgagagtgaggaaaaatctaatacaaaatctctacatatattagagtttatgccgtctacaatgggaataacaaatgaaacagaagaatacaattcaaattgctggttctatgctcatttttattaaaatatactcttaatgtttttattttgtgcttcattttgaaaacagcacagtattacagtatttgccatataattttgagaattatcagaatattttccttaaaaatgtatcattttaggctgttcaggttgaattgtgttccccaaaatatctgtttaagtcctaacccctagtacctgtgaatgtgaccgcatttggaaataaggtctttgcagatgtaatcaagttaagatgaggtcatcgtactgaattatggtgagccctaattcagtgactggtgtcattataagatgagggaaacttagacacaaatgcattcagagagaaagagatgtgaggatggaggccaagattggagggatgcatctaccagccaaggagtgccaaggggtggctggcaaccaccagaagctagagagaggcaaggagggatccttcccttgagccttcagagagaccttgaccctgtcagcactctgaatttgaatgcccggcctccagaactgtgagacaataaacttctgttgttttaagcttcccagtttgtggttctttgtgatggcagccctaagaaactaaaatataggctttgctcatcaaaatacgattcatgagaaatttaggatgacaaggcaagatgaagtgaagaagatatccttggtaaaggaaatagcatttcttttccttttttttttttttttttttctttgagatagagtctctcactgttgcccaggctggagtgcagtggcacaatctcggctcactgcaacctccacctcccgggttcaagcgattctcctgcctcagcctcccaagtaactgggactacaggcgcccgccaccacacctagctaattttttttttgtatttttagtagaggcggggtttcactatgttggtcaggctggcctccaaactcctgacctcatgatcccgcccttctcagcctcccagagtgctgggtttacaggcgtgagccaccgtgcccgtgtataaatagcatttcaaagtcacctggttccaataaagtatgaaataacttgctcttagggaaatcaccccaattgccctttaccttaatttcatgaaagatggaacaggtaaacatgtcaacaaaggaatcctgtaacaccaaaacaaaggacatttcttcaagttgaataaatatatgattatacatgtttgtcattttctttttctcattcactgaaagctggtgaacatttcaagtaccaaagtttgggaaacattgcaccagtggcttatcaaactaatgtgcacacgagtcccctggtgtattaaaatgtagatcctgacttggagggtgagggagatcggcatctgaccagctcccgggccgtgcaggtgctgttggtccagggaggcatgtaatgactccatgctcgagaactttgaaagcatggttttttgaaaaaacaaaatattctttctcatggtcatttgaactgtaaagtattccaatccatgcctgtgactttactgctgatgctctgatgactgtaacatctatatttctagtcacatccttcactcaaactacagatctttttttcagctacctaactacacctgggtggcctacaggcatctgaatgcagtacgtcccaaacccaacaaattattcacgcctatgccccatcttctatttttcctgtgtttgcctagaagataaagttagagtccatttttaattcttccccatccttacctcctggatctattgggtttcagagtcttttgagctgacttcttaacatggtttaagttactgtttaccctgaaagatgcaaaggaaagttaaattagggccagtttacatgattaaaaggtaagcaaattgggtttcattccaaagttcttcgtcgtagtgacttgagcagctgtgctgactatcttacagcttgccacacagcatctgcaccactgtccctaggcagcttccacagcacctggaacctgggttcatgaggatacaagagcctcctgggccaggatgggagtagttttccactttagaagaactatatatctatatataatatagatatatataatatatatagtttatatataaattatttacaatttatatataattatttataatttatatataattatttatatttatataaattattattatatcagtggaaagtaacaaagagttggcctgctaagtaactgccttcctcaaatcagcctcctcagtgtgtgtgatcccaacgaatgggtcaggaaaatcaaagacccaatcacgaacctggagcaattgttgggagtctgtgctgcaaatgttaaatttacaagcgtcaggattccgctgtgccgacaacgtttaattcaggcttaggtaaaccgcggctcctacaggcacactgcagagtcccatgattagcttttgctgcctgttccacctcctttacttcttattcttcccgctcctctacaggtcgtgtgctcttctgctgcccaaaccttccacctctcctaaccagcatttcatcaaggttcccactgttcaattcctccctgaccattgtaccaaaactttttgtcctttaaagtacatgtcatcttatattctgtcctctgccagctcctcgttgctgttatctgatgaccctggggatagtcctttttcaacaaggtcatctatcatatggtcttgctctttgctctaactcctgactgatcctaggtcactgcattgtccttgcagaggtcaatcaacaactccgctccacagttccttgactttagtcaagatgaagtcaggtctcttctaccacctcttcaggtactcacttccctgactgctccctggactttgtcacctatcccattctgaccactccaactccatccagtcttcactgtaagagcttcaggctgctggtccatctcctccctttcttctttttttctgagacagagtctcactctgttgcccagtctggagtgcagtggcattatctcagctcactgcaacctccacctcctaggttcaagtgattctcgtgcctcagcctcctgagtcgctgggattacaagtgtgcgccaccacgcctggctcatttttgtatttttagtagagacggggtttcaccatgttggccaggctggtctcgatctcctaacctcaagtgatccacccaccttggcctcccaaaatgctgggattacaggcatgatccaccatgcctggcccctttcttcttttcaggcaatgagctgctctctcttcagataagactcatggcttttccttccacctcgtccttctttttctttcaactacacacactttgcacagctccagccctggctacccagccatctgccttgcctgctgtgcagacagagctccttttagattgagatcattgcagatgtatggtctctgcttccagctgggtactcagtaatacttagcaatcatttttcttatcctggccacctctctctccacatcagctattttaaaccttcacacatctcctcaagcccattctctcactcctagtagatgaccaccagtagatgtaaggaaaagatgccatgtctgcaaacttgcttacctcatccttaaccctttccatgttgtctcagaaggtctctgttgtttaaaactaaccccagccttctactttggaccccatctctaaagcttcaagtccccacttcacccatcatgtctgttcccctccttttccctttccactggtagcttcctgactttgcgccttcctcctttaaccacctctgtctctcctttccctcacagctaaactgcttataagagctgtcagtactttttgtcaacagttttacttccttcattcttcaactgactgtaattaggattttgcccccacctgaaatgatgttggtttcaccagagatgctgatgatcagtcagtggacacttggcagcctttatcttacttagcttctcttttcatattcggcccttataagaactgcttccccaaatctccactgtgttggcttacaggtattttcaacttaatctctgaattggcaacttattattttaccttaaagcctattccttctcagaaccttcagcatctcttatctcagttttcgtaatcacagaccctaagcctttaattcctaaagaaggaaaccttctttaaatgactccattctacccaaattctagtgctataccacagcacttagccttttctgccaggaagtaggacacatgaaatgcatcatacagtcagaggccatacatccgtgcttcctttctgacatttggaaatcttgaaagcaagacgattgcttggggaaaaaactaggaaggcagaggtcatcgtgtctgctgaatatggcttaattttcttgaacactcaaggtcatcattgactattgactgctgcacagaatgtgctgtgctattacggccactttctagctcatcccctgctgtccccatctgcctttgtgcctgtagttcacagtcctactttagtatatacctttgatctactgcagtttggggcattaggtaatagaggctgcttgaagtgaatgtaaaacaagtcagtcaattccaaatgaggtgtctcctgtagagttaatcttttttggctttatgtttgctatttcagtggctaggagacctttttttcctggtctttattttgtctgtgttcctgaatggctgacatttgctcaagattgaattctaattatttgatacctttcctattatctcatttgacttttctcatacggaaagttaaaagtacattagtaggatgtatctgttttagattttctgttttggggtgtggtctttcccttcaatcttaattcattctggagaaaacccttatcaggtgaatataattataaactgagtgagaaaaatttattgtgaatttgagccctcaagttaacgttcactataataaacaccgaatctaatttaagtgggcacaattatttaaccagttgacacttagttatataacctacataggcattttgccttcattaattactctgtaatatggctattcacctgttcctgttaagcctttctgtagttgttaagcactatacacttaacatataaaacatacacatggtatgctatatatatgtcatccactgttaagcaaggaaaaagaaaaaaccacagattaaaaatacaaaataaacccataaaactagtacagattctgccatattctgatatggagtcatgatgagtgagatcatcattgctgcaaaccagcaaacattgaacactctgagagaacatgatgcattcctgccagaatgatttctgtgagatccaggtaattcagcactaactgaaactcctcatgaagttggattctcatcatctaccaaggaataattcattatctccttatagttttatctgcgttatctaaatacatgtatcaccacacagaaaaagaattgatggacagctcagctgcttatctgctgctccttccttgtggtattgtttccttcttgaatcctttgctagttcttccagtttggggactgtgcatagtaaacgtacagagtcattgtctgataatatcacgtatttttttttccgttaagctttctattttgagatcattgcagattcatatagttttaagaaaaaatacggagttctcatgcacctttttcctagttttctccaatgggaaaaacttacaaaactgttgcagaatatcacaactaggatattgatgttgacacagatacaggacacttccgtcaccacaagatctctcctgttgcccttttataggcacagacttccttcctatcaccacattttccttagcctttggcaaccactattctccatttctatgattttgtcattttaagaatattatataaatggaatcttgcagttgcaattttttcggattgactttttcactcagtataattctctggagatacattccaggttattgcatgtattgacagtttaatccttgttatttccgagtagcatttcttgttatgagtgtaccaaagattgtctaacaatttacctgttaaagaacatctgggttgtttccaattttgggctataccaatacaactgccataaacattcatatacagggttttatatgactcaaagtcttcatttctccgagatgaatgtctaggagtgcagtttctgagtcatatggtagttaaatgtttagttttataagaaactgccaaccatactgttaacattttacttaatgttaaaatctcgagctgtaatggtgagtttgtctgtttggccttttaattctgttagtttttgcttgacatattttacagctgtttggcatatacacgttcaagatacctatatcttattggtgggtttacccttatgtattaatagttatgtaatgaccctttctgtctctggttattttctttgttctgaagtctattttatctgatattaatacagccagccctgtttttctttgattaatgtttgtatgatacatccttttccattctttcagcagtccatatcattataactgaagtgagtttcttgtagacggtgtatgattaggtcatgctttttaagtcagtcttccaatctttgtcatttaattgatgtatttattccatttacattattgtaattattgatattgtatgactcaggtttgccattttatttctcagttttcttttccagcctgccttgactggccattttaaagaattctgtttgatttaccaagagtgctgtggaatgtatctctgctcatagctttttcagtggtcactctgtgtattacttcatatatacataacttatcatagttatatatatatatatatatatatatatatatcatagtttactgttgtcatctttttatcctgtcttgttttaattgtcttaaatatttcctttacatattttagaatcatatagataatactatttttcttaaacagttaaacataatgaagaaaactcaagataagaaggaaagcctattgtatttgcccatgtttttgctttccatgttctttcttccactcagatgttccaagattccttcctttatcattttcttcctgtttagagaaattcctatagctattcttttgcaggcagatgtcctggtgataaattctgttaatttttttttaaatcagagaatgtcttcatttaccctttattccagaaaaatagtttcacaggacatagggctctgggttgaaaggttttctttctttgagcacttgaaaaatacagtcactctcttatggcctccctggcttcagatgagaaatctgctgttattcgaattgtatttcccttgtagatatggtatcatttttctctggctacctttaagactttttatttgtcttcagttttcagaagtttaattatgatgtatcttgtcatggacttctttgagtttatcctgtttgagttcattcagcttttcaaatctgtagatttatgtctctcaccaaatttaagttttcagtgctgtttcttagagtgcttttttcaaccactttctctttgtcctctccttccaggactccagtgacatgaatgttagatctttttcattgtctgcaggtccttgaggctctgtttatttatttcaaccttttattctttgttgttcagattggatactttatcattttgtcatctagttcactgattctttcctgtcacttccattctgctgtcaagcccatccactgaacttttattttggtagttttatttttcagttttaaaatttctatttggttcttctgtgtatcttctagttctttgctgagacttctagttctttgctgatgatttctaattttttcatttgtttcaagcatgcttgtgttacttgttggatatgatgactgctttaaaatctttgtcagataattctaacatttgtcatcttgacataggaatatgtctgttaccttttttcgttcagtttgaggtcttcctggttcttggtatgatgaggagttttcaactgaaacgtggatatttttatattatgttataggaccttagatctttatttaaatcttttaattgttttcctctcttggacactaccttatcactgccatcatgtctagattctggaatctagaagttcagattccccacttgcttccattgacacatgagaggaattcatcttgttactgctgctgggtaaggattagaatgttctcgtccctctttccctggtgacctccactgacactgtgccaggggcacacaagagctcattacacagccagcagagatgaaagccctagctccctacttggtcttctctgacaccatctttgtggggatattgatatgcccggttgtagccttgcaagggtggaagtttaggctccccattcggcctttgctggcatgggtacaggttggaccatagtttttgctgtggtgcttggctagaatagagtcattattgtgtaagagttttcctctctcttgcttggctgccccttttttggtcccatggctacagagagcaggcttttgctaggactttttttgtctgcatccattggcatttctgggttgccagcttgttctgctccaagcctaggatacaagaggcaaaaagaacccagggaacttccttccaaatcattccttgggccctgaaatcccgggtacactgaaatctctggtacactggccttcttttgctccactctttcagagtcttttttttttttttgagacggagtttcattcttgctgcccaggctggaatgcagtggcacaatcttgcttcactgcaacctctgcctcccaggttcaagcaattctcctgcctcagcctcccaagtagctgggattacaggtgctcactaccacgcctggctaatttttttattattattatttttaatagagacatggtttcatcatgttggccaagctggtctcaaactcctgacctcaagatgatccacctaccttggcctcccaaagtgcaggaattacaggcatgagccactgcgcccggcctcagagtctttgatatttcttttctagggtggttttttttgttgttggtgttgtttggttttttttttttttttttttttttggactgagttttgttctgtcgcccaggctggagtgcagtggtgcaatcttggcccattgcaacctccacctcccaggttccagcaattctcctgcctcagcctcctgagtagctgggattacaggcacccaccaccacgcctggctcattgttgtatttttagtagagacgggggtttcgctgttggccgggctggtctcgaactcctgactgaggtgatccatccgcctcagtctcccaaagtgctgggatttacaggcatgagccaccacacccatccttttctagggtttttagttgttcttagtgagaaaaataggaaaaagttcttctactccattgtcttggaagtggaagtccacctgggctttaagggtaatttttttgcacatcaaatgcaacaatgatgggttgttgttgcccctcttctcagccctgtgaagatagtaccccgttgctttcggacctttggaatcaagacacctagtttctttacaagccttctttcctttctttcttattgcttttacagtcttcatgtgtattctgcagtttcacaattatgtatttatgtgtagatttatccttatttattcttctcatggttcagagttattttttatttgaacaatcctttaattttaattctataaaattctcagccattatttattttaacatgggctctctaccctcattctcttatttttttaatttcaaaattcctgttagatccatgttagatcgtttccttcaatcctccatgtctcttgagttcttttatatgttctgtcctcagctctcagtactgcctactggtaatctccaggttttattctgattcactaattctctcctcagttttgtccattttactctttaacctatccattgaataattagtttacagacagagtgctctgtcacccaagctggggtgtggtggcacgattctaactcactgcagccttgaacccctggactcaggtgatacaccctcctcagtgtcgcaagtggctgggactacaggtgtgtgccaccatacccggctaagtttttatttttattttttttaggaacagaattttcatatgttgcccaggctggtcttgaactcctgggctcaaacaatcctccctccttaacctcccaaagtgctcatattacagttgtgagccaacgcgctcagcctggaactttttaatgctaacaaaattctaatagcattatttttagtttgattgcctgtaaccatgtgaatattatgagaggttgaataggcttcatctctcagtggtgattaacatagttcttaagaaacgtgacagagctaggccaagcatcagtaaaggaacacactcttggagcttaattgaggagggagtgcttgatctgatctggaaaagagtgtggaggtgacactttcaaagctacaaacaggggagccaggaatacagagcagagcctttgaggccacagaaggagtcaggcagcagtggggattagcagtggtgggtcaggagcaagggtaaggagtggacttagcagctgagtcaaacggggaggagggagttggtgttctggtactcccgagctcctaagctcctaagctatgcagaattacagttctttggtaacagaaaaaacaaagtgaattaacatgggtaatatgaagttactgatactacatcatgctaattaaaaatttccatttggaaatcctttatttccattttataaaaaataatatcccaaattaaatatattactatgtgtaaagaagaagttattcagtttgtcattgaatcagacaaatttcgcacttgaagtgctgacctaaacttggcttatgccgttatacaaattacagatgagggaaaagaagcaagaccacgtaaatctgcaagtgcagacaaaacttatttttttccttttcccttttcccctgctttttaagaagaagaaagaggtagactcttcaaagtctaccaggtttattcttttgtacagaaaacacttgaaattttctaaactaactttgctgccaactgaatatgcatatttctttgaatagtggctagcaaagggacaagttttattcattccaagagtagttttcagactttaaccttgcaaagtaattattcaaagagcacagtttggaaaaccactgaattaacatgtcagccaaatatcttaaatgtgaaaaggtaagtcaacatatgtattgtcatttcacaagatactcagttacctctttttcctgttatattaacaactaagatactaaatttgatgatcgtgatctaagaagaaattcacagcactattttgaagttattttcacagtctctttttatctttcagattttttgtttaagttcttggttattggaaatgcaggaactggcaaatcttgcttacttcatcagtttattgaaaaaaaatgtaagtgtcatgaaattagtcattcttccgtgcatgtcttctgagagccctctcactcagatttgtttacagtaaacttaattttttcagaggaaaaaagtaatagtttgaaagtattttgaagggttatgttattgaactttgggtgatgtgattttttattaagttagcatttctatttaacaatggttcagtatatggttacttctactgtacattttgcagatgctgagagaccatatagtgatgttgaagatagcagaggggttctgtggcaggaatcctgtttcctgacagagcagccagagaagctctaggcatacattttggataaaataacaacatttggtcctcatagtgggcttgtgttgtagttaaggcagttgctgtcatcaattctgttttataggccagaaacagacctcttgaccacacagcccatcttttaccattgactttcactgttttggtaaaggaggttgaattttttatttcaaactatgtgagaccttggaaggctgtagaagactgtaggtttgaaaggcccttaaaacaaaaaatgctttttaataatggaaagaatcgtggagaaagacctgtctagttagtggcaggtgggtgaagggtcaaaaacagagtgtcttatttaattaagtttatcttaagaaagtatatgtgaggcatggtaggtggtgggtaaaaaggagaaagaaccagtttggggtgttttggcagaaagctttgaagaataataaaatcctagaaatttactctgcttcttccattttcatcacccaagagcttgttggagcctgtttgtttagtgacatggacccagtgtggcttagtcacagaactggtccttactgaatttaacaagtattcattcactggatagtttatttacaagttgccaagactttgtgtggtacagtcttagaaaagaatacccagagggtactgggccaagtacccagcttatgtaatcattctgtcctcctcagagaactcccctgcatggtcctctctgcaactcctcacaacagtaatgaacggaaggtctctctttgtaaccaggatgcccctggcctttagttactattttttttaaggatcttaccctgcatttttcctggtagtttactcctaatggaatttccatactagttctatactgtctgggcatgaaacagactagcatagtcactgtaaccatttatctaccctctgccctgtaaataataaatccagttgccagtggcatccctgatctctgaaacaattaaattttgttctgcagttacaaaatataaactagccaatggactgtatagctgcgatattcaatttcagcttatctgtttatcatcacagaaatgttctttcataggcagtgtattcccgctgggtttagcaaaatacttattttgcctgtctcctgcccattcaaatagtactaatttctccaacaaattcatcccaaatcatttccatagaacactacgattaatgaaatctcaaacacctgtagcttgcatagggttttgttttggggtttattggagggtgtattgttttggggtttgttggagggtgttttattttggggttttttggagggtgctttgttttggggttttttggagggtgttttttctttggttcaatttttttcctccttttcccttttcctctgcttttccttccactcactgttatttctttaaaatatttaaccattcaaatacagtagttgaaactgtctccacctcattacttactgagttccacacctgtcactgggcgttatgcccttcagaatggtacgctggtatgtcagcagtcaccatctgtgagcatcttaacagtgcacagttggatgtggttcggatatggcagggctactttcaggcataggtttttaaatgtatcatttgtttgggggttttgagaaaaatctttatgtctctttgagaataggggctgtgtgtattatctttaaaactaaatgcatcttctcaatggaatgttggagaaatgaatggctagagtaatgtccattccccattgatgtaactcttggttttagtgtcacttgtttaaatctataagcctgttaatgttctaaaattaaatatgctgttcttgtttttcttttttagtcaaagatgactcaaatcatacaataggagtggaatttggttcaaagataataaatgttggtggtaaatatgtaaagttacaaatatgggatacagcaggacaagaacgattcaggtagcttttctctaacttaataaaaatatttgaaaatttgatttaaaataattgatgatattctctcaatatataaggtctcactccctccccaacacaccccttccttgtcctaatctcagaaacttcatttttggaaactttgattgacaagacagctaaaatttaggttagctctctgcagcatggattactaaagaatacaggaggatctccgcgcaactgcattataattcggaggctgacccattctcaggaggatgtggcactgtgtattgtacagtatgtttctagattcaaatcaaagcacaagcttgtttttctgtgttccttttttaaagaagaactttttaaaaccttgtgagggtttgttttgttttacattaactagagcatgttctgatgtttgatacacactccacaaaatattctctccacactttaattacaatagggtcataactgaggctcagaatgacttcagtcactgcaaatgaggttacatgtttagtattctgtaactactaaagcaagaaaatagattaatattttagttgtggtttttgcacagatgcacaaagtcagaactgatattcatagttttataattcagtgaaataaaatccaccccatttgtaaacatttcacttgaagttgagtacatgtcgtatattaaataattgaagtttggctgggcacaatggcgcatgcctgtaatcccagcactttgggaggccgaggcagacctcctcacctgaggtcaggagttcaagaccagcctggccaacatggtgtaaccccttctctactaaaaataaaaaaattagccgggcgtggtggcaggtgcctgtaatcccagctactctggaggctgaggcaggaaaatcgcttgaacccgggaggtggaggttgcagtgagctgagatcacgccattgtactccagcctgggcaacaagagcaaaactccatctcaaaaattaattaagtaattgaagttcaataattgcttcaaaaataccataaccacctttaatcaccatcatttttctggaagcattgattaaacatggtggattcaattagacatttatgtcttccctctcagaaccccactgaaatgtctgttaagtaactgaaattgaagtaactcaaaaaggccaagattgagtgagtgcacaattatgattgagagatttccaaaaaaatcttaaagataggaagtagatggtgctctgacagcagaaggagctccaccttaagtactgtaatgggggaagccatttcttcctctggagtcccagaaaaggtcaggatttggaagcatcaggttctacaggaggtagaggttacagaggttcatgtttacacacgaaataagaggttcagtcttttacgttgaaatggagtctagactcaaggtcataaggcccacctgagggcatggggtcaggcctgaaaagagggaaattaagtgaaaatgaaagcctctggcccccaacccacctcccctacctcttccctggtcgctggcagccaggtgtgtatgtcccacataggagaaaggagccttctctgcagaaaaatgaatagtcagaaaggaaaggcttgaaggtagtgacattttgctttcccagtcaaacagcccagtctctatccagtcatctgaaagtgaaaccctccaagcccacctgctccacccacacataaagagcttcttttagactttttcattccttgctcttaatgatcaggcagaattttgaagaaagtttctatagcaaaagagagagctcaaagtaaagaagctggaactttgagggagtaagaaaaacacactaaaaccacagtatccttaggaagaagagcagagattgcattggagtatgtaatagaaacaaagtcatacttaaaaagagcaatcagaataatatgttaaataaactcatggtgaaaaatgggagagatgacataaagaatcctccagaattaatccagaagatgcaatgactattaggagttccagaagagagaagagcagagagaataatagaagaaaatgtttcactgaaggaatgagattccagattaattggcccacctaaaatcaaacatagtaaggaaaaagtccagaccagagcgtgccatgtgaaatttcagaacaccacagatgaagtaaggaagaccagaaaggttccaagagggaaaaagcagccacatataaagtgtgaaaaatggaattgctttgcacccttccacagcaacattggaagctaaaagaaatggaagcattgccttcaaaactcagggtgaaataattcttcaacctaaaattctaaacttagccaaactgtaagtgtgcaagtaaaggctgaataccaacagatgtgcaagaaagaggaggaagccaagattatctttctcagagacttcttagaaatgtactttcttagaaagtttaggaggatatacttcaccaggacaagggcatgatcccagaaagaggaaaatgaagccagcaggaagatccagctcagaatggcacaggtctagagggacagtgagggaagactaagacagcagtcagtatgtgatggcactgcccttccaggaggaccaggggaacaagtgaggggctctgtaagagctcacgactctgtcagagcggggaagaaacagctctgaaattcagtttcctaaaccttttgtagaaatgagaagaaagaaactgtaagatccatgagtgtaagggtttttgagttttctgtttgtttcccctgtgcccagaatagtgtctagcacacaggggcgcagtatgtgctcttttaatgacttaattaaaggaaacccagttaccagaaagagagaactcacctcgcttgtggagagtagggctcccagagaggagtgaggcaggagatggctgtgtttaatttagagacttttcgtgacatttcactttaaaactatccacatgtattatattggttaaattacttttgtaagaaaatgtggcacatatacaccatggaatactatgcagccataaaaaatgatgagttcgtgtcctttgtagggacatggatgaaattggaaatcatcattctcagtaaactatcgcaagaacaaaaaaccaaacactgcatattctcactcataggtgggaattgaataatgagaacacatggacacaggaaggggaacatcacactctggggactgttgtggggtggggggaggggggagggatagcaatgggagatatacctaatgctagatgacgagttagcggttgcagcacaccagcatggcacatgtatacatacatatgtaacctgcacattgtgcacaggtaccctaaaacttaaagtataataataataaataaataaaaggaaaaaaaaaagaaaatttaacacctcaaagtagtattcttaaatgtgtatatttgtatactggagtaatttgtataagaaactatttgtcaagacagtgttgtaaaataaatttgaaagtaaaattttaagaagtagatgtgatacagcttatcttgaagagaactcgtagttccctcttcctctagaagctaggtgcctgctgagcaagaatagaaaggcgctgcctcttaatagatgtgaacaagcgaggcctttccccctgccttaggaggctgtggggtgaagagcaaacagtccactctgcacctctacctgccaccagtccttaaagcgtgtgcctcttgctaacagtctcaaggcagagaggaaaagcttcaagctacatgaagaccttgaagcttcctgactaagagctaaaaagtacatttaaaagtagctcttctttgccaagcagcaaagtaataattagtaattttgtttgtttgtttgttgcaagctgcacgggtttctttgttctccaaggatagttcattcctctggtgtctttttttttctgacatcaagtctatggggtttttcttcacaccagccagtcggattctctgacaccagctgggtgtccaacacttcaattcacttttgacactacccagagttaaaggggaccctccaggctaaggagacctagactgccacccccgcttcagacaccagtcacaactggagtgcccaggcttcctgcacttcttggccaaatacagatctggcagttcccacaccctccatccctcacatccccatcaggttggagaatttgttagaatgattcacacaactcaggaaaaacatttttcctggcatttactggtttgttagataggtgtcaattcaggcacagcctggtggaggagatgcttaggagacgaggtatggggatgggccacctcccagcacctccatgccaccaccagcccaggagctctctgacccccatccttttggtttttttgtggaggttttattacaaaggcacgattgattaaaacattatccattgatgattgactcaatctccagctcctctttcctccccagagggctgaggtgaggctataagttccagcactctcctcactcggtgagggctcccacggccacagccccgatcccaaggctctctagcctgctactcttcccacagttatctccttggcttacaaaagacacctttatcactaaggaaatcacaggggtttgggcctctgtgccaggaacctgggacgaagaccaaatatatattttttaatttaattaggccacagttaagttctgggaatgtctagctagcagtggtccaggccctgtgctaggcactgggatcctctggtgagtgagacagcagagccctgccccatggaggggaggcaggcagccaacacagagacagagacagaaagagcatcccaccaagtgggatggtgccacccaggagacagcacgctgagatagagggggtccactggatggggatgcttggggaacgttgctgaggagatagagttaatgagacccaagggacaaggaaagccagcggtgtgacgagcccagacgggagtggcaggggctgggagcagggaagagaatggggccaaagggacaggtacagtgacggagatgtcctgtcctgggccttgatgagttgggctgctctgaagaatggactgtgggccacacatggcagcagggacagcagcgtgggcagacacaggatttgtgtagtgtaggagactgcactaggctggcggagtgaatgtggaggtgcacaggaattgaggatgaatgtggagctgatttgctttagaaacagggtgcgtggtgatgcctcttcctaggccaggacgggcctggagggtgggaccaaaaagagtcctgctgtgcagatgttaagtttgacatgtttatcaggcagtctcatggagatatggaggcagcacttggatctgagctggagacaaaatttgagtcgaatgttaagagagcccaggacccagctctggggaatcgcaatcccagcagggcagattcagaagaatgaccagagccagagaagtggctggtgagcgggaggaagactagcagagtgcagggcgcagaggctgcgcgagtgagtgaggacagaaatgcccactccagcttcggttgcagagagggtggggaccttgacaggcttttggggagtagcagagatggacactaggttggcggtgaagaagaggaagctgcaggtaaagacagctctttcagaaagttggatgtggggccacgcgtggtggctcacgcctgtaatcccagcactttgggaggccgaggcgggtggatcatccgaggtcaagagttcgagaccagcctggctaacatggggaaaccccgtctgtactaaaaatacaaaaattagccaggcgtggtggcgggtgcagctactcaggaggctgaggcaggagaattgcttgaacctgggaggcagaggttgcagagagctgagatcgcgccattgcactctagcctgggtaacgagcgaaactctgtctcaaaaaagacagttggatgtggagaagagcagacagtgggacagtaactgaaaagatggtgcagcatatttctgttttgtgttttaagatgggcggtaccagagccaatttatttttattttgctaataggaaaaatcctgaactcctggcttttttttttttttctttctgttgcctgggctggagtgcagtggcatgatcgctcaccgtcacctcaaattcctgggatcaaacagtccttctgtctcagcctcctgagtagctgggattacaggtgtgtactgccatacctggctaattttttgtagagacagggtctctctctcttacccaggctggtctcaaactcctggcctcaagcagtcctccctcctgggcctcctaaagtgctgggattataggtgtccggccactaatgggaaaaatctcacaaagagggtgagattgacaatgtaggggaaaacatgtatgaccaaaagacgccttcttgaatgtgagagtggatatgacatactgggacactcagttttcccgtagtaatagggcagggatgcaggtgggtgtagggccgtggtgactatggattcctgtggtgactatggattccaccgcgccgagaggtggcgagaactggaagagatggagaaaattgtgccagggagtggggtagatgaggagctcgcagagaagtgagtggattgctgagccccttagtgtccatctagggggtggtgctggcttccgcagacagctcaccctgctaggagttctcaaaggagacatccatcagagagctgcatccgctgtgaaggaatctcctacttgccacagtgatgtgatttcaggcagaataacccctcacatgtatgttcaaatatctttgaatcatttctcttttaaaccagtgtctgtccctgtgttgtggtttacaaagcaagcatgggtgttttttcatgggaaagtgggatacagtaaagggtctcaattggttgaaagtaaaaccagtataattcttccaggtccgtgacgagaagttattaccgaggcgcggccggggctctcctcgtctatgatatcaccaggtaatgccagctccccctggtgaaggagggtgctcagtgccctgcagcccaaaggctggtcttggcgaggtgccctccgtgcagtgtgtgctttgtgtgtccagggacggtggtgtggctggcatccaggaagccccttagcccttccatctggggtctcagaggtctttgaacgagcccctaccactgctttcccctgcagagaaatgtgtttgtaaggttttaggtggataaagcaatccatgctattacattacatttcttgacatgatgcttggacactttccttaaggttcacaaagctttatgtatggaaagttattagaagtgagttgagagagggtgaggacacagactctgggctgagattgctgggttcaaatcccagttgcagtcactagctgattgaccctctcaggccaggtgcttcagctgcctgggccttagtttccttgtctgtaagatggagatagtaataatcacatgatcctcaggaggttattgggaggtttaaattagttaatgtgaagcagttagtagctgtttgtgacatatggcaatttaactgaaataaaaaattctgttcctcgattgcactggccacatttcaggtcctcagtagctacatgtggctggtgactaccatatcaggacagattatagaacattcctatccatgaggaaatcacattcagcagtgctgatctcagtagcactgtcttagaaatgtgtcatctaaatggcatcatctgggggccctttctgggtaggaacctgtccagtgagaggatgtcactcagcagccgcttccctcttccaatctgtgtcccgggagccaggcgttctgagaggaggaaggcagtttctggcccagcccttcctgcacttgcccaggcagtgaaaggctcagcctgctaaagtgtgaagtcatcaatcaggctagcaaagtgccatgagaagaactcaatccttagacacatgagggccaaaaatagtaagtctgagagttggtcctggagtcagacagagctggtcaagtcctgactttgccactggctgctgtatgacctagggcaacgtaattaatctctctgggccttggatttctcagagaaaaggggaataatggcagtctgtgtcatggaatctttataaagaatcaatgtgataaagtcctgtaaaacaaagtgctggcacattgcaaggattcattaagtggcagcaattagctatgaaatcttgcctaccagagtctagtgccttgcgcatgctaagagctcaatagatatttgtcaattgaatgaaggaacatctctttccttttgccccatgactgggcaaacgaaaaataacaaaatatctcacttgctgtctcattttaccagaaacaaaatggaacaaactgtgggtatggtatatacttggtgcattcacgttgtctgagttatcttaaaggtgttggtgccattaccctgaaatgttgaaaagcggtatgagtagtgagaatgactggaaagagttgctagttttataaaatacatgtattattttcacaatcttatattacgcagccgagaaacctacaatgcgcttactaattggttaacagatgcccgaatgctagcgagccagaacattgtgatcatcctttgtggaaacaagaaggacctggatgcagatcgtgaagttaccttcttagaagcctccagatttgctcaagaaaatggcaagtgaccttttacttcttactatttttcaaatcgcatatttgaggataatagcatttctttgaatttaaaacatatattggaatttcaagattaaactagatttaggaaatgtggaatttccaattgtttttttctataaattagacctattaagcatatttttagtatattgcattctgcctgcagaagttactataatgataaaagcaaatgtagtaacattatgtaatgacttttcagtctagggtctttgaatattagagatcttgggctaaagtgaaattaataatatttaaagactctaaccaaatgatgtcattattttttaatgtattttgaaggaaatttggtgaaatattaacccaaatagaaagggaagcggaagaagaaatacttggctttttggcttcattttaagtcatttggttatagacaactttgaaacttttttgaatttccatatagaatacatgaaaatgccacataaaattaatggttgcttaattaatggataagagaatgattttttaaaacttcagacattttaaataactttaatttttagaaccaaaaactagaatcctaatatcaatatttggactctaagattccaaattatattgtaacttgactagtttcttgctaagaaaataaacatgagagaaatccatatgccatcatgacagtttttaaaaagctgtttagaaatcagaagtttagaatgttaacaaagatgaaaaggaatttagatgtcatctaaactcatttttacaagtgaggatacaagaggctagagaggccatggtttgctgagagagcaagcagaacaggcctttctgctgagatgaacagccactctggtgggtagaaagagtattaattcctatactgtctcttcatgggctgtatgacagattgcaatatagtcccctaaaaagtgtaaacacttgtaggtcatatttgtggtgacactcagattgtttgaagaaggacattgcaactttccctgaaatcaatggcagggccattttggcaagccagctcctttctgatgggctgtcatttggctggggaagcctggttgcttgctcagccccttcaccaggttaagtgctagcacaagatagcagttacttttcagaaaaggctaaaattcttttaacatttaaaaaacacataatgacatatattgattttatatttacagaaatatatggttttaggtcataaattatatttcgtctgcttttctaagagaatgctacacaggcttttgtaagtgaaaattatgatcatcttctaaacatgactttattttgtttgatgtccattttagagctgatgtttttggaaacaagtgcgctcacaggggagaatgtagaagaggcttttgtacagtgtgcaagaaaaatacttaacaaaatcgaatcaggtaaaagcctttccattaagcaacttttcttctgcatattttacactgtagctcagtagatcaccttttaattaatagtttcagggtgatttagtaaagaatgttctctctctacctgccaacctaaaatcatcacatatgggttcaaaggtcctgttcttatcaggatgaaagccccatccttatcaggatggtttccatggtgatgaaagtggatgggcacaccagctcagctgtggaaaggtagtcaaggtttcagggagtgtttgcatttagaaccatagtctttctttggtccttcactaaacggaggaagaataggcctttgtccactctgtcaacagcacgctaattctgttgggccagtggtcatgtgtaagggagttataggtacatggtatagtgttgattgttgcagatcgggcatcatggaactatggagtccagagtaattttatttctgaagcttactgagcatgcctcaattataaaatgcctcatttttgtatttgcttattaaaataatttaaaataatcctaatgtaggcagctgacgaaatactgtgtagttgtcatttactaaagtaactatatatgggcatcaccttttaattgattcattcaaacatctgagtgcctatttgtcagatgctgggatacaaaaatgaataaatcacaccccttgccccccaagaaactgtctttcatgggagacagtcagaggataattataatatcacaaggctgatgtagtagctgagagatgcacaggctcagggtaacgtgaagaaggggacctgccccagccagaggatagaggaggtgtcagggagggctttcaggggaggtcttagatgagctcagtctttcagaatataaggaagagtgagccagcaaagggagtgaggaagagggaatagcaggagaaaaggttgaagaaaggcaggagccagccagtcctcatcaaggatctagaactttatcttgtagattaccaattgtcaaccctggatgagcactagagacactgagatgcattaaaagttctaatcccaggctctgcctctggagacgctgaactaattgggctgaagtatggtcgaggcaccagtgtttttaaatgtttactcatgctgttctaatgttcatccaagattgagaaccactgctgtaggtggtgggttgtcagcaggtgggtgatgtgattgggttgtgacttgagataagtcatgtatgtaggaggttatgttgaaaacaaactgaagggaggacaggcctggaggccaggataccaattataaggcatttttgagtaatcctagtaagagatgactgattaatgctttaacaaggatatggaagcagagatggagagagagatggatctaagatatatttaggcagtagcatcttatgactcatatgcccaatagtgggacaggacaactgactcttaggtgggacaaggtgaggaggaagggccagcaggggaggaggaaccaaggatgactcgcagctgtcacactggtgtctctagacagagatggggtggagccagaggagaagcagggaatgtgagggagtaaagatggctctgttgcaaatgtgcggcctttgcggtaacgctgagacatgaacatggagttatctagtaagcttggggaagagttcctggctggcagtataagtttgggaaccatcaatatataggaacagctaaaactgtggaagcaatgtgatcgtccggagaacagtgtttaaggagagcagtgatcaacagaaccctggagttggaggatgagcagaggaagaggaatctacaaaaaagatgaaaaaggaaatggtcggaaatgtgtgaagaaaatcaagggaatgtgggtgtcacttaagccctaattataagcaaatcaaaggagtgttcattatgtaatgtaatagtaacagagggaagcctcataagctaagactgagctgaaaaacacacattgggatggggaatagaaagtcagtgatcattttgatcaagaacaatttcagcagaattatgaaggtagaagatggctggccgtccgttaggaagaagtaggaggtgagcaagcagagtgtccactcctctcctgaggaagcacaggctggcactgtagggtgcaaagggttaatttaaagctggggttgtgggtgatgggagaaattccagcatgtttaaatgctgagggggaaggagagaagaatgggcaaggagagggcagggaagaaggagggtgctaggtgaagtaggagggaggagagtcgggcccaggtagaagggctgggtttcaacagaagtggacatgtcatctttttgtatttttttttatcagaaagaaaaaaaaattactaagcttggtacaaaaaccaagacactgttacataaatccttacagttggcttactgttgagtattattaagctcagcatgaggttgtatttacatgaccttgctattttaatattgtatccctgaatgcatcagatagaacaactcatatgcagtcttccaagatgtgtttttttctgagatcatcaaaatcataagtacctctaggtgaaaaaaatataagagtataaattaggattcttcagcagtactttttatttttttaatgggtaatacattcagaaaccattgttttcttccctttttttatataaaatgtatcatatgatagactaccacgccttgcttttttacttactattgtataacctacaaatcattacaaatcagcttatagtttccgtatatacatataatacataaggtacatatatataacataatgtcatacataatgtgtgtgtgtaatgtgtaatatgggttgagtatccctaatccaaaatgttccaaaatctgaaactttttaattgccaacattgccactgaaaggaaatgctcattggagcacttcaaatttcagattttcagattagggatgctgaactggtaagtataatggaaatatttcaaaatctgaaaaaatccaaaatacttctggtttcaagtattttggataaggactgctcaacctatatttggataaggaccgctcaacctatgtgttaccataattcatgagccagtctactttggacatttgggttgttgccagtattttgctattataagtaatgttacagtaaataattatatatatatatatatatatatatatatatatatatatatatatatatatattttttttttttttttacatgtgcatgagtctgtgtgtcagacaaatgcccagaagtggaattgctgggtcagagaacataagcatttgggatcttggtgtagaggctgtcacattttctcctagtgatgggcttatttcactaaagccatgtccacagcatgtagtatcatcatacttggacttttggcccatctaataagtgaaaaattatatctttgtaatttaattttaaattattttatataaataatgtattcacataatttgaaattcaagaagtataaaagagtatgcaatgaaaagtccccctgttaccaccccctcctgtcctcagccatctagaactcctccgaatcagccgttccttatgtatcctgctagagatgttttgtgccggtgcaagcaaacatatatatagttttttccctttattcagaatggtgggatatatacacagtgttctgtactttgctttttttttttttaatctatttttggaatcaaagaaacataaaagccttttttaaaagaagacttgcttggtccttaggtgagctggacccagaaagaatgggctcaggtattcagtacggagatgctgccttgagacagctgaggtcaccgcggcgcgcacaggccccgaacgctcaggagtgtggttgttaggagagcacacaggtgggtttggacacctccctgccctgagttcctggcaagctcaagtgcagaggcctgttaaagctttgggaagctgcagtatgaaaaagaggggatcccagccgggtgcagtggctctaattccagcactttgggaggctgaggtgggccagttgctttagttcaggagttcgagaccagcctaggcatcatggtgaaacatcatctctacaaaatacaaaaaattagccaggcgtggtggcgtgcacctgtagtcccagctactcatgaaacttaggagaattgcttgagcctgggaggcggaggttgcagtaagccaagatcataccactgcactccagcctgggcgataaagtgagaactgtctcagaaaaaaaaaaaagagaaggagaagaacccataagttaaagttggatgttctaactgaaagaatttatactctataggaaattcttatgctcttgttcagaaagaaaggaagggcaggtggtggttgatgggaagggtgagatatcctgattccttatgtcagtgaggagcccttcctggattgattgaggtctaaatgaatgtgccttttgctaaaacaggaggcctatttataaaattgacaaatgtctccctttaactttttaaagcttcttcttttttcccatttaccacagtggacgttttatttatagtcgacatcatgtagtaggcacaggcaagtgttaaaagacaagatattcacgaattctcttttaggctttaagctgtatttacttttgcatttatagttatgcagattttgaaattgttcttaatatttttta

SEQ ID NO: 709 - DNA, 32742 bp, Homo sapiens
  source 1..32742: mol_type = other DNA
agaagaattgacttccttctctgcagagccggctctggtctcttctcttgaagcagatgcgaaggtaggatgagaaggcatggctggccgttgcagcaggtcgttttaggagtgggggagtggggtgggtagagattatagttattgtaacttttcttaaatttatgacattgaaaaggtaggaaacaaaacataataaattagataaaagatatcttgtaattttattgaataacatacatttaacatttgagataataatgatttaagtgatatggtggaagtgacttcagagttaattaaaaaccaaaacaaaacagaaaaacactatccaaaagctatatggtgtgatttttttttttaaagggtagagtgtcatttgctttcttctttggtttgcaaattcttatacttacagtttattactattttgctctctctgaatcgactttattgttttgatcatccgtaatttctcgtttggaggtggaacataaatatcattttggaattataaaaaagttagctagggtctaatttaaatttcttttaattaagcttccttaatctctaaattgcttggtaagaaagagactatgagaggaaagtgcacattagatattaaagatttattaaattagaattgggctgggtgcggtggctcacgcctgtaatcccagtactttgggaggccaaggtgggtagatcccttgagatcaggaatttgagaccagcctggccaacatgatgaaaccccatctctaaaaaaaaaaaaaaaatacaaaaattagctgggtgtggtggcaggcacctgtaatcccagctgcccaggaggctgaggcacgagaatcacttgaacctgggaggcggaggtggcagtgagccaagatcctgccactgcaatccagcctgggcaacagagtaagactccgtctcaaaaaaagaaaaaaagaaattagaattggtgtagaaaagattatttagccaagatagttggagattctaacttagctgctttgcctaaatgaagcataaggttttggagttaaacagacccagtttagagtgtgagtttaggtaagttacttaatcactccaagactcactctcctcatctgtagaatgggtacatttacttcataatgtggcaataaggattagtagagataatgtatgcaaagtacttaaactatctggttcagagtaagagctaaataaatagtagctgttggcacaacagaaagcataacaacaattgtgagtagtacctagaaggatataataatattaattctcggccgggtgtgatggctcacgcctgtcatctcagcactttgggaggcctaggcggatggatcatgaggtcaagagatcgagatcatcctggccaacatggtgaaactctactaaaaaatacaaaaaaattagctgggtgtggtggcgggcgcctgtagtcccagctactcaggaggctgaggcaggggaattgcttgaacccgggaggtggaggttgcagtgagctgagatcgcgccactgcactccagcctggtgacagagcgagactccatctcaaataaataaataaataaataaataataatattaattctcatttctttgctcttccatacaaagaggtcaagtttaaagtatgaatgccatggcttcctatttcagtcatgaattcctatttctgattctaaagtaatattttttgttgtttttgggtggtaaaaggctccccgaatgagaaagaatactcggaatcagcggtgaattgcagtgatctttcagagaaagcgcctgttcaactttgtcctctctcaggtaggcttcaagttttatagattcaagcccacgtgtgagtcttctaatgttttatttatttatttatttatttttatgtatttttatttttttttatttatttgagatggagtctcactctgttgcccaggctggagtgcaatggcacgatctcggttcactgcaacccctgcctcccaggttcaagtgattctcctgcctcagcctccccggtagctaggattacaggtgcctgccaccatgcccagataatttttgtatttttagtatagatgaggtttcaccaggttggctaggctggtctcaaactcctgacctcaggtgatccacccacctcggcctcccaaagtgttgggattacaggtgtgagccaccgagcccagcctgtttatttatttacttattttattattattattttttgagacagagtctcactctgttgcccaggctagagtgcagtggctgcaatttcagctcactgcaagctctgcctcccgggttaacaccattctcctgcctcagcctccgaagtagctgggactataggcacctgccgccacacctggctaatttttttgtatttttagtggagacagggttttaacatgttggccaggatggtctccatctcctgacttcatgatccacctgcctcgtcctcccaaagtgctgggattacaagcgtgagccaccacgcccggccttatttatttttttgagacagagtctcgctctgtcacccaggctggagtgcaatggcgcgatctcagctcactgcaacctccacctcccaggttcaaacaattctgtctcagcttcccgagtagctgggattacaggtgcccaccaccatgcccggctaatttttgtatttttagtaaagacagggtttcaccatgttggccaggctggtctcaaaactcctgacctcgtgatccacccacctcagcttcccaaagtgctgggattacaggcgtgagccaccgcacccagccgagtcttctaatgtgaagtagagatatctgagggacctgaaacttgtacaacttgtggagactttgggaaaacaaagagggaaccaggtacagggcatctagggccttggacagggccgtgcaaataaaggattctgaagttgaggtgtcattcgcttcccagaaaacccacctctgaatgagtaacaagatagacagaaaatgtataaacgcacatcttcatttctgtgtcagactttctgatggatatgcatgcgtgctgtctcattgttgcaaaaatgagtcttttaagcctatgaatagggaactgagctgagagctgttctttattcatcaccttcctttgtggctgtaatcagcttccgtaaagaatctatgcaagcaggccggtcgcagtggctcacacctgtaatcccagcactttgggaggccacggtgggcagatcacctgaggttgggagtttgagaccagcctgaccaacatgaagaaaccctgtctctactaaaaatacaaaattagcggaggatggtggtgcatgcctgtaatgtcagctactcgggaggttgaggcaggagaatttcatgaacctgggaggcggaggttgtggtgagccaagatcgcgccattgcattcccgcctgggcaacaagagcgaactccgtctcagagaaaaaaaaaaagaatctatgcaagcaaaaaagtcatgaggttttcaggtaaaatttcaaggacaatgcagtcactcaacttttcccctgtgtacgaggcagaaagcatggtggctgcacgctgaagctgtgaaacttctcaaggaaatagctgtggtaaacaatacaggagcgagctgccgcccgcttgaaatgacctgcagggctgtggcttgtgggctttgagaacgttctgtagtcttcccttgaaagcgtgtgtggtgatgacagtcacattcacacgcactcatgctaccgcagatctctgcatttccactctggtgacgtttcccccgtaccagggagggctgaacatttatttcctttgatctgatgactgactgctcagagacaatagatgattggatgaaagaaataggggcccctaagaataaacaatgtgtccctttcccatcctcctcatctcttttcttcattggttttacttttcttgtacttttcccctttcaccagatttagaagccaaagtcaagatttgctgttaggctgaggaaagcaagcaggcattgtttcaaactcctagtgcatggctgactatttcagtcccctggcggagctgtcccacacgtctctccctgggaagccctccctggtcccaccagccctctctgctcctgtgtggagtgactcttgccttctgatccttgggttttgtactcatcccaccatgttatgagttatttgtctgtgtgtccatgttctggctgggatgggtccttcttaaatgcagagattgagtctcacttctttttagatcctcgatatctggcacgtgcttgatacatagaggccaataaaatcagtgttgaactgacacactcaatgccgtaaccaaactgtgtttgtctggatgccgaagttccactgggatacagcatgaccagataaagaccaatggaaacacctagattgaagttttccccatggctgcccgcgtccctcccaatcccagaacagtggcttaacttcctactcttgggccttcctgaaggggagatggaagggtagaagaaacccttttgagtcgggcttgctttgttctggctgttgctctagggctgtgcctggatgactcagtgagttccccaaacagccctgtgaagcagggatggctccatgtcacggaggaggaaggccagtctcccagagatgaagcagctggcctgagagcacgtggctgagtcctggctgggtatgagcccagactgtctggctccaaaagtgacacagagacaggatggctgagtgtcgggggggcttctccacatggctgtaggagaatgtttccttccaggtggtgctgtggtgtgggatttattcatttttaattgccagataaaatcaggctgatcgatggagtgctgtaaaacaaagacaggcaccattacaaaaatgtagcaggggagttaggagactggatctaagctccgagcaggtgaggacggtgcctgactcagtgcttgggacatcatagagcatttaagatcttgttgagcaaatgatggagtgaccgaataaatgtcatcctgggaaaatggacctaggagatttccgtattcaagctatgagattgtgaattcctgcgtgagatgattaacatacaatttcaaagattcctgttaaattccaaaatgactcagatttttctatgctttttggatttctgaagactgaggttttctgcagtgaggactcacttgccccctgcccgtccttacttcctgctgtacttgaatatgggcttcctgccctaggaaggaagtttgacatcggagtaaatctccgtgtcgcaatattcttcaggtttctcaattcaagccaaacatcaagtgcctcctggctgggtgatgggggaatcgctgaaatctgatattgtccctagaaggcaaacactcaagacagaatgaaatcagggtcaccatcgaaatatacaaattagaaagcagttaaatttgaaggagcaatggatctttattgtaaatgaggagaaagtttctgaactgggtagccttgatctggcccttgaagggctaatagtaagagtgaggctgctcttactgttagtaccacgactgtcagccggcattagctgagtgtacttatgagctgagcactgtgctctagaggtctccacatgcatcagcacgtttcgtcatcatagcaccgccgtgaagtgggtgctgcacctgtctacttcgtagatgaggacatgaagccccagagggcttaagtaacttgcccatcatcagctcaacagcaagtcggtggcagaggcagctactcacccacacagccagcccccagccctggtctcatgactgtccccatctcttgcctcattgggcagaaggaagagtggggccgatgcgtggaaatgcagagcgcatgtggtcagggaatggtcttgaatgaggtcagtatgggagtggcgagcattctgtgggaactgaggatggaggagtcaggagaactggatcgggaggtcacgactgggatgcctgtgctttagaatgtgtttacgggaagggaaaaccagcgtgacttcactggagagtggaagagtgacacattcccacctcagtattgtcacatctgccgtctctcaccctagagatgccttctcctcctttccaatcctcacacaactcccctcttctcccaggcctggcggtggcgtctcagccaggcaggtgtcctgtcctttcctgtcacctgtcagtcttcctcttcctcgtggtccattcagcaacatcactgctgctctgggtggttgcatgtggtcgtttgcctgcaagcaggtgggtgcagccagttcaggacccctgtgacaactattcctgttacctgctttgtgagtgttaaaaatgtcatccttggccgggtgcgatggctcacgcctgtaatcccagcactttgggaggctgaggcgggcagatcacgaggtcaggagatcgagaccatcctggctgacacggtgaaaccccatctctactaaaagtacaaaaaattagccgggcatggtggcaggcgcctgtagtcccagctactcaggaggctgaggcaggagaatggcgtaaacccgggaggtggagcttgcagtgagtggagattgtgccactgcactccagcctgggcgacagagcgagactctgtctcaaaaaaaaaaaaatcatccaccttactcccttactctattgttgtagaagggcctgaagcacaaacctggtgttgtgtggtgatggcgggacagtgtggagaaatatgcagcgaattttaatagatttcacagaattccttgactacctcatgttctacttcaaaatggcacaaaaccaaaagcattcaagagagaattacatttgttttatccatttttaagactatgtaaagtaactccatgtggtttttcatatcttgctagtgtaagtgaccagaatttaaatctgtaaaggttcactttttcttgctaatgctgtgaggtgtttggaagttatctctgatcttcctggtacttactataggctcattcagtttactaattaactccatctgccaccttaaaaacccttagtagtggccgggcacggtgactcatgcctgtaatcccagtactttgggaggccgaggcggacagatcaactgaggtcaggagttcaagaccagtctggccaacatggtgaaaccctttctctactaaaaatacaaaaattagccgtgtgtgatggcgcgtgcctgtaatcccagctactcaggaggctgagtcaagagaatcgctggaacctgggaggtagaggttgtagtgaggcgagattgcaccattgcactccagcctgggtggcagagcgagactctggctcaaaaaaaaaaaaaaaaaaaaagagagaaaaagaaaaaagaaaaaaagagaaactgttaatggctaggaaaaactttatgaaaaaacaaaacaaaaaacctgaaagataattttaaaatgagtaaattgtcacctaggcatactttgtcttggaaaaatagactatgactctgtctcaaaagaaaagaagtaaagggatagtgaatgataatatgtacttgtatatgtaaactgcatgagaagacaaggtgaaatagtcagatgtttgcatacatcaaatcatattaaggacattgtctgcagacgcgggccatcaatacatggcatagtgattccagtaccataagcaatgttgccctccatgatgtctttctgaaacaataaaaaattcttgttaaagtttgaaatgaaacaaaatagtcttccttccatttacacactagttgcatttctttttttttttttaacttattactattattttttgagacggagtcttgctctgtcgcccaggctggagtgcagtggcactatctcagctcactgcaagctctgcctcccaggttcatgccattctcctgccccagcctcccaagtaggtgggactacaggcgcctgccacaacacccggctaattttttgtatttttagtagagacggggtttcactgtgttagccaggatggtctcaatctcctgacctcgtgatccgcctgcctcagcctcccaaagttctgggattacaggcgtgagccaccacgcccggcccactagttgcatttctagaacatttggagtgtacaaaaccctgcaaaatatacttttaaatatgagttaaattctgttgttaattaaaatttttttttgcctaaatgacttgtatgatttatatgaaaatgcaagacagttatttgtcgctgtgacaatcatatatactccacacattcctaaagatgggggtatggtactgcactcattgaaaagctggagcgagtcccgctgaaatgaagcaactgtggttcaatcgaatgcccaacgccatcaagccagtggggacaccagtggaacactggaaaccaaagagaaatgaccttcatagctttctggtcaatcttgatgctaccataggatgatgctctatgctatacctcttggatcgttgcaaaaagttaccccttctttggagtggaccttccaaagttaaacagaagagtacgtcggccaggcgcggtagctcacgcctataatcccagcactttgggaggtcgaggtgggaggatcacctgaagtcaggagtttgagaccagcctggccaacatggtgaaaccctgtctgtactaaaaatacaaaaaaaaattagccaggcatggaggcacacgcctgtagtcgctactactcgggaggctgaggcaggagaatcacttgaacctgggaggcggacgttgcagtgagcagagatcatgccattgcactccagcttgggtgacaagagcgaaactccatctcaaaaaaagagggtatgtctcaatcttatcaatagaaggctttactcatagtagttgctaaaccatagggttggttgattgttgttctaagtgctaaccaagtgcttgagtgacatggtttatagaagctagaatcaaggtttagagaaactaggatcaaagtctctaaaagtgaagagtaacaatgatgggatgaatgcggaatacacatacctcgagttctctaagctcagtcccaggcaactgggaacaccagaaggtttcctgctttggtctgtatttgaaatacttccagtgaattacaatgtagtgttatatccttggctttaatttgaggtcaatatagtgatacagaaagtacagttttgcacatcttctgccaagccagaaggagctgtctgtctagggagttgatcgtcttagtcttttcttttttttcttcttgagacggagtttcactcttgttgcccaggctggagtgcgatggtgcgatcttggctcactgcaacctctgcctcccgggttcaagtgattcccctgcctcagcctcccgagtagctgagattacaggcatgtcccaccaatcctggctaattttgtatttttagtagagacagggtttcaccatgttggtcaggctggtctccaactcctgacctcagttgatccgcccgcctcggcctcccagagtgctgggattacaagcgtgagccactgcacctgggcaattgtcttagtcgtttgcattttgaggatgtctttctgtatttctttcagtgtattaaagctatagacagcatcttgacttttcatttcgttttgttttgctttgccttggctaccaggaaggtcagaaatacatttaaggttgaagtggtcactgttttacttcctgttcttagtagaattatcagtcctttttcactggctgctgatgtctctctgactttattttagctgtcttctataagcttttattgtaagctgcatcatatttttgttagatgtagaatagggtataaatgaccagtcagtcaagtcatgaaccttaagaaccttgaacaggccgggcgtggtggtccatgcctataatcccaacactttgggacgccgagggcctgaggtcaggagttcgagaccagcctgaccaacatggtgaaaccccgtctctactaaaaatacaaaaattagccgggcgtggtggcgggcacctgtaatcccagctactcggaaggctgaagcaggagaattgcttgaacccaggaggcggaggttgcagtgagccgagatcgcaccactgcactccagcctggacaacagagcaatactccgtctcaaaaacaacaacaacaacaaaaaacaaaaaacaaaaaaacccggaacagcgcctggggtgttcaataaatatttactgaatgactggatgaatggatccaggaaatgaactgaatttcatttttctgtaacgcggagtgaatgggcactagggggagcgtgagctccctcttagccttcgaaagggcgtttcccacacttgcacctggggcccacaggcgggggtttgggaaagtaagtgtagtgctttgtaatgatcattgaaccctgtatttctgaagtgcgttaagacctaatagccacctgtatgagcgagcggttgagtatttcagattcccccaccagattcactgagtggtgtcattaccagccaatactgcagctatgtggtcctgcttacctggagtactggagaccagagccagagaacggagcacaaacagccacatgaaaagaaagcacagtgcacagagcaagtgtttgcagccaggtgcaaaaactcttcactaaaaacactcgagagccaggtgcagtggcttacacctgtaaacctagcactttgggaggctgagacaggaggactgcttgagcccagaccagcctgcgcaacatggtgaaacccatctctacaaaattaaaacattagctaggcatggtagcccgcacctgtagtcccagctactcgggaggcggaggctaaaggattgcttgagcctgggaggccaaggctgcagtgagccatgatggtgccactgcactccagcctgggtgacagaatgaggtcctgtctcaaaataaataaatgaaaactcaagaattagacaaaccagatggctctggacccagtagtacgattagtagagtggaaataagaagacagcatgaagaactgaggggcaagttgagaagaatgggctcgtgcagttggtgacttgatggctaatttgcaccttgccacttggcacttggtcacacacagttttctattactttcctcttttccagagactcagagccttggggcactgagggatgccagttctgcctgttcatctggaacctggatctaaggagggaagaggcgttgcccctgctggcatagtcaggtaccagcccagccaggtaagaacctaaagtccttgttgctttgtgattttcccttcatctagagaggaggcctttggagaacaggtcttgtgggtgctttgtcagagactagaagccgagaacatcccttttcagagctctgggttttctgttcctcatgcaacctctgcagttgggatgaataatatattttaattttattttacaatagggaaactgacaaatattgaattcctgaactgagcaatcttggcctgtaggcccatgaacttggagaaaaaattaaatctttatttttattaacctttaactcaaatttagcattttcttaaaatatggatataggcaagaaaccacagtagaatcagcagaacttgtgactttgtcaccaacagaaatcacagatattttcataccacatgatatgttgtagctatctcaagacattgtttctattcatcactactttgaaattctgggagtccttagatcactgctagatcttaatatttcatgcatcaaggaacacatatattactatattacaatttttaaatatttcagtataatcaatttcttcctatgtaacacagcataccttattttatgcgtttaaatacgtaggcttcaccagactaccaaagattaagaaaaaggttaagaacctttgcttaaaggaaatgctaccttagagctctgttagcctctcattcactaatttgccatggatcataaattaatataatgcagattttttttgaagcctagcaaaggaagtttagcttttaaagcattgaaaggacgtcttatcactaagggattcccatagatttaataacaaaaatggtactataggaagtatattgatttgatcttctgcattttctggataaaaggatgtatgcagaacctttcagctgtcattaaacaaaaacaagagctaatgcataaggcagctcatgaaacttattcaagactgtaaataattgataggctgagcttgtggtggtgctgcttcatacatccttaattgattaaacattttttgagtgttgaagttaatggtaaaaataatagccaacagttgggaatgtcatttttccagtatttcttcaattagggtaatgtacattaaacacagacttttacgtcctctgaccactaaagttatggaatccatattaggaaaattcaagtttggaagtttgaggcttttagaaatatgagaagtgttatttaagcaaatttaaaattttacattatcaccgcgagcagaaaatgcaagggtttgtgtagaatattttgtctttttggaagtaatgctgcagagatacttaagccaagaaaaatgttgccattttttgttttcttttctgcaggtattgaacgggctgagcttttcatgatggttcctgctgacctggaaacatcttaaatggaaggttagcttctatgagtcactgatactctttttattgctatttctaaatttccttggcttgaaaattacttctgctttgcagaaattatctgcttgcagctgtggataatttataacaatctctggtgaaacctcagaaaagagatatgcttttgtcttagatggatgtcagcagctgctgcagaacccggtgaaaacaccccccgggtagcacgaggctctgcgagccgtaactccgacaaacgcagaacttcttgaggctttcttcttctaaggagtatgacacagttaaaaaggaaaaaagaaccacaagcaaaacagttgccagtgaaataggagagggagctctttaaacaaggctggctgcagctggcctccgccgctcatctgcagggcgtgagcgcttggtccatgcagtgaagctcttccaacctgggtcaacgaaaacggagaagaaatggcccaagaaatagatctgagtgctctcaaggagttagaacgcgaggccattctccaggtcctgtaccgagaccaggcggttcaaaacacagaggaggagaggacacggtaggctgcccttcccggggggtcactttgggtgtttagctttctctgcttggggcctgccactccgtcgccaatgctgtttgcttacaaatcactacccacctgctgctgggcttcgtgcctgagaagggtcctaacgaaggtctgttggtggagatgatcctccttatgtaactaaacgtagaggacgctcaggaggaggagggaggccgctcttgttattcatttaaaacggtgcctttgggcggtaagtttgctgtctgccatctgcttgtctgtttgccgacttcgtgggaatcattcaagggacattttcaggcttccagtttaccccttctttaaggaaagacctccagttaagggttttcctacctcatttttgacggtgccgggaggtgtaaagaaaagcaaagaaagaggctcacaagcagcaactctgatggaatccagccctgtctttttttctttgctcgcttttgcttcccagctggctttgaggaagggggagcataaaatatgaacctgcttagcctgtttcctgaccgctttgccaacagggaactcttccctgtctgtctctaagctgcacgggccgtttgatatgggtcagcatttagaaaagcgtgctgaactctagcagagcagtgttccgccttagctgtcaagatccatctttaaacaggttggcgcttgtttatcaatgtctatggaggaagtgagggtttggtttctaatggcagaacacattagaaaacaaaactttggacaaccaaatgcttgaggagtgaggagaattttctggtatagtattcttcatcctccctgttatttcaaagctttctaagtgcacttgtaaactttcttccattaaaaactataatacagtctgggcgtggtggctcacgcctgtcatcccagcactttgggaggttgaggcgggcggatcacctgaggtcaggagtttgagaccagcctggccaacatagtgaaaccctgtctctactaaaaatacaaaaattagccgggcggtggcaggtgcctgtaatcccagctactcaggaggttgagacaggagaatcccttgaacctgggaggtggagtttgcagtgagctgagatcgcgccactgcactccagcctgggcaatagagcaagcctctgtctcaaaccaacaacaaaaaaacgaaaacaaaaactataatacagtgagaaaagtgaaattttatttgatgatgaaagatctttcagtgatttgagacatccttttgaatattaacaaagtgacatagacatagtgataacaaagttgtatttcaaagggtactaattctagggtagatcctgaaagttgaattttaaagtgcatttctgatgtcatcttgtttcttgggattggctcatcttttctacaagtaggtatcacagacattcataaaagagcgtgctagtaaatgacacctttttggtccaatacagtatctctttgcactatggctatttgtctaggggagtgggctgaccacttattaaaaaaaaaatgtagcaaaagcatagcatcagttgattttattgggcaacttatacccatagcaggatgtatgctgtgtgtttctagattattccatgccttgcagattagaatggatgctcctttcagtgtcttttcctctcctttcactattcttgcttactatcataacagcctttgggcaggaagggatggacctagcagggagcttctctgccccaggcatgttatttatactttgccatttagtcctcacagcaaccctgggaggtaaggtcatatcacctgtttcacggttgaaaaaacccttgagactcgactctgagatgttgagtgagagcccagttcacacagccatgttggagtccagggatgtcgaatgccaaagccccttcccttgccatgggggttactgcctgggctcttgccctatagcctggggtcaggtgttccatctaatactatcttctttaactctgagggctgcaggaaactgaaaacacacctgcagcatctccggtggaaaggagcgaagaacacggactgggagcacaaagagaagtgctgtgcgcgctgccagcaggtgctggggttcctgctgcaccggggcgccgtgtgccggggctgcagccaccgcgtgtgtgcccagtgccgagtgttcctgagggggacccatgcctggaagtgcacggtgtgcttcgaggacaggtaagcatggccggtggttggatccctcccactgattcaggtctcggaggaggcctctttacaaaccgctcataaagagagcactcactcctcaccttcagccagtaaatgtgtaccgagtgcctgatagggagctacctttctagccttggaagttatcttcatccaaaaataaattttatgtagcaacatttttttcatttacagaagtttgggccaagtgtggtggctcatgaccgtaatcctagcattttgggaggccaaggtgggtggattgctggagcccaggagtttgagtccagcctgggcaacgtagtgagaccccatctctacaaaaaaatacaaaaattagccaagtgtggtggtgcatgcctgtagtcccagctactcaggaggctgagatgagaggatcatttgaacctgggagctgtgattgtaccactgcactccagcctgggcaacagagtgagaacctgtttaaacaacaaaagtttgttaagtcgaaggatgggctaacccaggagttcagattcatttgggtctcttaactaagtgctgtcattttcttagcacttaatttatctccttcagtaccagtggagtaaattataatctagggaatattggagtaatcatctgaggctttaaatactgcgtttttgaagctgacctgtctttaatactcagctaaagaaatggacatgcttccctttagtgacagactgaatctacgtttatagttatcaattggtgtttagggggttttaataccagttttaacatggaattggtgtttttgcgttccccattctgaaaacgataaagagccaacttggcttagactcctgctgttcaaagcaagaatgaactggccatgagctccgtgaaaacactagaggggtgactccgtctgctgggggagacggtgcacaaggacatcacagaacttcggagaagggaaggaatactaggctggtgtgaatgggagtcatcagagaccctgagatttgaaaacaacttctaaatattgccacagatgtgtgagtgccccagggacaaagactgtgggaggcacttacacagtgtgggcattgtggctggggtttcttccccctaaatccggagggctgtgtttaacgcacgccctggcattcatttacttaagtgtcctgtccctttgcaaggcttactgtatttcagtcatctagccagagaggtgaagtggttcaacctgatttctttgctcttgaactgcattccgtccatttcgctcacagcgtgccaagtcgcacggacggtggccgaattcgccttctcatctcatgtttctttggtttgctgaagccattgtccttcaggcttttccttgcttgagagcaaaaaataattactgtgagctgccctggcggcatagagagcaattccaaatcatctctagaaaggtctcagtatcttcttccccatttcaaccaaccatatatatttgaagtctaataataaacattgctgggcagggtgttacatttctcagcattttttcttcttctaccaatgaactgtaaacgaaaaatcaaaacaagaggacaaggtctgaggcaatctcccaggaagctgacagtgttgaaatctctgccctagtgagtcttgtgtcccaggcactgtaactttaccctctaagtacatgaaatacgacttctaaaaccccagcttccttattttgaaatgaggttggttttcaaaatacttaaggtcattgcattactatgagtgcattaacaggagaagtcgggaggggagagagccaagtagtttgtggtgatgtgcattttctttcccctcgccttgctccctgtccccgcagccctctgtcctctctccagctttatccagtctgggctgtcctcctcctctttaggaccaaaagaaagatgagactttgtaaaactttagaatctttgacattcataactgtcgcacatctggggacctagaaaaggtttttgaccccgatcattgtctcccctgcttcttccttcgcttcaggctcatttctcaagaaaaagtggatctgtgacaggaacaagatgaggaaaattggtttttaaaatcaagaaaggggaagtgctagggtagcaatgaccaaaaccaaccaaccaactcgcaggttgctgcagaacaagaggcctgtggcaggtgttggccctgatcttgtgttgagaggttccagaagacatttaagataaagtttctgtcttcagggaaggttttctcttagagaactgagtgccaagttgctaagggccctgggagctcagagagggagagatgaggcaggctgagtggctcaagacgacttccagaacatccatggttggaatagtcttttaatgttttattaaaagcataaaacaatcgtgtggggtagctactactttcatcctcattttacagttgagaaagtggaggattagagacacaagatggtttgtccatgtcatatcagtaagaacagagtgaagatggcaacccaggtccccccggcccccaggcctccttctgaatctccagtcctctcccgcctgctaggagccttgtcctgggagggcagagtcttttatttatttatttattttgagacagagtttcactcttgtcacccaggctggagtgcagtggtgtgatctcggctcactgcaacctctgcctccaggttcaagcgattctcctgcctcagcctcccaagtagctgggattgcaggcacctgctgccacgcctggctaatttttatatttttagcagagacggggtttcaccatgttggccaggctggcctcgaattcctgacctcaggtgatccacctgcctgggcttcccaaagggctgggattacaagcatgagccactgcgcccggccggcagagtcttaaaagccacttagaagagcttgcctccaagacagtaggagctggagcctgagcatgtgctctttgccaagcgaacaccatgccgaaagtctgcctggttttgcagggcaagatcaggagagcggaaggtaaaggtaaaagagcaatctgagagttgctgcagtgaatgagaggcaccgagggaggaggctggtggcaatagtgatggagaatgggagagacaggaaaaggggaggatggaccttggttacaggggataaaagagaaaggtgaaaagtgattctgaggactggccagacaggtcgcttggcatgctgaactggatcacggggcatccgagaaccgaaggaacagaaagagcccagtaatcaaaggcacactggaaaggacttagaagaaccaaggaaagttgttttcagtagtgaaggggctcctgttgtcctcagcaggggccgatcagaagagggtgacttgggaggagaaacaaagaagttaaaagcagaaacatccttgttttccactgatgtttcttcccggggaatgtattgacactttctgcagtgaaatggcagatggtaacaattatgttgaaatatcaaggaggagactatgctttgtatgtttgttttagcttcatcaaaaaaataagattaaccttgatgatttatgtttgcattaattttttctattaaaacgaatatactgtgtcataactaattccacatctaaaagaaacctggtcttctcccttaagattgctgaggaattactcttgttcagacttgtttccttcaaactgtgatcttcttgtcatgctttgtaattgctgtgacaacaaatcaatgattcttcagcttcaggtatctgtggacacactgcctgtttcgttaggaacattttgctgccagtcaggtgctttagaaccaaattggtttgtacagagaattctgtaagttgcaagtattttaacaatgataaaggtgcaacggagcttatataccatcattagaacagaaggtttcaagttgcagcaggtgatactgttgatttcagggtactttcctgaattgctcaaatttgtctcttgtaccacacctgatgccaacaaagagctgcttaagtgtgttcggttgaaaaattgatccagaccttggcattttattattatgtccttagttctcaggttgggtcttgagttattgctgcagagcagtagtggttaaaataagatcttggaatttatcaaaagggaggtgagctggatgtggtcatccacgaggtcatggatgtggtgtgtatgcctgtggtcccagttactcatggaatgcccaagcgggaggatcacataagcccaggagtttgaggccagcctggccaacatagtgagacctcgtctctgaaacaacttaaaaaggttttttgttgttgttgttgttgtcattcagcatttcagataaggacttaagatgtaaagatattgttacaggatgatgcattgtattttctgcattgcatgaaagaatttttattgaaaatgaagtgacatttcaaaggaagttctattctaattatgtttctgcctaaagtaaacttcccagattttagaaaatgtaatcttttaaatttcagactggttttcccagtacttttataatcccatgttttgataaaatattgaattatcattttatattcacaaaggcaaataactagtgtatgagaatgggataattcactctcactcttgaaaatatatctacccttcaagtgagtaaaaggtctaactctgctaactctgtaaaagattgaaaagaaattgaatgccaagtgtgatacaggagagttggcaaggaaagattttagcctggtgccaaggttaagatgatatttgtctactgactctttcctgtttcaaaaccttatttctttttttccctctaaatcctacttttaacattgctggccgggcatggtggctcatgcctgtaatcccagcactttgggaggctgaggcgggtggatcacttgacgtcaggagttcaagaccagcctggccaacatggtgaaaccccatatctactgaaaatacaaaaattaggccgggcacagtggcaggcgcctgtaatcccagctacttgggaggctgaggtacaagaatcgctggaaccggggggcgaaggttgcaatgagcggagatcacaccaatgccctccaagctaggcgacagactcaatctcaaaaaaaagaaaaaaaagaaatgtacagagtatttttttttttttgagactgagtctcgctctgtcgcccaggctggagtgcagtggcatgatctcggctcactgcaagctccgcctcctgggttcacgccattctcctgcctcagcctcccaaatagctgggactacaggcgcccaccaccaagcccggctaattttttttgtatttttagtagagacagggtttcaccttgttagccaggatggtcttgatctcctgatctagtgttccgcccgcctcagcctcccaaagtgctgagattacaggcgtgagccacggcgcccggcctatggagtactttttagaaaaaaaaagtttcttttgtgtttactaaagggaatgttttgacaatagtgtgtgtgttttactaaagggaatgctttgacaatagtgtgtgtgtcattcttcttgttgaaactgaactgtattctgtagtcagcacttgattagttagggaaagtcctgcctttaaaacctttttgagaaccggtgagctttctgcgcattgtcttttgttaatattctctgttgtcaccttacgtagttcagctgaaacctgtcaccctgtaagggaggggagccccaagagagtttttctgggttggcattttgcatggtagccaagacagtttagcatccagggttcacaccaagaatggtttatagataattttatcggtggctcatgcctgtaatcccatcactttgggaggctgaggcgggtagatcacttgaggtcaggagttgaagaccagcctggccaacatggtgaaatcccatctctactgaaaatacaaaaattagccgggcatgatggcgcacccctgtaatcccagctactctggaggaggctgaggcaggagaatctctggaacctgggaggcggaggttgcagtgagctgacagcgagactcagtctaaaaaaaaaaaaaaagataattatttaaattatttagccaatcattttgaaacctctatatttttataattattatctatatgttatacagcatctctttccataattatttttgttaccttcagtgttttctgattatatttacaacaatattttaaaccaactttgcattttataactgattcaagtgctcattgctagtctttggagaccatgatttcccagtttgcaagttctttattttgattcatttttcaatcacttgaattgcctccttaagaagtttttcctcacacctgtaatcccagcactttgggaggccgaggtgggcagattgcctaagctcaggagttcatgaccagcctgggcaacacagtgaaaccctgtctctactaaaatacaaaaaattaggtgggcatggtcgtgtgtacctgtaatcccagctacttgggaggttgaggcaggagaattgcttgaacccgggaggcggaggttgcagtgagccgagattgcactactgcactccagcctgggcgacagagcaagactgtctcaaaaaaaaagtttttccccaggagaggactgtgagtggtgtattttccacgtcattgcgtatttgagagttgctttccgtggtcttccttcatgaggaatgatttcactgggttttaagtcctgggttgccactgtttactcagtaaatgcagccatgttgccttttggaatttaacattatggagacagctgatgctagttttatttttatttcattgtttatctcctgatttttatgtagaagaaacatactggtttttttgtttcttttttttttttttggcagagactgcagccttattctcttttaaaactttttatttagttggtttttaatttttttaatttaattttttttttgagactgagtctcactctgtcgcccaggctggagtgcagtggcacgatatcagctcactgcaacctccgcctcctgggttcaagtgagtctcctgcctcagtttccctagtagctgagattacaggtgtgtgttaccacacccagctaattttttgtatttttttgtagagataggggtttcaccttgttggtcaggctggtctcaaactcctggcctcaagtgatctgcccgtctcggcctctcaaactgctggaatttcaggcgtgagccacctcacctcacctagttagtttttttagagacagggtgtcactccgtcacccaggctagagtacagggtgtgatcatagctcactgcagcctccaacgcctgggttcaagagaccttcctgcctcagcctcccaaatagctgggactccaagtacgcaccaccacatctggctgatatagatatgttttaagacaaggtcttactatgttatccaggctggtcttgaactcctagcttcaagtgaccctcctgccttggcctctcgaagtgctaggattgcaggtgtgagccaccatgcccagttattttttttttctgtatcctttttattaaaaacagtttctaatatgtgtctgggaatgatgtttttgtggattaagggccgttcttttgagctgctccctcttgggtctcctgggtttttatttcggtttaactcagtcatgctttcctcagtcaagtctgattgttctcaagatgctttcatgccacttacacagcttctttgggaatagcatttttttttttttttttgagacggagtcttgctctgttgcccaggctagagtgcagtggggcgatctcggctcactgccagctccacctcccaggttcacgccattctcctgtctcaggctcccgagtagctgggactacaggcgctggccaccatgcccccctaattttttgtatttttagtagagacggggtttcaccatgttagccaggatggtcccaatcttctgacctcgtgatccactgcctcagcctcccaaagtgctgggattaaaggtgtgagccaccacgccccgccaggaacagctttgaaggcataagttggcttccttttctctttgtattaataatcttcttcctcgggccgggcgtggtggctcacacctgttatcccagcactttgggaggccgagctgggcggatcacttgaggtcaggaattcaagtccagcttggccaacatggtgaaaccctgtctctactaaaaatacaaaaattagttggatgtggtggcacatgcctgtaatcccagctactccggaggctgaggcaggagaatcgctggaacctgagagttggaggttgcaatgagccgagatcgcaccaccgcagtccaccctgggcaacatagtgagactgtgtctcaaaataataataataataataataataataataataatgatgatgatgatgataatcttctccctcaacatttaatgtctttttctttctctttcacattctggcaagtgtctctgccaagtcagcctcacagattcaactttctagcctgccatttctgctcttttctgctgatgaaacagttcattctgctttggctctgttagtttatgaaatattcccttattgtagtcccaccgtctcttcatcctggctcttccttctatcttgctgtgtctttttctcagaggtgggtcttaaatgtttttggaggctgactgctttctgaaagttccctctggttccacggtgatgcacggtcacagaggctgctggcctggtcttctggactccatgtaccctgactatggcattttatcggaagctcttggttgtctctttagaaagccaggttgagcggttgcccacagagagcgtgtgctcctgctttcggccttctcatcgcccctctgtcgtggtggatcccccttcttaggtctacagggagaggacaggtcggggcacagcatctaaccgtttttattgccaaggccttaaacaagtacggctctgtccagctgcagtagaatttttcctaatttcattgactggttatctgatataacagaccaggagtcacaaacttgacatcaacagacgacagacagggcacagaccttgtttgttctgacctgcgcagtgtttaatattgatcattttagtgcttcaaaatgggtgtgtatcctctggttaagcaagttcccacccctccctgttgtctcccctcccagcccccttccctcatttacagtttctgcttgggccctcagtgtgtggccctgcccgacacagttagagggtgtgacacctactctatgtacatatgtagaaagctgaaactggatcccttccttacaccttatacaaaaattaattcaacatggattaaagacttaaatgttagacttactcaatttcagtgcacactgctacaaggctacacctattttggatcccaccttatctctttaattctaaggatgcccccctgcggaggggaggatattcattcattcactggggctgtaatgtgcctggccagagcttgtagctgtgaatatagcactggatgtgacagagaggggggcacctgccttctctctgaggttaagcaagggagagttattcgtgttttgtaagaagtgttggtaacagcttgataaaaaccctttctttatcttcatcttgattctctgactcctttgatagttacctaggattcaatcacaatgatcagtcttttttttcctgtaaggatgtggaaatcagatcaattgagctagtggaaaaaaacgagtattttgctttgtaactatgaaccattttagatgcgagactagttgaagtagggccggtcacagtggctcacgcttataatcccagcactttgggaggccgaggtgggtggatcacctgaggttgggagttcgagaccagcctggctgacatgatgcaatcccatctctactaaaaacacaaaaatggccgggcgcagtggctcacgcctgtaatcctagcactttgggaggccaagatgggcggatcatgaggtcaggagatcgagaccatcctggctaacatggtgaaaccctgtctctactaaaaatacaaaaataaattagccgggcgcggtggtgggcacctgtagtcccagctgctcaggaggctgaggcaggagaatggcgtgaacccgggaggcggagcttgcaatgagccaagatggcaccactgcaccccagcctgggcgacagagcgagactccatctcatggataggaagaatcaatattgtgaaaatggccatactgcccaaggtaatttatatccccatcaagctaccaatgactttcttcacagaattggaaaaaactactttcaagttcatatggaaccaaaaaagagcctgcattgccaagtcaatcctaagccaaaagaacaaagctggaggcatcacactacctgacttcaaactatactacaaggctacagtaaccaaaacaacatggtactgttaccaaaacagagatatagaccaatggaacagaacagagccctcagaaataatgttgcatatctacaactatctgatctttgacaaacctgacaaaaacaagcaatggggaaaggattccctatttaataaatggtgctgggaaaactggctagccatatgtagaaagctgaaactggatcccttccttacaccttatacaaaaattaattcaacatggattaaagacttaaatgttagacctaaaaccataaaaaccctagaagaaaacctaggcaataccattcaggacataggcatgggcaaggacttcatgtctaaaacaccaaaagcaatggcaacaaaagccaaaattgacaaatgggatctaattaaactaaagagcttctgcacagcaaaagaaaccaccatcagagtgaacaggcaacctacagaatgagagaaaatttttgcaacctactcatctgacaaagggctaatatccagaatctacaatgaactcaaacaaatttacaagaaaaaaacaaacaaccctatcaacaagtgggcgaaggatatgaacagacacttctcaaaagaagacatttatgcggccaaaaaacacatgaaaaaatgctcatcatcactggccatcagagaaatgcaaatcaaaaccacaatgagataccatctcacaccagttagaatggtgatcattaaaaagtcaggaaacaacaggtgctggagaggatgtggagaaataggaacacttttacactgttggtgggactgtaaactagttcaaccattgtggaagacagtgtggcgattcctcaaggatctagaactagaaataccatttgacccagcaatcccattactggatatatacccaaaggactataaatcatgctgctataaagacacatgcacacatatgtttatcatggccctactcacaatagcaaagacttggaaccaacccaaatgtccaacaatgatagactggattaagaaaatgtggcacatatacaccatggaatactatgcagccataaaaaaggatgagttcatgtcctttgtagggacatggatgaagctggaaaccatcattctcagcaaactatctcaaggacaaaaaaccaaacaccgcatgtttctcactcataggtgggaattgaacaatgagaacacatggacacaggaaggggaacatcacacaccggggaatgttgtggggagcggggagggatagcattaggagatatacctaatgctaaatgacaagttaatgggtgcagcacaacatcatggcacatgtatacatatgtaacacacctgcacgttgtgcacatgtaccctaaaacttataataaaaaaaaaatgagctggttgtggtggtgggtgcctgtaaccccagctacttgggaggctgaggcggaagaatcacttgaacccgggaggcagaggttgcagtgagccgagatcatgtcattgcactccagcctgggtgacaagaatgaaactctgtctcaaaaaaaaaaaaaaaaaaaaaaaaagactatttgaaataaaaaaaataaaaatccaactgtatgcttgcataggactaatttagctgggagttactgagcagttggacaaactatcatgaaaaaattaggctgatctcagttttacaatatgcagcttctgctgctgctgcttttgttgttgttgttgttttaattttatttgagagacggtctcacactattgcccagactggagtgcagtggtacaatcttggctcactgtaaattccacctcctgggctcaagcagtcctcccacttcagcctcctgaggagctgggactactggcgtgcaccaccatgtctggctgatttttgtatttttggtagggatgttgctcaggctggtctggaactcctgcgttcaagcaatcctctcgcctcggcctccgaaagtgctgagattacaggcgtgtcccaccaatgcgacttcttgatttgaagtttttgtagttcatgtgtctaaaggatctctggagacctccttgccactggggtactggttggagaacagttctgcacaggagatgtgcttctttagggatttgaagaatcctggctgtgcagaccaattttctacttcttgtcagttgaatggtgaaaatacgttaagcaactctagggacatcatgctgacttttcttggaacatacagtgtagatgcagtagcttagccacctgcagatgcaagcaatttagatgcaaaatgcattacaacacgtgtgtttggctcactgcttggtgttagtaatgaggtcaaaatattttctggtagagtcctccattcatcttattgaacgtttgtgtgctagaatttgcaaagtgtttttcaacagttatttctcctttgataatgaaatgacagcattaacagaattcagggctgtgaaaatggatgctgaaaaccccagaagtttattaagagccatctaggcatccagtgcttggcatttgtaattctagtgatcctcatgcagttaatgtgaaggtcagtcatgggtcaggtctcctgattctatagcttcggccctccccaccaccctaggcttttgccttttgagatatatttatgggctaattgaaaaaatttttaaagaagtgagtcatgattctgaaaagtttaagggcacaaatttattgctgaactcataaatcttccaagaaactttcataacctcattctgatttaatcacctgggaagaagtgctagatgctttctttggttactaatgaatcacactaccctgtgttggccctaacatggacagagactacaggatctatcacctctatcatagactctaagggcagtgagtggtcctcctttgtaaacttgggattaggccgggtgtggtggctcacacctgtaatcccagcactttgggaggccaaggcaggcagatcacttgaggccaggagttcaagaccagcctggccaacatagtgaaaccctgtctctacaaaaaatacaaaacttagccaggcatggtggtgcatgcctgtaatcccagctacttgggaggttgaggagggaggatcacttgaacctgggaggttgaggctgcagtgagccgagattatgccactgcactccagcctgggcgatagaatgagaccctgtctcaaagaaaaaaaaaaagtcttgggattagtgcagacagggagtccttacaaaagatattgtggaataattgcttatgaagatgctgattttgcaagaaagggtaatggacacccgggccaaacctagtattcaaagcaagcagtctcaaatgcaaaaagtgctggttgtcatatggtttagggataaaaatactgtggtatttttactttattctttaatcacagataggcccaagagatcctcgagtttatgcccaaatctctatatgccaaattagctcctgtttaaactgcacaagtaatcagttggaattaaatgagattagatggttctattagatgattcgcgctgggtgactaggattttaatttatctactacttgtgtaggttctgaaaccagggctggagtcctttcaatgatttgcaatgttcattcacttaggcactttcaccttttgctcttccctcaccttagctgtttttcattttctgtgattgtatgtctgtctgtgtgtgtgtttacttatcgatgttgtccccctgtctgattagctcagtcgactgtagcgtctcagatatggatattttgggcccagtggtaacgggctggagcatgtgagagaggagatgagctgaaatgggtcactcaccagaaaggcaattctgcaagtaaggtgcgtttatcaggcgggggccttgtaattcctgccctttggatttgctttctgtcccctcctctaaggattagaccttgttctgtttgccaggactgaagaggcatctttagaaattgaatatggagaggtgcagcccttcaaaggcatgggaatttaccacccatgactccctctggacttgccctgattttttatgttctgcttcccacaagtactccaggggaaaacttctgcctagaggctgagactgccttaaggtgttttgtgttgatgtaggggattagataattgagtttctgactttatggatgcaaacttttccctgtctttgtagagacatatcacagttgtacactttatatatttttggctctgaatggtaatgactgattaccaaaattctgttataggccagatgctgtggcccatgcctgtaatcccagcactttgggaggccaaggcaggtggattgcttgagctcagcagtttgagaccagactgggcaacatagcaaaaccccgtctctacaaaaaaaaaaaaaaaaaaacacaaaaatcagccaggtgtggtggcacgtgcctttagtgtcagctactcaggagactgaggtgggaggatcgcttgagcccgggaggcagggattgcaatgagctgagatcgcgccactgcactccagcctcaacaacagagccagaccctgtctcaaaaaaaattatgaaattcttaaatgctctttctatattttccttgttctagtcactaagtattggtagtaatcatttatgtactaatcagaaaatagtagtgtctaaccagatgaaggagagaaagttagttgatatcttctcacaattactagcacttcatagagaaagatagcatattttgaaaaacgtgcagattggcatatatttgtgattttacttacattagcaagcattaattttctaaaaaatccacttgagttcatgtatagcctgaaagaacctaatggagaatttatttcagtcaatactgtaatttatagaagagaatcagtcatgagttgaagttttaatttttttcttaaatttgcataacaaaggaattggccagttttgtggcacattattttaaggatgtgaagatcttataatatttacatgtttgcctttttatatcctaaaaggatattaacaattctgcctttctgagattgaggttgagtatggattcccccagaaaaccaagaggaaaacccatgttaggacgtcagtttggagcagttagcgtctcgagtgccctctgtgctgtcatgcatgtgactaagatggtaggagttaaagtcctgccgtagggagctgctgtcagaccagtgggccaaacagggctcctttcccatgattcacaagtggtctgctcaggtggatcgcctgaggtcaggagttcgagaccagcttggctgacatggcaaaaacctatctctactaaaaatacaaaaattagccgggtgtggtggcgggcacctgtagtcccagctactctggaggctgaggcaggagaattgcttgaacccacgagggggagattgaagtgacttgagatcgtgccactgcactccagcctgggccaccagaaaaacaacaacaacaacaagaacaagttgtccactcagatttaagcccccaaatctccatcaacacacattgatcccatattccatacttcaggtcctcccaagaatcttctcaggtaaccctgctctgtgggctcttggagaatgttgtaaacacaaactaaccttagcttaacctacagctgatctccctccaagcccaatgcataacatcgagttttcctgtagcccatcacttgtgccaagagcgtcccacagttgacatgatacattggtcatttgtggtgatgttgagatggaggcctgctctgtcacccaggctggagtgcaatggtgcaatctcggctcactgcaacttccgtctcccaggttcaagcgaaaattctcctgcctcagcctcccgagtagctgggattacaggcatgtgccaccatgcctggctaattttgtgtttttagtagagacagggttttgccatgttggccaggctggtctcgacttcctgacctcaagtgatccacccaccttggcctcccaaagtactgggattacaggcgtgagccaccgcgcctggctgatacattggtcattttgatgataataattttgtttctctttgtgtatttgttcacaaaatattaagtactggattcgtgctgggcacaagtatatgttaatatgcttaacattcacttttttttttttttttttttttgagacggagtctggctctgccgcccaggctggagtgcagtggcgaaatctcagctcactgcaagctccacctcccgggttcacgccattctcctgcctcagcctcccgagtagctgggactacaggtgcccgccaccatgcctggctaattttttgtatttttagtacagacggggtttcaccgtgttagccaggatggtcttgatctcctgacctcgtgatccgcctgcctcggcctcccaaagtgctgggattacaggcatgagccaccacacctagcccatattcacatattatacattgaacgtacacatgacatgcaagataaaacacatagcggtgggagttgcacagctttgctgctgatactgaaatcact

SEQ ID NO: 710 - DNA, 32744 bp, Homo sapiens
  source 1..32744: mol_type = other DNA
atgtctctgctttgcgttggaggtaggaggcgaggctgggggtcgggggacccgtgtggacgcgggctggggtcggggtccgcgtggatgcggctcccagggggttcctggggggtgacccgagtccaggtggctggacttttgagaggggtagcccttgtcgacgcagctgggccccggagggggtgatccgtgtagacgcggcagggctctcgggggtcctggtggccgctgctggaggggtcgtgtggacgcggctgaacgcggaggcccgtgtggacgtggacgggtatccggggttctacccggaaacgatctagactggggcgtctgtgtagaccaggtttttagagggtcagtgaggaagagtctgggctcggtagtttgattgaagcctgcaggggtgcttggaaggggtctggtgttgtgggctgggttacgggtcctcatggacgcggacccggctggaaattcgaaggagagtgcggtgggagggttctccaagccgtggggatgtaagatataggtagaggggcttggccatcagggcatccacgagttctaggactctcccagccctaggtgtaaagaggactggagtggggggagtgtggagacaggagacccctcccagcgtccagagagggctgtgactggaggtctgggggcgcttttccagttaactctttggcctcccgagtgagggggttggaggaatgtccagaaggtcttcccgctccctgccccctccggttctcccaaacacgtttcagggccttctcggcagggagcctacttcttggaagagcaatgtctcctggtccccctcctggcccatcctcacctcacccactttgcactggagagagggagggagggagacgtgaggtggggggggagctattttggggccagaacgccatctgcacagaggcccacgcccaggcccacgctctgcgttggggttggaggagggagggagacgtgggaggggcatgaccccccaccccacacctttatggctctggggtcgtggggaagccagcccaaccgaacccaggcgttctgggcactcccgtttgagaaatcaaactctgggagaccttgggcggcaggggtggatgtggaccgccgttccacgcctacagagctctgaacccctggttcttaaggactggggtccccccgtcactcccacccatttcaagaaggctggggtgggggaaggggtgtgtctgccaagcctgagactgcaggcttcgggagacctcgggcgacaggaagcgtgcgtgtgctgaactcctgctgcctggacacagggtgggcaggccggggagccgggaaccgcccccgccgcccctcctcctccctcccctccccctcggccgattcattcacaaaccctgccccgcccgcccgctccccgccgcggcagcttccgagtgcaaatccggccgggctgggccggcgtggacgcgggtgttcttaaagggacaggggcctactttctctaagctcgtttctgctggacggggctgggggtggtggaagaagggtccctagagtcaaaggtcaactcctccatcccctagcctccaggcctatggagttaggggagtagggaagtgaaggagacccctaggcgacccccaccgcctaggcctgaggacggaatgggaggagaacttgaatgtccagaccccctactgacctctccccctgctctaagtagccgggctcttaaaggtggcactggaggaggttccgacgtgggtgttcttggctgactcctctatcctctctcttctccccccagcatcccgccccaccccgcctcacatcctccaagttgggcttctctggaaggtttgcctagtggagtgggggggggggggggggggcggggatctcacccttaactctgacgcaaacaggaggctcggctgcgggggtggcattaagggggggcagcaggaggcaagagggatgaggcttccagaaacagagacgttgggggaggactgtgctggattctgtggactttacagggaggggcccggctgagtggagaggaatcgctgggaggggcaaggctggggaagaggttgacaggggtgggaggtaaggccctcaggtgtaaagggaggtgtgaggttggagtgaggaggagtaggaggcagggaggggtggggagagggagaagtgctgggtgaggccagtctcccagggagaggtgggatggtgcccagagaggggaggggctgggatggctgagcacgagagatgttggggtgggcttggcaggagtgaagctaggctgagatgggttgccgtgttgcctgagctcagctgaggaaatacctgtcccccctcccctccaccggggacccacaggcgtttgccaatccctacacacattcatacccagacttgttcctgtgtggacacaaatgcttaggatgtatgaaggctctacgcagaccatgtgcctgggaaggcacattccgtaggcacacgtgtgtactcaaatgcctgtgtgaacacaagcatacacgtgtatataggacacagtctgccgctacagatatagtcccagcaacacacgtgtgagtgtgtgtgtctgccagcacgcatatagatgtatccacgtgtctgatgaatgctcacaatatacatgtcacataaagatccacccatgtccagccgagcgcggtggctcaggcctgtaatctcatcactttgactttgggaggccaaggtgggcagatcacttgaggtcaggagttcaagaccagcctggccaacatggtgaaactttgtcactgctaaaaaataaaaaaaattagccaggtgtggtggcgcgcacctgtagtctcagctactcgggaggctgaggaaggagaatcacttgaataggggaggtggaggttgcagtgagctgagatcctgccactgtactccagcctgggcaacacagtgagactctgtctcaaaaaaaaagattcactcatgtcctaacactcagacatgtacccatacatatctgttaaggtccccaaccccatgaagcacatatatattcatataagcacatgtcaaagccatgtgtgtatgcacatgacaacacttgcctggacattcaaagcagcccctttcaacaagtggatgatgatgcatacaagtaaatacacatttgagtatttcattgcacacaagtgcatacatgtatgcagataaacaaatacagctgccacagaactgcatccatgtacacatgcaaacatcaatatgtgtgttttccacctaacatatcacccacaagctcacacacaccagtgtgtctctgatgtagtgacaccccactcctagacacacatgtgcagactcccacctgcacttaaatggtgcacatactctgcacacatgcacactcatatccatgtagaggcaggcacctgcctgccctggtaagatgagccaactactgctgcaaatacccaagcaagtacaggcaaatgcaagctcttgtgtatacacccagcaccaacacatagcagaccaccctgtatggtgtatgggccttatctctgcccgcttcatttatttattcatgtggtgccccgctgcttcccaacatcgtaatccactgactaggtcttggcaggatcctgaggctgtgaatggtaaatgccacctggttccttcatgaagtcacttattttatttatgcaacaagcattaattgagcacctactgtataccaggcactgttcctggctctgggacccagccctattcctagccatcactcctgcacgtcccatggggttagaatgaaagagatgagggagggctaagggagctgaggagtggggtatccagggctctcttcctctgggaagcctaccctgattccaccaccaccatttacttgagtctcagaagatgtgatgagggggagatgagcaggagggagatggtgctctgggtggagggaacagcatgagcaaaagcatggtggtgtgaagggttacttccagatcttcctatgtgcctcacagcattttgcacaggccacttgatgttttgttttgttttgagacagagtctcactcaaagcctgttactcaggctgcagtgcagtggcatgatctcagcttgctgcagccttgacctccagggctcaagtgatcctcctgcctcagcctcccaagtagctgggagtataggcatgcaccaccacacccggctgacttttttctttttaattttttgcagaagcagggttttgccctgctgcccaggctggtcttgaactcctgggctcaagtgattcaccctcctcagcctcccaaagtgctaggattacaggtgtgagccaccacgcccaactgatgttttaaaggctctataaacatgttatgaataaatgacatgaacaaatcagtgaatttaggtgagggtgggtttgcttcacaacttacaataatatcaacaacaaaccccatttatccagcttttttgtttgtttgtttgttttttgagacacggtctcactctgtcacccggactgcagtgtagtggtgtgatctcggttcactgaaacctccaccttccaagttcaagcgattttcctgcctcagcctcccgagtagctgggattacaggcacgtgctaccacacctagctagtttttgtatttttagtagagatggggtttctcatctctactaaaaatacaaatacatctctagtggccaggctggtcttgaactcctgacttcaagtgatcctcttgcctcggcctcccaatgtactgagattacaggctcgagccaccgtgcccagcccagcatttcataggcatgatgttaaggatttttatgcccatgccctctttaactcttacagtagccccattgtacagatgaggaaaactgaggctcagggagctttaacaacttgcctggtggaacagagccagaggtggagctgactgactctagagcctactggggttggcagaagtttgagccttctctcagaccccaggacctcggagacagccaagtcccttctgtggagtgatgttctgccctgggattgccttcttctttctatttatttatttattggagacagagtctggctctgttgcccaagctggagtgcagtggcacaatttcagttcactgtaacctcctcctcccgggttcaagcaattctcctgcctcagcctcctgagtagctgagattacagatgcacaccatcatgcccagctaattttttgtatttttagtggagatggggtttcaccatgctagccaggctggcctcgaactcctgaccaccaagtgatctacctgctttggcctcccaaagtgctgggattacaggcatgagccactgtgcccagccaggattgctttcttctctcatgcatctagtaaacagacatgtcacaatctctccattcatcggggctattcccctgctccttgcctaagaagccttcacacatccctccgttcctggctactcagtccctgataccctccagctaggaggagctgcatctaggtcttagctcctaccgttctcatgggatgccctccagagttgcatcttcagggctgcagcctaaccctttccctaacctggcctcacttttcttccacatacaatggacctcttctgcaaggtgccaataagggcatcctgggtccagcaggcctgagtgtgaattgctaagtccaccacttcctggcaagtctcacatcctctgcattccttggtgtgctcatctgtggaatgggcacaggagtagcatccaccatctacgtttgccagaactctctaatgaggcttgcagagcccctggcatgactcctggcctacgggaaggcccaataatcgtgagcaaaagacatgaaaaatcaatgatgggccggccccggtggctcacgcctgtaatcccagcactttgggaggcctaggcgggcagatctcctgagctcaggagttcaagaccaccctgggcaacatggtgaaaccctgtctttactaaaatacaaaaaaattagctgggtatggtggcgcgcgcctgtagtcccagctactcagggggctgaggcacgagaatcgcttaagccccgaaggcggaggttgcagtgagccgaggtcgcgccactgcactccagcttgggctacagagtgagactccgtcaaaaaaaaaaaaaaaaaaaaatcaatgatgatgtttttattaatggagactaaaagctttctggaaggcggttctgagtgcaggacatttctgagagtccactgcattctggggcccgaggagcgctccaagaggggtcccccagggccactccaggagggagcctagttcgttgagggtacacgggtgggaccgagcattcagcaccgtggacagcgcctgcccgcgcctctgggggacagctcttagctcagcctcccaggattaatggaggaggtgacgtcattccttccgtgaattactatttaatgagcacctactataggctaggcctacttctaagtggttcatggtaaacaacacacacacaaatcccttattcccgaagctctctggaactccaggttcttggtgttttttacactgaaggctcagtctggctctggtctatttgtgtcaacggaggataagggtcctcatttagtgtctcccagatgcgaaaccagcacagctgaggtcttttatcctaaagcccatccatctcccgctgaaatgccctccaccaacatcacacacaaaacgatcaaatctcctataatctatttctggattctctatgcttcctcccttcccccaagctaatcctggggcgggtgggctttcagaagccctagacggctggatctccacctcctgtctccccaccccatcccacgtggcaggtcagggagccagtgccccaagactgcagtcccccctaattagaatccagggtcagtcagccatgtggttcacgcctgtaattccaacactttgggaggccgaggggatggcttgagccttgaagccagccatagcaacatagcaagaccccatctctacaaaaaaaaaaaaaaaaaaaaaggaatagccaagcatggtgatgcgcacctgcagtctcagctactcgagaggctgagtggggaggatcgcttgaacctgggagatcgaggctgcagtgagccatgatcacaccactgccctccagcctggagcctgggcaacagagagagaccctgtcaaaaaaaaaaaaaaaaaaaaaaagaaaagaaaagaaaaaaaaagaagaagaagaagagaaaagaaagaaaaagaaaagaatccagggtattcaaatcctagaatccaggccagggacacctttagaacacaaccaaataataaaaacagtaaagatatcagtaataataataatagtataaatgacactataatcattctgcagaaggggtgagggaggaagaggagggaagaagaggaggagaaaggagagggaagggagatcagccactccgtctccccattttccagatgcagaaacggaggcgcgaagccaggctgcaggggtgtcccgcagcctgaactcctgcctcagcctccccgggtacggccactacattcatcagtcagcgcttctgggggccccaaagacctttgaggccgcatgacgcggtgtcttcacccgctcgtcgctggggacagcagtgggcacccccctcatccccgcccccctgtccgccggcgcgcctcccacgccctccgcgcgcccacgctataaatagcctcatgcgtgtgacccgaagcccgctggggaagggtggcgcttccgccccgctgaccctgatacagcaacccggcgcaggcggggaggtggcgggatgtgacgacgaagacggtgactcagggaccatttactgaccggggaagacagggagagagactgggttccttctctgagcccccttcctcctccaagcctctcccccgataccaccctcccctctgcgcccatcccccttcccgaatcccctccctcaccgcgaacacccttccctcctgagaaccccctcgccactctcggccccctttcctgtccccttttccctctgagacccctctcccactgggagccccagtgatgaaaaatcatggatgtcctcaacctggacctcggcagggagctaagtgcaggagcctggcttcagctatcagagggtacagccctccagccggtcccccactgcctgaggaccccaacggagaccattcccctctagccaagagaggctgcaggaaggagctgaggcttagggaagaggagccggactgaccaagggaggggcacaagaagggcagagacagtgagagagagaaggagagaacagagaccaaaagaagacgaccagagtggagagaaatagaacggggaggagggagatgagagacagggattgggaaagagagagagagaacagatcaaggagctactgggctccccgctgagcctaaatccatggtttataaaacagggcacagttggaggagcttcaagtgagcccagcccagtctagaccccagtgagccccttgtatcaccccccagagcctgtcactttcccacccccatatgcatccctacttttctcccccaactgcctctcctctccccagtgtctcctccacctgcctgccctccctagtggaaatctttccccctctctcttttattattattattattattatatattttttgagacagagtcttgctctgtcgcccaggctggagtgcaatggcgtgatcttggctcactgcaacctccgcctcctgggttcaagcgattctcctgcctcagcctcccgagtagctgggactacaggcgtgcaccatcatgcccggctaatttttgtatttttaatagagatggggttttaccatgttgcccaggctggtctcgaactcctgacctcatgtgatccacctgcctcggcctcaaagtgctgggattacagatgtgggctaccacgcccagcctctctcccttttaaattattatttttagacatgggatcttactacattgcccaggctggtcttgaactcctgggctcaagggatcctcctgccttagccttcctagtagctgggattacaggcatgtgcctctatgcctggtactctcgctgtctccttgtgtctctctatttctctccatctgtccagactctcctctcttgctttcatgcccatcatttcttcctctctcctctcccttcctctccctgtatgagtccctccagctgtgggtgcctttctcagcctctgtcagcatcccctccacccccgatcccgtcacattctacctcttgccccttcccctgcccacccccttcacagagagtccccacgcctgcaggctggacctcctccaggagccaggcccaaagctcctgctgggcacattcctgagtgttcctgagcctctttcagtcccaggggtgaggtgctgggtgggtgcgctccctgggggctgggtggggctgaggatgtgagcgaacaaaccagacctagaaaaaaaaaagacagagatggaagcagagatgaaggcccagagagaggggttcacttgcccagggtcacacagctcaggaatctgaacctggctcaaaccagcattcacttctctcaaggcccacccaagggctgcagtgcagtggcacaatctcagctcactgcaacctctgccttccaggttaaagggattctcctgcctcagcctcccgagtagctgggattagaggtgcgtgccaccacacccggctaatttttgttattttaggagagacgaggtttccccatgttgttcaggctggtctcgaactcctgacgtcaagtgatccacctgcctcggcctcccaaagtgctgggattacaggcatgagccaccgcgcctggccaggaacagtctttactgacatgtgtttagggccatcgcacttcccccgctcttcacgggaattctctcttcactggctccactcaggtgccttttgtgagacagaaattcaagcgatgaggacagagatacaaacccgggatgggaggctgtgacatctgcccatagaaacacaattctgtttctaggaatttatccttcaactcgctagtacacgctcttcaagacatactgaaaaaacatgaaggattagaacagtgggtgtcgaatgctaccatttgtcttggaaatcaagcaaaacgaacgtgggtatggttgccgacgcatggaccatctccagtggaacaaggaactgccaacgttgattgcatttgggagggagatgaagggctgggatggaaagagctttattctcagtgcctcatcttttggttgttttggattttacaacatgtgcatgcattgcctacacaaacaaagacactaatttgaaaaggaaaaggggagaagaaaagagggaggaaagaaaaggggccggtgtggcagctcacacctgtcatcccagcaccttgggaggccaaggcggatggatcacctgagatcaggagtttgagaccagcctggccgacatatactgaaaccctgtctctactaaaaaatacaaaaattagctgggcatggtggcgcacgcctgtagtcccagctacttgggaagctgaggcaggagaattgcttgaatctgggaggtagaagttgcggtgagctgagatggcaccactgcactccagcctgggcaatagagcaagactccgtccctaaaaaaaaaaagaaaaaaaaaaagaaaagaaagaaaggaaagggagggaagagctcagtgtgggagaagattgggggtgggagtagagaattaatggaggaaaaagatgtgggggacaaaagcaaggtgtgagaggtgttggcaatggaaactgaatacctgttgagaagagccaggagggggcgacatggctttgaatctcttggggctgtgagattatgtgaaatgtgagaagactggacctcagtggggtgcctgacatatattcaggttacacctcccacaagcaggtggggctggacaatctctgtcaaccctccagccaggacccaagtgtctccctgtacattacttttggttgttgttgagacaagaatctcactctgctgcccaggctggagtgcagtggcatgatcttggctcactgcaatctctgcctcctgggttcaagtgattctcctacctcagcctcccaagtagctgagactataggcgcctgccaccacacctggcaaatttttgtatttttagtagagacaaggattcaccatgttggccaggctggtcttgaactcctgacctcaggtgatccacctgcttcagccacctaaagtgctggggttataggtgtgagccaccgtgcctcgccctccacatgcattttgagagccagctctctgggttgctttgtcccaactcacccagccttctttgaggcttccccaaaccctgggagcatttgacattgcagactgagctggacaatcaagggagaggtcttgctgacctgtcggggctggtggagtcatcagagattgtctttatcctcgccttcttcttctccacctcctcaacttcccctcttcttctggggcaatcctggagggcttcttgtaggaggcctctcccaccatctgcccagctctttctttctaatcttgttcaattgtgggtaaaggcacagctagttgggagcttggggagtttgatggggacaggggatgcagggagagggaggggcagggaatgctctcagggtccaaatttccttccattctagggttgcctgtgctcatctgtctgatggcttctctctctccctctcatccctgcctcctctttcctacctctcctcctccccttgtctctgtctctgacattgcttctatctttcttttttaacatctgtctcttttgctttttatctttgcctgtctctcctctgtgtctctctccttatgtctccatcttggtgtgtctctgaatctctccgtatctctgcctcctcctccccacatctctccccacctcccttccctatctctgtctctctccacagtcaaaaaagccaagtttgatggtgcccaaggtaagtggcttctcttgctgtcctgtcccgtgttgtctgtctgtctgtctgtctcttggagagactgggagggggtcccagcccagacttagagttgggctttatgtcttctgagcatcaggagaggggtcagaagattaaatagggggaggggcagccattggcctggggtccctgcagtttgtatgggggtccccgggtctccccagccatccttggagagtctgtaaggggtggggcttgccctgagccagtggctcttcccagggtcctaagaggtagaatggggactcttagatggggctacaggtgggaaaaatgaggctcagagaggcgaaaggagtttctttcttttcttcttcttcttttttttttttttttgagacagagtctccttctgttgcccaggctggagtgcagtggcgtgatctcggctcactgcaacctctgcctctgggttcaagcaattctcctgcctcagcctcccaagtagctgggattacaggcgccctctaccacgcccggctaatttttttatttttagtagagatggggtttcgccatgttggccaggctggtctcaaacttctgaccttaaatgatccgcccgcctcggcctcccaaagtgctaggattgcaggcgtgagctaccgtgccctgcctttttattattattatttttatttaaaatttttattttttgaggctggagtgccgtggtgcaatcatgttttactacagcctcaacctcccaggctcaagcaatcctcccacctcagccttccaagtagctgggaccacaggcgtgcaccactgcacccagctaattatttttttgtattttttagtagagatagggttttgccaagttgcccaggctggtcttgaactgctgggctcaagcaatcctccccccttgacctcccaaagtgctggcattataggcgcgagccactgcacccagcctgcaaagggggtttcttacagtcaattttgttccccttttctgggacctcagtctttttagctgaaaaccaatggcatggtcatttcgaagcagctggatgaagtatcccaaaattccacgtctccccacactgaggcccctcccttgtgccctgagggtggggttgtgggttagggggtgagtggcccagaaattcctgaggggatcacagcagatggtctagagcttgggaaggggcattggagagtccctgagccccagcgctgacccctactctcactgccacagagaaattcaacacgtacgtgaccctgaaagtgcagaatgtcaagagcacgaccatcgcggtgcggggcagccagcccagctgggagcaggatttcatgttgtgagtctgcagcgtctggcatgacctcactccctggcatagcccagcacctcgctggcccctcagggcagagctggacactggggaatcccgggtgactcccctctgtcctccctcttcccctgtccaccttatcaccttcacctccaaaacacatccccaatccaatcacttcccttggtctccgcagccaccagccaagtccctgctgcccgccagcctccgccctggcctcctgtgccatccacctcctacaatctgttctcctccaggcagccagggggatatttttaaaactgcaaatcacatcctgtcgctcccatgttccaaacttgtccgtggctcatcgacctcacaataaaacccacagccttccccgtgattcccaccaggttctcgctctatctccctcacctgccccagccacacccacctctgcccctttctccaacacttcccagcttgttcttgccccagggcccttgcacttgctctcctgtccccagctggctcttctccttcaggtctcagcttgtgtcacctcctcagtgaagccctccctgaccactacctccaagctacaatttcagggcatcatgccttcccaggccttgccaccaattttgtttgtttgtttgtttgttttgaggcagagcctcactctgttgcccaggctggagtacagtggcataatctcggctcacttcaacctccacctcccaggttcaagtgatcctcctgcctcagcctcccaactagctgggattacaagcgtgtgccaccacacccggctaatttttgtgttttaagtagagatggtgtttcactatggtggccaggctagtctcaaactcctggactcaggtgatccgcccacctcagcctcccaaggtgctgggattatagatgtgagccaccatgcctggccaatggaatttttttccttttttttttgttttgttttgagacagagcctcactctgtggcccaggctggagtgtagtggtgcaatctcggctcactgcaacctctgcctcctgggttcaagctattctcctgccttagcctcccgagtagctgggactacatgtgcgtgccaccatgcccggctaatttttgtgtatttagtaaagaccgggtttcaccatgttggccaggctggtcttgaacttttaacctcaggtgatccacccgcctcggcctcccaaagtgctgggattataggcatgagccaggagccaccaatcccagccaacagatatatatatcagatatatatatacttttttttttttttttgagactgagttttgcttttgttgcccaggctggagtgcaatggcgtgatctcggctcaccgcaacctccgcctcctgggttcaagcaattctcctgcctcagcctcccgagtagctggaattacagacatgcaccaccacgcccggctaattttgtatttttagtggagatggggtttctccatgttggtcaggctggtcttaaattcccaacctcaggtgatccgcccatctcggcctcccaaagtgctgggattacaggcgtgagccaccgtggttggccatattttaaaaatatatttcttaagataaatctttggtaaactgtaaattcagtgaatctcacatttcaccaagtttcctgctcccccgaattcacatatgtctagggcgaggcctgcagggaaagtgctttgaggtgggatcgtgtcctcacatcattagatggggatgacactgggaaggacagaggtgacccgaatgtccttatcctgtaggtaaagggagctatggagggtatttgagcctcttcctcacttacccagcatggtcagtgttggagggcccaaggaagggctcagaaagatgaaggtgcaggcgatgtgtaacatctgtccccacgccatccttcccggctttgaatcctggttcttttgtgataccccgagctcttaacttcccccactggcctcagtttcccctctataaaatgagaaccaccatgttaccctaccacctaggacactcccaggcctaggtttgaattgcagtatgctgtgtgttctcaggcgaatcaactaaactccctgggcccccgtttcctccctcctgctccctcgacgccccctctcctttttctgcagcgagattaaccgtctggatttgggactgacggtggaggtgtggaataagggtctcatctgggacacaatggtgggcactgtgtggatcccactgaggaccatccgccagtccaatgaggtgagtggcgggtggcctgagggtgaagaaggaggagtgccttgcagaagcccagagaccagtggactaaacaagatgggcatttatctcctatcccctgacaacatcaatgtagacacttgggattgccacgaaccttccaaagtcactagagcctatacaccttccatcttgctctgcctctctctccatgtggcttccaccttgtggccccaaatggctgctttaggctcaccattgcatcttcattccaaccaccgaaaggtgctggtggtgggggaggggggtggttcatgcacatctcattggccagaacttagacatgtggccaacaccttgctgcaagggattctgggaaatgtagtcctaggctggaaaatgtagtcctgggctgtgcttccctaggcacagctaaaaatgtattaccttggaaggagaaaagggataatataggcaattagcattttgtgtcccagatgggcagcagcaggaagcttacaccaactcataagaaggtgctaggtaacaaccctggcccctcagcctgtgcatcattgtcagcaggtagtagtgatgtctattttttatttaattatttatttttgagacagggtctcactctgttgcccaggctggagtgcattggcatgatcatggcccactgcagcctcgacttcccaggctcaagtgatcctcccacctcagcctcctgagtagctgggactgcaggtgcatgccaccaggccccccttattttttttgtatttttaatagagacagggttttgccatgttgcccaggctggtttcgaactcctgggctcaagcaatccacccacctcagcctcccaaagtgctggtattacaggtgcgagccaccatgccaggccgtggtcatgtctattcatctgtccccacagcccaatccctggcctcctaacctcaagtctcaacctctccatgctgaccccaggaaggccttattagctggagctctgatctgtcctcccctgtccatctgccttgggaggcccttcagatggcacctgcccactagcctcatctccccccacactctaacctctacccctcccagattccaccctctgaacctttgcatagtgtgttccctgagcttcaagtgtcctcctttccatcaccttctaaattcccatgtgcccacctccaggaagccctctctgacttctctctagatcctttagccctccttcctccctctgggctatgacctcatggggctgggggtgcctgtgtccagccctgtttccaagggctatgggctctcaggagccagggtgatgatggctgggcctcttggggaccctggcatcacccaatatgaaccaggcatagaggagggactggggactgttttttgtttgttcgtttttgtcattttattttattttattttattttattttattttattttattttattttattttactgtgagatggagtctcactctgtcacccaggctggagtgcaatggcacaatcttggctcactgcaacctctgcctccctggcttaagtgattctcctgcctcaacctcctgagtagctgggattacaggggcctgccaccacacccaactaatttttgcatttttagtagagatggggtttcgccatgttggccaggctggtcttgaactcctgacctcaagtgatccgcccaccttggcctcgcaaagtgctgggattacaggtgtgagtcaccgcacctggccagtgagtgtttgtttttgaatgaatgaatgcagagggacgaaatggttgcaacaatctaggtaagcgagtctaaaaggaagccttggctgggcatggtggctcacacctgtaatcccagcactttgggaggctgaggcaggtggattgcctgagctcagcagaccagcctgggcaacatggtgaaaccccgtctctactcaaaaatacaaaaaattagccaggagtgctggcacgtacctgtaatcccagcagctcaggaggctgagttaggagaatcacttgagcctgggaagcggaggttgcagtgagctgagatcacgccactgcactccagcctgggtgatagagagactctgtctcaaaaaaattaaattaggccgggcatggtggctcatgcctgtaatcccagcactttgggaggccgagatgggtggatcacgaggtcaggagattgagaccatcctggctaacacggtgaaaccccgtctctactaaatatacaaaaaatcagccaggcgtggtggcgggtgcctgtagtcccagctactcgggaagctgaggcaggagaatggcgtgaacccaggaggcagagcttgcagtgagccgagatcgcgccactgcactccagcctgggcgacagagcgagactctgtctcaaaaaaaaaaaaaaaagaaaagaaaagaaaaaagagagagaaaggaaggaaggaaaagaaaggaataaaggaaggaagggaggaagggaaagaaagaaaggaaggaagcagggagggagggagggaaggaaggaagggaaggaaggaaggacggaaggaaagatagagaggggacatgactttggttttggggtaggggtgagggggatgtctcatgcgagagtaggggccctggggactagtgaccagcagattcctgacccacacacctcctcccccaacccccaggagggccctggagagtggctgacgctggactcccaggtcatcatggcagacagtgagatctgtggcaccaaggaccccaccttccaccgcatcctcctggacacgcgctttgagctacccttaggtgagtacaggggcccgggaccttcacccagccccagccccagttgtggactcactcagctattccaggagagtgaacaggcctgggtaggtctagctgacccttcaggctgagaatgagggtccttcgccccggaggagagagagtttcttgggttgcagagaacagggatgtgaacctgctgggtgcgggccatgacctgggccccgtagcttcccagtgagctgcaagtgcttcacgaccgagggcgttcagggttgagctatcctggctgttccttggtgatgcctgagactgcaacagtgaactggggataggaggagagacagacagagacagagagacaaagagagacagagagagacatgtagacagaggctgagaacagatagtcccctcttcctttcctggaagcaccttgagtctctccacctcattcttctaagaacccatggctggccaggcatagcttctcatgtctgtaatcccagcactttgggaggccaaggggggaggatcatttgaggccaggagtttgagaccagcctgggccatctagtgagatcccatctctatgaaaaagttaaaaattcaccaggcatggtgctgggtttctgtagtcccaactatttgggaggctgaggcaagaggatggctcaagcccaggagtttgaggcttcagtgagttgtgattgtgccactgcactccagcctgggtgacagagcgagaccctgtctctaaaaaaataaaaataaaaacaatgggctgggcgtggtggctcatgcctataatcccagcactttgagaggccgaggcagatggatcacctgatgtcaggagtttgagagcagcctggccaacatggagaaaccctgtctctactcaaaatacaaaaaaattaactgggcatggtggtgcacacctgtaatcccagctactcgggaggctgaggcaggagaatcgcttgaacccaggaggtggaggttgcagtgaactgagattgtaccacttcactccagcctgggcaacagagtgagactccgtctcaaaaaacaatttaaaaattaaaaaattaaataaaaacaatggcttccccaccctcgtaaaggctaggaaccatctcctgtcatcctccaactattctccattcagctctgggaagaggggcgtcagaggcaccacggtacctccccttcatctccatccaccctcctgagaccgcagaccaacccacccctacttctgaggctttgccaaagaccccagaagccagggcccgggtggagctcagtaggcctggaggatggaggctgagcggcagggagggtcttccaggctcacagacagggctctgcttgcagacattcctgaagaggaggctcgctactgggccaagaagctggagcagctcaatgctatgcgggaccaggatgaagtgagtgttggggtgggaggggactgtttcttccttgtttctgtctctgtctccccatgattttcacttacagatgctgtttctctctaagcttgtctttccctgcatctctgtttctaactctttgtaacctgactgcatccatgacccatgtggtccagtctctagacaatgatggggtcaagaaacacacagaggccaggcgcagtggctcacgcctgtaatcccagcactttgagaggcgaaggtgggcagatcacctgaggtcaggagttcaagaccagcctggtcaacacagtgaaaccccgtctctactaaaaaaaaaaaaaaaaaaaaaaaattagccaggcttagtggctcacacctgtaatcccagcaatttgggaggctgtggcgggcagattatttgaggccaggagttcgagaccagcctggccaacacggtgaaaccccgtctctactaaaagtacaaaaaattagctaggcatggtggcgggcgcctgtcattccagctccttgggaggctgaggtgggagaatcacttgaatctgggaggcagaagttgcagtgagccgagatcacgctgctgcactccagcctgggcaacagagcaaggctctgtctcaaaataataatattgataataataataaaataaaaaattttacttttcatttggcggatacatgtgcaggtttgttacacgaatatattgcatgatgctaaggtctggaattccatggcattactcaaattgtaaacacagtacctaacgggtagttttttcactcttgtcctgctccctccttcctcccttctggagtccccaatgtctactgttcccatctttttttttttttcttttttgagacggagtctcgctgtgtcaccaggctggagtgcagtggcacgatcttggctcactgcaacctccacctcccgggttcaagtgattctcctgcctcggcctcccgggtaactgggactacaggcatgcgccaccatacctggctaatttttgtatttttagtagagacggggtttcaccgtttagctaggatggtctcgatctcttgacctcgtgatctgcccgcttcggcctcccaaagtgctgggattacaggtgtgagtcactgcacctggcccctagtcttttttctatctctgtttcttactttttctgtctctgtctctgtctctgtctttctctctctctctctctctctctctctctcgtgtgtgtgtgtgtctttctctccttttctctcttactccctgtatccttctcatagagagggagagaatttgggaggtagagggaagtcgggatgggacagaacagaggactatcctggtcccctggcctttggcccctctgagagaagccctttctccttcctccaccccttcagtattcgttccaagatgagcaagacaagcctctgcctgtccccagcaaccagtgctgtaagtacctcttgattcttccttgggtatcagctgaaatcctcatccctcccctaccccatgactgtcctgtctaaaggctcctccagtccggagatacaagtcctgagagtgcagtgtccacttacagtgtattagaaatcagcgttctgaggctgggcatggtggctcacccctgtaatcccagcactttgggaagccgaggtcaggagttcgagaccagcctggccaacagggcaaaaccccatctctactataaatacaaaaaaaatgaacaggcatggtggtgggtgcctgtaatcccagctactcagaaggctgaggcaggagaattgcttgaacccaggaggcagaatctgcagtgggccaagatcatgccactgtactccagcctgggtgacagagcaagactctgactcaaaaaaagaaggaaggaaagaaagagaaagaaagagagaaagagagagagagaaagaaagaaaggaaggaaggagaggagaggaaagaaagaaagaaaaagaaagaaaagaaaagagaaaagaaaagaaaggaagggaaggaaagaaaggaaaggaaggaaaggaaagagaagagttctgagacttgggcttgatgaaagacaagaaggaagaaaggaaggaaggaaggagagttctgagacttgggcttgattcccaccttgctatgtggtcatgggcaggccagtgtccctcttcgatatttaggggccctctctttgaaatagcgcatctgacagccccctcactctgagggctgttggaaggatctgggacatctagagacatgaaaaacacttcgtagatgcttcacttccattcatcagatcctggatgagggcgtataactcattccacaaactattcatggggccagcacaaaccccgagcagcccacgtcagatggtgcagacagacacaggcagaagatcctgccagcacatgtacaatgggcgcacgtacaacagacgaaggctgtttcactaacccattttcttagatggagaaactgaggcccaagaggagatgtgatttacccaaggccacacacccggcaactggcagagccaggatttgaacccaggtctgagggactccaactttgcttccctttccactgcaccttgtctgttaatgatgatgatgatcacgttcctcttcctatttccatcaaggctgcagttgtcaagattttttatcttcctgggccttgtggacactcagatgcatccagaccaggtcttttcatggatggaggagctgtctccctccttaaaatgacttcccattgctctgtggtggaggggaagtagcaaatcatatagcctcagggcagagctcccacctgctgacaccaaaaccccactgcactctttagcctccttctcctttcccatttactttcttttcttcttctctttttttttttcttggagatagagtctccctctgtcacccagactggactgcaatagtactatcttggctcactgcagcctctgcctcccggatttgagtgattcttgtgcctcagcctcttgagcagtggggattacaggcacatgccaccacgcccagctaatttttgtatttttagtagagatggggttttgccatgttggccaggctggtctcaaattttttacctcatgtgatctgcccacctcagcttcccaaagtgctgggattacaggtgtgagccaccatgcctggcaccttttccatttgcttttccatcttccttttctcccctctcacagctctccctgtatctgtgtctccctcaccatgtgtccaggagggtggtaatggaaccggggttgaggagggcttgggatactccagctggggtaccctgtttccacactaacttggggagtgatattgagaaagttccttggcttccctggccagggaggggtcatcactgcctggaaggaattacaaacccccgcttggtgaatggggtcattgagaggttgcaatgggggcggggccaggcagagtggaggcaggaaggcaatggcagagagcccctgggcagatggactagagctaggggcaggttcattttgggaagtggagaccaccactcagtatttacccacaagtcctcccttggagtattttgtcaccctatttctcagagaaagcagccaatggtcagaggagccaggattctggtccaggacatttttctgaagtgccaggtactgcacgtgataggcaaaggtggttctcgccctggccctgatgcgcagaggctctgtgactttgggctgctcactccatccctctgagccccatagtttcacccataaaatgagtagaatgataaaatccacccaacaggggtgtttcaaaccttagggtttccaatttagtgtgtctttccttatccaagagctgggagaggaaaagggtggagactgggagactgctaaccctagacatcatagtcagaaaaccctgggcccaaatacccactttgttacttcctgactgagcctttcctctcattgaaaactgagccaggcacagtggctcatgcctgtaaatcccagctactcggcctcacttgagaccacgtgtttgagaccagcctgaccaacatagcaagatccatctccacacaaaaaaacaaaaagaaaaccaccaagaaccaaaacattagctgaacatggtggtgtgtgcctgtaatctcagttactcaggaggctgaggtgggaggatcacttgagcttggaaattggaggctgcagtaagccgtgattgcaccactctactccaggctggatgacagagtgagaccgtgtttcaaaaaaaaaattaaagaaaagaaaaaaataaacaaacagggatatcccaccttcctcccaaggtggagagcagagacacagcaagtgtcagcaatgaaggtgatactcagggaaggtactcaggacaagagggacttttggggtggggggagcagttggggagagtgaggacagcaggggagcccccttcctacacccacccctctgtctgctcccttttattatttctgccccttctctttgtaggcaactggaattattttggctggggtgagcagcacagtaagtactcagcctgattgatgttctgggagttacatgggaaggtgggcaccttggtgatcccaaggcccctccccactaccacacagggaagcaaggagcctgtgacgagcacgtgggggccagagggctcagcaagacccctttcaagctttcctgtaccctgttcattagtgcctgtcttgggaggcctgccatctgctggggagtgggcaccgtcattggggtggggtggggggggttagcctggaggagtggacatttagaccaacaacctgcttgtctccagctgggcactgtgacccccgcaccccactccgccgtataacctcacctcctctcctgtagcccctgccttttggtcttcctatcttccttctccacttggaaatgtgtccagtgtcactcagagggtagtgggtgggcggggtctctaacagaacggcaggccagggacctcagggagatgcacacagggacctcagcaccccccaggtccacccacactcacacctcaccttccaccttcatttgctctcccagggaataaggcaagccaccccctccctaaattaaatgtccattttccttttcctttttttttttttttttgagacggagtctcactctatcacccaggctggagggcagtggcacgatctcagctcaccgcaagctctgcctccagggttcacgccattctcctgcctcagcctcccgagtagctgggactaaaggcgtccgccaacacgcccggctaattttttgtatttttagtagagacggggtttcaccgtgttagccaggagggtctcgatctcctgacctcgtgatccacctgccttggcctcccaaagtgctgggattacaggcatgagccatggcacctggccctaattaaatgtccgtttttctacctaacagcggttcccaacctttttgacacaagggaccagtttcatggaagacaatttttttatggactggggttgggggatggtttctggatgattcaagttcactgcatttgttgtgcactttatttttattattattattattacattatagtatgtaatgaaataatgatacaactcatcatcatgtagaagcagtgggagccctgaacttgttttcctgcaattagacagtcccatcttagggtgatgggggacagtgacagatcatcaggcattagattctcataaggagcacacaacctagatcccgcacatgcacagttcacagtagggttcacgctcccgtgagaatctttttttttttttgaaacagagtcttgctctgttgcccaggctggatggagtacagtggcgcaatctcgcctcactgcaacctctgcctccgagttcaagtgattctcgtacctgagcctcccaagtagctgggattacaggcgcgtgccaccatgcccagctaattttttgtatttttagtagagatggggtttcaccatgttggccaggctggttgtgaactcctgacttcaggtgatccacctgccttggcctcccaaagggctgggattacaagtttgagccactgcgcccggccttctatgagaatctaatgctgccgctgatctgacaggaggtggaactcaggcggtaatgtgagtgatggggagcaactgtaaatacagatgaaacttcactcgctcacccaaccgctgcccacctcctgctgtgcgccccagctcctaacaggccacagaccagatccatgccctaaagagttgctccctttctcccataccccgcctcttctagagaaatccagtcctctattctttctttccttctttcttttttcttttttttgagatggagtcttgctctgtcacccagactggagtatagtggtgcgatcactgctcactgcaacctccacctcccgggttcaagcagttctcttgcctcagcctcccgagtagttgggattacaggtgcacgccactatgcctggttaatttttgtatttttagtagagatggggtttcaccatgttggccaggctggtcttgaactcctgacctcaagcaatcctcccgccttggcctcccaaagtgctgggattataggtgtgagctaccatgcctggccagtcctctattttgaggataaatctgcctccttctctctccttcaactggggagtccttcactccttcctcatatcctggtggacaaacctaactccaggaccagtgaaactgttgacaaacactttggtccaccacaatttatcaaaaacaagttggttaaaaatcaacttaggccagccacactggctcacacctgtaattccaacactttgggaggctgaggcgggagggacgcttgagctccaaagtctgaaatcagcctgggcaacagagcaagactccatctctacaaaaaaaaaaaaaaagggccgggtgtggtggcacgcccctgtagtcccagctatttgggaggctgaggtgggagggttgtttgagcccaggaggttgggactgcagtgagccatgattgtgctactagactttagcctaggcaacagtgtgagaccctgtctctaaaaaataaatagattaaaataaataaataaaatcaattttgccaaaatgaatgcttggcagacagggcaagctcgataacaaccaacttgccacaaacgaacagtacggtcaaaagcaaagatagaccaggcgtggcagctcacaccataatcccagcactttgggaggccgaggtaggcagatcacttgaggtcaggagttcgagaccagcctggccaacgtgacgaaaccccatctctactaaaaatacaaaaattagccaggcatggtggtgcatgcctttaatcccagctactcgggaggctgaggcaggagaatcatttgaacctgggaggtggaggctgcagtgagccgagatcgtaccattgcactccagcctgggtgacagagcgagactctgtctcaaaaaaaaaaaaaacccaaaaaccaacaaacaaacaaaacaaaacaccaatgcagctaaagctgatagataattgggtcaaaaaggaaagacaattgaaccgaaaacagaccgttgggttaaaacaaaagtggttgaaaatagccagaagcaggcaatttagtcaagagctacttagtagaaagcagagcctgggcaaaagcaaaaagaatccaactcaaagtaatttacccttcataagcagataatttgtcaggaaaaaaaaaaactgggtaaacatgtgcacagcctcatgcaatttggctggaaacatctcagcccggtcaaggacaattggatagaaagaatgctggccggccgaggtggctcacggctaatcccagcactgtgggaagctgaggcgggaggatcgcttgagcccaggagttcaagatcagcctgggcaatatagggagatcccatctctacaaaataataaataaataaaattagctgggtgtggtggtgtgtgcctgtggtcccagctactgtggaggctgagatgcgaggatctcttgagcccaggaggtcgaggtttcagtgagttttgatcgcgccactgcgctccagcccaagtgagagagaccctgtctaaatgaatggatgaatacagcaaaagtctgaaggtttcactcattgctctgagattttggggtctgggggttttttcatttttttacatcctcttccccttacccgtacttctcatgttttcttcatggactactttttctttttttctggatacagggtctcattctgacacccagactgcagtgcagaggcgtaatcatagctcactgctacctcgacctcctgggctccagcaatgctcctgccataccctcccgaatagctgggactacaggcgcccaccaccacgcccagctaatttttaaatttttttaaagagatggggccttactatgttgcccaggctgatcttgaactcctgggctcaagtgatcctcctgccttggcctcccaaagtgctgggattacaggcatgagccactttgcctggcccatggactaggttttactttacttttattttattttattttttggagacagggtcttgtgtcacccagcccctggagtgcagaggtgtgatcttggctcacagcaatctccacctcctgggttccagagattctcctgcctcagcctcccaaggagctgggattacaggcacatgccaccacacctggctaatttttgtatttttagtagagacagggtcttggtatgttgcccaggctggtcttgaactcctggcctcaagtaatctgcccgcctccgcctcccaaagtgctgggattacaggtgtgagccactgtgcccggcctttgctttacttttaaaataaagataactttatcattctttttagttaaaaaattaaaaagattgcattattgaaatcttttttttcagaaggtacagaaaagaataaagaagaaaatgtacaatccccaattatgccaccacccagacatgttgcttttagaattggaatttttttttttaggatttagaaaacaaactgttcttttttctaaggaaaccaaactaaaccaaaatatcttttagttcttattaaacatgaagtttggcaactctaccacattccattttagcaatagattccaagtgtgtggtggctttgccaagctaagaatctaatcctttttgaaaaagacagaaccatgtctcagcatcttcttggttcttgcatatttgttaagttcaggtctggggtcgtcaccctcagatatcaggaaatctctaagggttaaagagcgttccgtccactttgaactcctgatcttcttccaacttccccctgactgtctgtgtgactcctgttatgggaaactaactgctcagtggaaaaaaatcccatgtcattttcagagatcctgaccttcagcaaagttgttcttcacatttgagctgaaggatgccctctactctgtccctgttttcttcacattgtaggtcctaccctagcccctagactttaggtccaatttgacccacataaagcaaagcagggttttcacctcccttgttctgaagcctatatctctattaacatgacccacaattctttatccatactagtaaaaaattctcttcttcggtagcggcaccgtaagtctgggaaattgtattggctcccatcatgtgcactctctcttcctcaccctcttcccataccgcctctctcttccagacgatgaccccgacagtgcagtggatgatcgtgacagtgactaccgcagtgaaacgagcaacagcatcccgccgccctattatactacgtcacaacccaacgcctcagtccaccaatattctgttcgcccaccacccctgggctcccgggagtcctacagtgactccatgcacagttacgaggagttctctgagccacaagccctcaggtaggtgctgcggagtgcagcatgcatgtgggtcctgctgtgtctcctggagtggagagaggggtacggggctggacagagctggaggtggagttccagaagggcagaattcacccatccaggagggcagaattcacattttcttgtgggaattaaccatttttttctttttttttttcttttcttttttttttagacagagtcttgctctgtcacccaggctggagtgcagtggcaccatttcggctcactgcaacctccaccacccagactcaagcgattctcctgcctcagcctccccagtagctgggactacaggcacaggccgccacaccaagctaatttatttttattttttgtggagatgggggtcttgctccattgcctgggctagtcttgaacccctttttattcctatagcatcctcgaggctggccagggaagagggtctcaggcgctaagattggaggaggtatctaatcgggaaatgataaggttcgttgaatgactaagtgaatggttagaagagggctgagtggtggcccctatgtccccctgcctgtatttagacagagacagatattgctgttgacgttgagcacgatcctgggttcacataagcagcacataacagagggcctgacctggccagacagtggggggcatttgcacaagtaagtgatgtttcagtgggtaccagagggtgggtaggagtttgctagataaagcagacaaggaagagaccacggcaagtgcacaggtttatggtgttggagagacaacgaggtggccagcgtggccggaatggaggaggcggggagaagtggagggaggtatgcagggggagtttggagcgtatgggccacacagggctagcacagattttattccaaggcactagggagccatggtaggatttagagcaggggagggaggtgattggatttacaattccctgtggcttccaagggaagcaggaactgtggagacagcatctggtagagacagcagaggctggcctgggttggggcccggggtacggggaagtggatgcatttcccatactttttccaggtggaggacaggagacctgctgcggggctgtggtgatggcgctgaccctgagttcccagcacagtcaattgcctgttccccacagaccgcaaatgccacaaaagtgggaatttttttttttttttttttttttttgagacggaatttcgctcttgttgcccaggctggagtgcaatggcatgatcccagctcactgcaacctccacctcccgggttcaagtgattcttctacctcagcctcccgagtagctgggattacaggcatacgccaccatgcgcagctaatttttgtatttttggtagagacagggtttcaccatgttggccaggctggtcttgaactcctgacctcaggtgatctgcccacctcagcctcccaaagtgctgggattacaggcgtgagccaccgcacctggccaaaagcggggatttttgtcttttctgatcatggctgtgttttccagcccctagagcaggacctggcacatcgtaggtgctcagtcggtgatgagtcaatgcctgtgtgactggggctcaggtgggcagtgactcggtaccccagtccctgaaccctgttccatccccacagccccacgggtagcagccgctatgcctcttccggggagctgagccagggaagctctcagctgagcgaggacttcgaccctgacgagcacagcctgcagggctccgacatggaggatgagcgggaccgggactcctaccactcctgccacagctcggtcagctaccacaaagactcgcctcgctgggaccaggatgaggaagagctggaggaggacctggaggacttcctggaggaggaggagctgcctgaagatgaggaggagctggaggaggaggaggaggaggtgcctgacgatttgggcagctatgcccagcgtgaagacgtagctgtggctgagcccaaagacttcaaacgcatcagcctcccgccagctgccccagggaaggaggacaaggccccagtggcacccaccgaggcccccgacatggccaaggtggcccccaagccagccacgcccgacaaggtgcctgcagctgagcagatccctgaggctgagccacccaaggacgaggagaggtaacaggacggggccaaggggccagaggggctgccacaaggtcacagggtcagcagggctatgatggggtcagcgtggacctgggaagttgctggggctgaagttgtcacaggctcttgggtttcttaaagggatcagaggtgacagggcagagtagggaggtcaaagagggttcaaggggccgtgaaggagacttagagtttgtgatcttagtggttgctggggtcggagaggtcaagatcctgggcaaatggggggccagaggggctgggctggtgaaaaggaagccgaggaacagtgaagtgtcacagaagcattgggtgtgtgggaaggggtgaggggcactgaggtgggccaggggactcacgtgggtcctaatgtctctgaggggtcagagataccatggggagctatgcatcacttgca

SEQ ID NO: 711 - DNA, 32744 bp, Homo sapiens
  source 1..32744: mol_type = other DNA
ctgcgagattctgtgccccttgtcgggccgcttgtttggctgctgccgtcacctcatggcgacgcgggtagaggaggcagcgcggggaagaggcggcggcgccgaagaggcgactgaggccggacggggcggacggcgacgcagcccgcggcagaaggtcagtcagggggacgccctcgttgttgtcgggcccgggggatgtttgggctccctttttcagggtccacctcttctctctccctggttacctatagccacgggacgaacatccggtcttcttccctcccgggggtgacgacagtgggagcaggtgggggggggtgggaccgcgatggatggggtgggaagggacgacggttggggtttggcggcgcgcggcggggaagccgggagggagggcagggggcgcacgcggttctaagggagaaggggtgcgaggcgggggtgcgccaggtgtgacagccacgtgcggccagcaccgcggggatccgggcgccaggcgttccttctcccagtcaccgccgtcaccgtgctcccggcgctgagcgccgccgtccgggggctcgctggggtcgtgggctcgccctcctggcgtcgggcaggtgcgcagggcgcgctgcggggtgcccccgggctgctcaggctaggctgttgcgcagtaagataaccgcgcgggagccggggtgtgcttggccccccttcccccgcccccctgcgctccccgccactgcgcgggcgggcaggcgagcgggtgagtgtcgcagggccggtgcgagcgggacgctcggcccccgggacctagaccccggggctccgagggcttggctgcacgtggggccggggatggatggggaggcgatgctggaggacctcggtcctgcagagttgggatatcgcatgatagctggtcctcccagtcctatttaccaccctcctcttttttcccctcttttttttctttcatttattatttttttaatttgatgagtggaaacttgaatgccttcccgaccctggccttgggtctttcttaatctgggaaacaggccggactgttccccttgccttacttgactcacgtcaaggagttttcagtccctccctagatacaggaaaattgagacctctttcagaacgggacaattccacttgttctggagctcagtgggtggagtttgaaaaagattgcacaacgaacggggtacagggttttcggggccctggaatggataattgcggggactgagactgggaaggtgggaaccccatctctttttttccttgcaggtgaacatactgaaacgttcgacttgttggatatcttgcttgatcaccgagggctatttaatattacttaattatgtatttgaacactcttaactcctgtatgaaattacgaaataatatttttctaatgcaattcataaacttcaaatgggagaacaaaggtccagtttacgtctgagcagagtgttaagaattagctttttggggcctgtttctaaggtcaggtattttcatgtttctgcatgacagtgttactacttctcaattacctctctttctttctctccctctctttgtattctaaaagaaagatccagtgcttgcaggactgaaaaagaagctgtggaccaatgtcctgtaagggattcaacaccatcactttggacacttcacttattccctaagggtggagtgccaatctcagtgtttgatttcgtaggttccccaggggaggaggactctgataaaaagccactgcaattgaggatataagttcccttttatgacactgggataaggacaaaaagtcgttgaattaggaactgaggtttaatcaactagcatttaaaataaccaagataggaggtaatgaccctttgaggtgcagagctctggttaacagctggataggaatagtcatgtgtgtgtctactcatttttgtttatgtacctcatactccattcttctttgcttatgctcttctgagcatctttttctttttgatttctaactgacagtgacggcattcaaatacatggtaaaatattaatctttgaattttcatttaacaaattgggtgaattatcttgtgtttgcaagaatcatttttaagccagctatggtggcatgcacctgtagtaccacctagtcaggagactgaagcaggaggctagcctgggccgcagagtgagaccctgtctcttaaaaaaacaaacaaacttgttgtgttttttttttttttttttgagtcagagtcttgctctgttacccaggctgcagtgcagtgatgcaatcttggctcactgcatcttccacctcgtgggttccagcgattctcgtgcctcagcctcctgagtagctgggattacagatgtgtgctaccacgcccagctaatttttatatttttagtagaaacagggtttcaccatgttggccaggctggtcttgaactcctggcctcaggtaagccacccaccttggccttccaaagtggcgggattacaggcatgagccactgcaactggccaaaaatttttttaaaaatcatttttacattacttcattgtgtcccttaattttaaaatttcttttgggtcactgacttgaaaaaatatttcttaattccagcttaacttctatcctttttttcaggaagcagaaatgtttaatgaattgagttttttgaaaatattgaaagaattaaaagaaaagtgagtgttttgtcattatctagttacattatgggacctgaagtgaggaacaattggagatgggcttttttggttcctggttgctttaaccatctgcctagtcactcgcgacctgctcagttaattgtggcattgtttcataactacaaccatttgaatggtctcttgaggtaaccttttgcttctaaaggtaatgttacagtacattactaggggtctcttcaggaattttctaaaactgtgctgatagtagccactagtgacatgtagctaaatttgttaactaaaattaaaattaaaaatttttttcttcagttatactaaccaagtttcaggtattcagtagccagtgtggctagtggctactgtattagagcagatctagaatattttcatcattgcataaaaattttatcagcattggtctaaaaagatgagtacacaatatctagtatgtcaggcattttttagaacatcaggctcattcgttttacttcctaaatccctatgtagaatttgctttataaggttgatttaaaaaaaaattaatagactttttttgggaatggtttttagttttacagaaaaattgagtagaaagtacagtttccatataccccctcacacacaccctttccccctattattattattatttttgagatggggtttcgctcttgttgcccaggctagagtgcaatggcatgatcttggctcaccacaacctccgcctcccgggttcaagcaattctcctgcctcagcctcccaagtagctgggattacaggcatgtgccaccacgcccggctaattttttttgtatttttagtagagacggggtttctccatgttggtcaggctagtctcaaactcctgacctcaggtgatctgcccgcctcggcctcccaaagtgctgaggttacaggtgtgagccactgcgcccgacccttatcccctattatttacatcttgcattagtgtgatacttgtgttaaaattcatgagccaatattgctatattattattgactaagtccatagtttacgttagggttcactctggtgctatatattctatgcattttgacaaatgtgtagtgacatggatccacgattatagtatcacacagaagagtttcacagtcctataaatcccttgtgctctacctattcatccctctctcccttcccctagactactgacagccactgattttattttttttaaattttagagttgggggtcctgctatgttgcccaggctggtcttgaactcctaggctcaggcgatcgttctgccttggcctcccaaagtgctggaattataagtatgagccaccacacctggcctgatctttttactgtctccatagttttgccttttccagcttgtctaaggttggtattttttttctttactagatttttgcttgggaatgttaaaaattatttaactactattaaactaatttttaggtccataaaccatgtggaaggataatacaaggtacctaggcccaaattaacaaaatcttgcatttacataatgccctgtagtttttatggcacatttgcacatacattaactctttcagcaccagtcagatgctgtggagaaggctgggcagctttcactgccctcatttgctgatgacaagctgctcaacgatgttaactcacttgcctaaggggtgaagctgagtctggaacccaatactctttcatctatactacagtaatgagtagtgtagtactgggtaaatctatggattttggagttgggactcctggctttctgccgcccatagctctgcaaccttgggcaagtttctcaatctttctaagcttcagttgcatcatctgtaaagaggggataatgctcatacctaccacaggggattactgtgaagaaggagttgatgggacacatttggcacagtgtgggatatgtagaattttacatggtttggaggggaggacatatggaagagattaatttctcttgcatttagggtgctaattttgtaaatccatcttccaacctttatattctctcctcttcccagaatctctccgtgatagacataatgaggagaaatcaggtcagggttgggcaagagtatgggggcaggaaaaagccatttcattaatcttgtttttctccccatttgccaacttgatgaacttccactcttctggtacagagattaagtaatgagaagtaaagtaaagtgatcttctgcttacaccattgttttctaattgtatcaccaagctttggtaaatttatttttttcttttactgggatcaaataggacaagcagtaatgagaacaaaccagatacagcatattctgctattcatgccacattttcatatcatattatgtcatatttattatgttattggaacgtgttttatttatttatttttaatttattttgtttttttgagatggagtcttgttctgtagcccaggcaggagtgcaatggcgcaatctcagctcactgcaacctccactttccgggttcaagtgattctcctgcatcagcctcccgagtagctgagattacaggcatgcgccaccaggcctggctaatttttgtatttttagtagagatggggtttcaccatgttggccaggctggtcttgaactcctgacctcaagtgatccacctgccttggcctcccaaagtgctggaattacaggcatgagccaccgcgccctgcctggaaggtgttttatgttattttgtgtgttatttatattggtcttgcctagagaagttttgtttaggaaggtatatatcaaatccaaatgacataaaactgcttttgtgggattcttcacaagattcactataatgggcttctattaaatagatatgctgtcacagttttacacttctcagagttatgtttcaaaggaaagaaatttggagacctcaaatttcatttgtgtttcatgcactgtgttagtcacttaaggtgtgaatgcattctaatatctccttaactctgcaaggtaggtggtatccccaggtatatagataaggcatctgagtcttagtcagaaacaaacttgcttgaataatagagcccacagttggtgacgtttgctagggttagtgtatagttgtgtaattgatagtatgacagatgtcttctaatgcccaggaagtttctgcttacctcgttaagttttaacttaatacctcaagaaatctgtttgcctgttcctcctcttcctgctgccctccccctaattcctcttgtttggttctaatgtgattatgaataacttttagttaatataacgggtgtgtcagtatttataaagtatgggccaggcatggtggctcatgcttgtaatcccagtgctttgggaggccgagacgggaggactgcttgaggccaggattttgagacccgcttgggcaacacagggagaccccgtctctatgaagaataaaaaacttagctaggcacattggtatgtgcctgtagttccagctacttgggaggctgaggtggaaggatcacttgagtccaggaggtcaaggttgcagtgagccacgattgggccactgctctagcctgggcaagagagtgagatcctgtctctaaaaaataataataataataaaaataaaaagtataggccaggcacagtggctcatgcctgtaatcccagcactttggaaggccgaggcaggtggatcacctgaggtcaggagttcaagaccagcctggtcaacatggtaaaaccccatctctactaaaaatacaaaaattagctgggcatggtgatgcatgcctgtaatcccagctactcgggaggctgaggcaggagaatcacttgaacttgggaggcggatgttgctgtgagccaagatcgtgccattatactccagcctgggtgacatagagggagactccgtgtcaaaaaaaaaaaaaagtatacaataatatacaaatttaatatcatattcatcaacattgagatgggacatttctagaagagggtagaaataggtaaggtgacctttaagatccattaagaccctgggagtacatttttatgtttgaatctacctcctagttgaaattctgttggcacttataaatacttacattttattacttgaaggaaaagatacataaaataactggtgttttcctcctatgctatcaaaataattgtattagcatttattgcttagggtgttgatttgcattctgtgttgcatttccaaaacgtccctagaatgacctctgttatctcctacttcccaccttatagtctgtcctgagtaatatttactggctactttttttttttttcatgtttcttctttccctactctcaaggtagtagaatggtttggcaagaaagatgtgccagtagcttagaaactcatttctttatgggtcttttggattgcaaaatgggccatattaaaagtgagaatgaatgcattttgtaaaatatcttttttttttttctttttttttgagacaggatctccctgtgttgcccaggctggagtgtagttaacgcttattgcagccttgaactcctggtctcaagtgatcttcctgcctcagccttcctagtagctaggactacaggtgtgtgtgccaccatgtctggctgttttttttcttttttttgagagacagggtcttcctatgttgcgcaggctggtcttaaactcttaggctcaagcatgattctcctgccttggcctcccaaactgctgggattacaggcgtgagccactgcacgcagcctgtaaaatgtcttcattcaaatattataacagttctgctatgtgtcagcagtttatatctatcagcaatttatacctattatatctacttatggcgctaagaaggtaagtactgtacatcccagtttacagataaggaaactgacaggttggcctccctatggccacacaggagatgctaagtggtatattcagagtttcggctctttgggctccaaagccattgtccatatttcgtatctctcatgttaacatttcctcagatagtaaaggtcacataagtgcccctagttgaaagtgagcaaaacatgctggtagataaaatagtaatagtaatagtttttgctaaacgaagacaaattatgagggatggagttggatgattaggggatatcgaaaattgattgtaatttggggaccagaggagttttgagcctcttaatatcttttgcttcattcacctaggccctaggttaaccttgagatttatgatttaggaggtatgccatgctacaacttcctgcaacagtacctccaagtgtaatttgaataaattgaaaggtagagagtttagagagactctctttaacttcttgtaaataaagttcatataacctggtgttagcaaagagttgaagtggtctggggaagtaagacaaataaaaagaaggcttgatgtttcagaggtgtatcaggattggtccatatggatctagggaaggatgacttcataaaattgggacagggatgttcacttaggtaacccataaaagtaaaggaccattttacatctaagagtctgtggcttaaagatgctagttgtgtgacccagcccctgtcctgtaaatagatcaggtccaagtatatttcagtggctttgggcattaaaatctttgaatgtcctgctcttttgctgctgaaataggtacttacactaatacaagtatctttcagattgcagatattcattgagttacagttttagaactagaagtgattttgcaaatcatggaatccagcatcctttatttatataaaagaataatttagctgggcgcggtggctcacacctgtaatcccagcactttgggaggcagaggcaggcggatcacgaggtcaggagatcgagaccatcctggctaagatggtgaaaccccatctctactaaaaatacaaaaaattagccaggcgtggtggtgggcgcctgtagtcccagctactcgggaggctgaggcaggagaatggtgtgaacctgggaggcggagcttgcagcgagccgagattgcgccactgcactccagcctgggcgacagagcgagacactgtctcaaaaaaaaataaaaataataatttatttttataaaagaaatagccacagaagttaaatgcaaaatttaatgcagtcattaacattcacttattaaaaggcaaatgatgtacacagtctaatatagatgttaccagtaaatgtacaatattagcacttatactgctaggttatgagactaaagaagctgtgtccaaagtagacctttcccggatccttttactcattcttggtttcttccccagtgggggagatcaggttccctcatcccttagtttagcactagtctgcctctcttttcttgtcatttacctactaatggttctgtgtgttctttgtgctcttacatgctgtgacagttactctggatcctttagctgcctgctcccaggtagtagttaggacaactcctagaacttaccctgcctccaatttatgatccctccttagaactccatcatttctctggcttcatttatttagtaatttgtttgggtaacatgccatacagtttgcccatttatagtgtataattcaatttttttttttttttttgagtcggagtttcactcttgttgcccaagctggagtgcagtggtgcgatctcggctcactgcaacctctgcctcccgggttcaaacagttctccagcctcagtctcccgagtagctgggattacaggtatgcgccaccgtgcccggctaattttttgtatttttagtagaaacggggtttcatcatgttagccaagatggtcttgaactcctgacctcaggtgatccacccacctcagcctcccaaagtgctggcattacaggcatgagccactgtgcccggcctcacttttttttagtatatattcagagttgtgtgaccgtcactacacttgttcatttttattattttttattagagacagagttttgccatgttgtccaggctggtctcaaactcctgggctcgagggatcctccagccttggcctctcaaggtgctgggattacaggcatgagccactgtgcccggccgcacttgtttatttttaacataacctgggaagagcatgctctttagagagtatgccctttacagagaaagacaaggattcagtctctgctttcctttcctaggttcctgaccgtggacatcgtacttaaattaccttatcactgaggctgcttgtttatcatacctgcctataagatagttctgagaattaaatgaggaagtagtctattaaatactgttacagaggcttctgaatgagccagagcaatgaaggtcaagggaaagtgtttataccagttgtccctcaccacccatttggattccactgattggcagatctgtcacttaacaaaaagggggaaagatgcctatttgttaggtgtagttgaataagaaggaagtggcactcttctccctgttctcctccctggtcccagggcgtattccctagaggtggatctgcctgcttattgctgccaagatgtggacccctttctggtcatggtttgacagagctggccttctagtctctctattcctgctcccaccacaaccaggacagcagttctcaaacttcggtttgaggatctttttgtacacttacacattattgacagtcccaaggagcttttgttcttgtgggcttctttacctaatttaccatattagaaattcaataaaaattttaacattattaattcacttaaaaaatgaaatgaggctgggcgcggtggctcatgtctgtaatcccagcactttgggagaccgaggtgggtggatcacctgaggtcaggagtttgagaccagtgtggccaacacagggaaaccgtatctctactaaaaatacaaaaattagccagacgtggtggcgcatgcctgtaatcccagctacttgggaggctgaggcaggaaaatcacttgaacccaggagttggaggttgcagtgagccgagatcataccattacactccagcctggtcgacagagcaagactgtctcaaaaaaaaaaaaaaaagaagaaatgttgtactctggttatctattgctgtgtaacagatcaccccaaaacttactgacttggaacatttgtgatctcacagtttcggggtttaggaatctgagtgtggcttagccaggtcctttgctttagggtttgtcgagggctgtagtcacctgaaggcttgactgggaaagatccacttcccagctcactcttgtggctgttggcaggattcaattcctcgtgggctgttggactgaggcctcagttcctcatgagcagttggccggaggccttccttggtttcttgccacatgggtctttctgtaagcatctcacaacatggcagctgcttcatcagagtgagtaagagagagtgccagcatgaaagagaaggaagttgcagtcttttgtatcgtaatcatagaaatgacatcttctcacttttgataaattctctcttcattagaagccagtcactagtttcagcccacactcaaggggaggggaccattgggggccatggcagaagctgccatacatgttaacataagtaacattttaaaaaaattaaaaatagctgattttccaaaatgttactggaaagagtggcattctttcacatttttgcagatctctataatgaatggcttaatagaagacatctgcttctgcattcaatctgttgtaatatgccctttcagcctaagtatatgaagagaatgtggcctcacacatgtatgtagttggaacagggaggagtattgtaatagtctttgtggataattgtggaaatcctttgattctgttggtctgtcttgcgtgtcaaatgggtctcttttccccatgtatcattttgtaataccatccattagtcatttcgaaaatattggttaactgaattgtgttcatcttccaaacgttggtacgttttggtatactatataaaaattacatttgttcattaatcaccactgatctcatcagaaaagtctttttaagtattgggaagctgtttagctcatggtggcagataattttcaaaaattctattttttgctttaaagctcaaattttatcattggcaacaagtactgttgtttgcttgccttgaagtggcaggctttcttcgtatattttggagaaaatatctgccaaatacccaggtctgaacaaacaaccatagtttgtctatttaaaacatgttccatagaaagagcagcaagttgggttcataattcaaacagctgcactcgtgcttttttcgaagaccaccagcatactgtggtggacagcaaaagtttttttttttttttccttagagacagggtcttgctctgtcgcccaggctggaatacagtggcatgatcatagctcactgcagccttgaactcctaggctcaagcaagcctcctgcttcagcctcccaagtagctgggactacaggaatgtgccaccatacaaggctaatatttttattttttgtggagacaggttctcactatggctggtctccaactcctgggctcaagtgatcctactgccttggcctcccagagtgctaggattacaggtatgagccactgcgcccagccagcatttccttttttttttttgagacggagtttcgctcgtttcccaggctggagtgcaatggcgcaatctcagctcaccgcaaccgctgcctcctgggttcaagcgattctcctgcctcagcctcccgagtagctgggattacaggcatgcgccaccacgcccggctaattttgtatttttagtagagatggggtttctccatgttggtcagggtggtcttgaactcccgacctcaggtgatccgcgcacctcggcttcccaaagtgctgggattataggcatgagccaccacacccagctgcatttcctttttaaggtggaataatattctaccttatatattaaccacattttgtatatccattcatctggcgatggatacttgggtattcatcatgattcttagctttagatgtggttctttaggacgtccccttatagaagcatcgacctccatgccaggcttaataaatgtaggtctgaaataatggcttcctcccctcacttcctactctgctccctggtttctttagctatacaatggggtaatgttcctactgtcttagaattgtaacactgaactaaataatgtatttaaaatgtcaggcattaggccgggcatggtggctcatgcctgtaatcccagcactttgggaggccaaggcgggcggatcacgaggtcaggagttcgagaccagcctggccaacatggtgaaaccccatctccactaaaaatacaaaaattagccgggcatggtggcgggcacctgtagtcccagctactcgggaggctgaggcaggagaattgtttgaacccaggaggcggaggttgcagtgaaccgagatcgcgccactgaactccagcctgggtgacagagcgagactctgtctcaaaaaaataaataagatgtcaggcatttagtaatgttagtttttttattcctttttttcactcagaacttagccttgaaggtattctgttagccatcttgtgtgttccatttatctcacatagtaaacttagatattgaccatgtaattccacttgggaataattatccatcatcaaatctttttttttgagatggagtctcactctagcccaggctggagtgcagtggtatgatctcggctcactgcaaccaccgcctccggagttcaagtgattctcttgcctcagcctcccgagtagctgggatcacaggcatctaccaccacgcccggctaatttgtgtatttttagtagagacggaattttgtcatgttggctaggctggtctgaaactcctgacctcaggcgatccacccaccttggtctcccaaagtcctgggattacaggcgtgagccactatgcccagccactttattattatttttaattttttatttttttgagacagggtctcactctgtcacccaggctggagtgcagtggcacagtctcagctcgctgcagcctccacctcccaggctcaggtgatcgtcctgcctctgcctcccgattagttgggactatacgtgttcaccaccacacctggcaaatttttgtttagaggcggagtgttgctgtattgcccaggctggtttggaactgctggactcaaacaatctgcccacctcagcctcccaaagtgctggaattacaggcgtaagccaccgagccaggcctggagaggaggaaacttttttttttttttttttttgagatggagtctcactctgtcgcccaggctggagtgcaattgcgttatctcagctccctgcaacctctgcctcccgggtttaagcgattctcctgtctcagcctcctgggtagctgggattacaggcgtgtgctaacacatctggccaagaggagatacttctgaaaaatgcttatttcttagtgtatttcctgtggagcagttcttggcttcagcaacctcagacctgatacggtttggatcttgttccctccaaatctcatgttatattgtaatcccagtgatggaggtggggcctggtgggaggtggggcctggtgggaggtgattggatcataggggccctcatggcttggtgccaaccatccccctgatagttctagcgagatctggtttttaaaaatgtgtgatgcccctgaccccttagctctcttgcttctgctctcgctgtgtggcacgcctgctcctgttttgccttccgtcatgaataagagctccctgggcctcgccagaagcgatgccagcgccatgcttcctgtacagccaacagaaccgtgagccagttaagcctcttttcttataaattacccagtctcgggcattctttttttgtttgttttttgagacagagtctcactctgtctcccaggctggagtgcagtggtgtgatctcagctcactgcaacctccacctcccgggttcatgcaattctcctgcctcagcctcctgagtagctgagattacagggacatgccaccacacctggctaatttttgtatttttagtagagatggggttttaccatgttggccaggctggtctcgaacttctggcctcaggtgatccgcccgcctcggcctcccaaagtgctgggattgcaggcgtgggtcaccgagctcggcctcaggcattcttttatagcagtatgagaatggcctaacacacctccctttccattacgcttacctgaagtctagtccccaaaacatccagatagtcaaggactttccccctttactcagtggtcaactgatttatttaaaggcaacctacctttctcccaaagatagtgatttctttagcgttatgatagattaattctccagctagtggggttggagggaaagagattggctattttctctgcttataaatgagtctacagtcattggtgagttctcctgaagcccatgtcttgcatgtattttattcttaatgttagtgttgcctgtgaaccgtgtgacagtaataaaaagcccaggctttgaacaaagccagactccctgtgttcagatcttggcctaaccgttgcataatcttgggcaaataagggatactttttattagtgatttttttttctttctttctttttttttttttttttttttgagacggagtcttgctctgtcacccagactggagtgcagtggtgcaatctcagctcaccgcaacctctgcctcctgggttcacacgattctcctgcctcagcctcccgagtagctgggattacaggcatacaccaccacgcctggctaattttttgtgtgtttttagtagagacagggtttcactctgttggtcagactggtcttgaactcctgacctcgtgatctgcccaccttggcctcccaaagtgctgggattacaggggcgagccaccgcacctggcctttttttttttttttagacacagtcttactctgtcacccaggctggaatgcagtggcacaatcttggctcactgcagcctctgccgcccaggttcaagcaattctcctgactgagcctcccgagtagctgggattacaagcacacaccaccatgcccagctaatttttgtatttttagtagaggcagggtttcgccatgttggccaggctggtcttgaactcctgacctcaggtgatccgtccacctcagcctcccaaagtgcacctggccccttttattagtgattctgaccgctacttatgttaaattggcttggtcgcatttcccactggcatagagcaaggcaaagggaaaagatgacatgaaataaggtatgacctcctgctgtgttcagattctgagcttgcgttagtaacggaaaagtgagtaagtatgatactgtgatatccaaccaaaatctcaacttaaaaggtcttttttaaaaaataaaagtaatacattcatacaataaaaaacagtgctttcagttttctgctcggagaaggccaagatgctttctttctttctttttttttttttttttgagacagagttttgctcttttgcccaggttggagtgccgtggcgtgatcgtggctcactgcagcctccgtctcccaggttcaagcaattccctgcctcagcctcccgagtagatgggattacaggtacctgccaccatgcctggctgatttttgcatttttagtagagatggggtttcaccatcttggccaggctggtcttgaactcctgacctcgtgatccaccctccttggcctcccaaagtaccgggattacaggtgtgagccatggcgcccggcctgctactttctttggttgtcccaaattggggttcgtcggacacccgctgcctccaccatgcagcctaagtttgacccaacaaactttgccttacagatgtggcacggatctttaagaactctccataaccattagagatcctggggactgcccagtctgtggattgcaatgttgatggctgtcactctcatgacatcataaatgacatcaacagtgatgcagtgcaatacccagctattttttttttttttttttgagatggagtctcactctgtcacccaggctggagtgcagtggtgcagtcttggctcactgcaagctccgcctcctgggttcacgccattctcctgcctcagcctccggagtagctgggactacaggcgcctgccaccacgcccggctaatttttttgtatttttagtagaaacggggtttcaccgtggtcttgatctcctgacctcgtgatccacccgcctcggcctcccaaagtgctgggattacaggcgtgaaccactgcgcctggccaatacccagctatttaagaagcacaaaggggccaggcgcggtggctcacgcctgtaatcccagcattttgggaggccgaggcgggcagatcacgaggtcaggagttcgagatcagcctggccaacatagtgaaactccgtctttactaaaaatacaaaaattagctgggcatggtggcgcacgcctgtaatctcagctactcggaggtctgaggcaggagaatcgcttgaacccgggaggcggaggttgtgatgagctgagatcgtgccactgcactccagcctgggcaacagagtgagactctgtctcaaaaaaaaagaagcacaaaggaaaatattccaataaaggatcatttgacagccaaaaagtaaaataaattaaggcagagccaagaattataaaaagaaaaaataattcttcatttccaacttctaggtccgcaatccacacaaaggtaattatggtgaacaattttggggatattcttgtaggaaaattgtatccatatattggcttatacagtgtatggatattttaaatttatactgatgtattcatcctgtactggccatttgccttttttcctacctaattatactatgtcggcatacgatctgttttattcctttgaatggctgcatggttttaccttgtatggttggccgttatttaaccagttccctattggtggacatttaggttgttttctggtttggtgagtaaccatttacacttgagtgagaatatctggaataaactcaaagcggtagaattgttgggtgaaaatgcatgtgagttcagacgttgatagagcttgctaatacctctacaaacccactctaccaatttagagccccccaccccccgccaaaagtatgttgagtgacctgtttgcccacaccaaggttgtttttttactcctttaaaatgtggtaagttaaagatggtaccttggtttgctttgcatttttatttgtatattgggcatttttagttctttaattgtgatctgcctgttcacaaacccttgaaaactgtgtctctggctcatctgtaagggcttcctgcagtcttttggctagtctgaaagtttttagtttttaaaaatttgttgtagatttaaggggtacaagtttcgttacatggatacattatgtagcggtgaaatctgaagtctgggattttagtataaccatcactactaggaatagtataaattgggcccaataggtaatttctcatacctcactgtccgttgtccctccaccccaggaatttcaaagattttaattatttagcaaactaatctccagtcaccaccactgcccaccccccccccccgcttttttttttttttttttttttgagagacagagcctggctgtgttgcccaggctagagtgcagtggtgcagtcatagcttgctgatcttccaagctcaagtgatcctcctaccttagcctcctgagtagctgggaccgcagatgtgtgccgtcacacacggctaatttttttatttttagtagagacaggtcttgctgtgttgcacaggctagtcttgaactcatgagctcaagcaatcctcctacctcggccttgcatagtgttgggattacaggcgtgagccaccgcacccgccctccaccccctttttaaaaatagcttctgggctttttgctttcctttgaaaggccttcttggctactctgtgctactgagatagccctgctctgtctatggagcagtcattctgctgtatataatttcataaaaataaaaaaaccaaaacaacaacaacaaaagaaaggccttcttcatgccaaggttatggaaaaaaatttgttgaggacttcttcaagctctttgtggttttaatttttcatgtttcaatcttggtatatctggagggggtaagacaggatacccctttgttcccccatatggtttgggagatatcataaatcatttatttcctttaccaatttgaaatgacaccatttttaatgtagtaaattcccatgtatgggtctgtgtggtctgtttttaaagacagtgctatataacttaggaagtctcagacaagtatttcatacctaaaatttacataagatctaacctttgggagtttatatttggaaacattgagaatttattatcttaaagaatataggcatattgtagagacatgtataccaaaatctaattatataatagtgcacagtaatattttatctgttaaaaataaatatcctttcatttcatttctttgttctaacacagtaaaacagactactatttaaggaggcattgagttatgtaatacatattttaaaggctttgatccaaaatggttaaaacaggaatttgagataaatgattgataaagcattagctgtgaggaaaactgtgctatccacaatagttctttggaagattaaaatagccttagtgtatacactgttttaaatgacttatacaaagctgaagtcatttttgtaatttagccacatgacaatgtaatttttataataggcttgtttgtaaaactttgtatttggaaatgtgaaagcccctcaaaatactggaagcgtttaggaggaacgtttatgttttataaaaccaaataaggccagtagctgatgccccgagagtatggggtatctttgatatctttcactatttcctcatccatttctgcctccactgcccctcccagggcagagcgagcatggttgcacatacactgttgtccgtacactcctggttgaagttaacaactcttagggtaaattattagaaacaaagggttggaaagatttttagagataatttggtttatcctaaaacacaaaattaaggccaagcatggtggctcacgcctgtaattccagcactttgggaggctgaggcgggcagatcatctgaggccaggagttcaagaccagcctggccaacatggcaaaaccccgtctctactaaaaaatacaaaaattggccgggcgcggtggctcatgcctgtaatcccagcactttgggaggccgaggccagtggatcatgaggtcaggagatcaagacgatcctggttaacacggtgaaaccccatctctactaaaaatacaaaaaattagctggatgtggtggtgcgcgcctgtagtcccagctactcgggaggctgaggcaggagaattgcttgaactcgggaggcggaggttgcagtgagccgaggtcgtgccactgcactccatcctgggggacagagcgagactctgtctcaaaaaaaaaaaaaaaaaaaaaattaggcgtggtggcacacgcctgtagtcccaactactcaggaggccgaggcaggagaatcgcttgaacccgggaggtggaggttgcagtgagctgagatagggccactgcactccagcctgggtgatggagcgagactctgtcttaaaacaaacaaaacaaaaacaaaccacaaaattaaaaaacaacaaactaactccaattccttaaataatcacttcaaattatttgaagctgtccctacccccaaattagacatgtcttacctccctaaatcccagagttaatccctgctaaaaattctacgtatctttcatgatgttttctgaatgcatattggtatttctagtgtgctgtgtatttttagacatttaatttagatttattttgtaactgcgtcagagatctgtttgactttgaacttgcattttccaaagctgatttataaagtgagggaaacagtgtaatagagagaacattgactcttgagtttggtggacctggttttgaattttcccagccccttttactgattttaatatgattttgagcgagttacttaatctcgtcaagtctcattttctgtacctgggaacaataaggcctgtatctcagtgaggcagggaaggttaaatggggtcactttgagaatacctcacacagtgtcagcctgaggtgctaaaggttccctttacttatttgataagttcctcctagactgggaatctgaggcaagctaaggatgtctgtctaggaaaatgcagaaatacacacaacttttcccaactgctccctctgaaggtccactctagctcttgctggcaaggactgggtaatttgtgtcctctgcatatgcctggccctggtcaaaggtgtttgagctcatgtgagcaagcagtagttgaaataattaggaagtgaatgtgggtgttggtagaagggaaagaaacctaaaaatttttttttccttctggttttaatttccatgttcttagttttgaatgttttgatccaaaaagctattacaagtagttgatgaatgcagagtacttcctcatgttcatttgcaaaaatttctatgatagttgttctttgctcctgtcatttattattgataaactggtgacctcccattttgaaggcatctcttggtcagttagtgagtcctcttagctccaagtattgagacagtggaaggaagattgcgaaatatatcctttgaccggaggggagtggctagggtgagggattattcgtgtttaaggctcttgtaaacaaacacttgtagcacagtgttgtgcttctctaaaaggtacacatgctgctcacaagatgcagatgtcatagcttttgtgtcttgattttctgcagggaagggttctaatagaaatccatctggaaactactcagtgttggtttcattttcatttgagattggaatttaaataaatatttcctccccttttgtttttccaaataaggcactatattagagctcttcattttgctgttaaaaaacatgttaaagctcttgtaaaggtaactcatggcacctaacttaaaaggtgaaaacacgcctgctgtgaaagtcttgtccccactcacccagtttgtctccagtaatgtttctttgtgtccggccagagattggatatactactctgctcatacatttatacctcctcaagcctcatatcatggcatatggtatgtgctacagggtattttgctttttcccttattaacgtgtccttaccagtaattatataaccaccttattcttttttttaacagtatggtactcaattggatggatgtacagcagtttattcatccggtctattatttattgatatttaggatatttctgaatttttgctaccataaataatgctgcataaataaccttatgtattatgtcattcacaaatgcactggtatatgtgtaggaaaaactggtaagaaatgaatttgctggatcaaagcatatgtgacttgatgttttctccctccaacatcttatgaaaaatttcaaagctactgcaaagtttatactaaacatcaattttgccaccacctagattttacctttgacattttactctggttgctttttcagttatccatttatctgtcccttcacccatgaagccatcagaagtacattatgtgctaagttttagcaaatgcatgcagctctgtaactgaaatccccatcaagatacagagcattaccaacaccctagaggttcccttgtgctgctggttcccagtcagtcccttccccgactggactccttggtggttaagtcaatttatcctcccaccaggaatgcttgagaatgccccccaccccctcccacagtgttgtcgaagtttttgatgtgtaaaatgatatcttatagttgttttttttttttttttgagatgaagtttcgctctgttgcccaggttggagtgcagtggcgtgatctcggctctctgcaacctccgcctcccgggttcaagccattctcctgcctcagcctcccgagtaactgggattacaggcacccgccaccacgcccagctaatttttgtatttttagtagagatggggtttcaccatgttggccaggctggcctcgaactcctgacctcagtttatctgcccgcctcagcctcccaaagttctaggattacaggtgtgagccaccgcaccaggccaagatattttcttccagtattttcttccagcacttctctgtgtgtgtatgtacatacacacagatggttcctggcttactgtggttcaacttgcattgttgactttaggatggatttatcactgtgtaaccccaatgtatgttgagcagcatctgtatacatatatatagtgcgtatacaaaatatacagtacattctgttttgtaattcatttttgtacatcgtattttgggagcatctcttcccattattaaataggcttctctaagatggctgggccaggagaaggatgtttgaacagtagtagacagaaggtagttatgaagcagtatatttttgtggttaagagcatggactcagaagctagactgctagagttcaaatctttgccctgcagtttactaactgtgaccttaggcaggatacttaactttacatgccatagtttgctcatctctaaaatggagaaaataatagtgcctacctagtggcattgttgtgaggattaagctaattaatataggaaagttcttacagtagtgcctggatgtactatttactgtataagtattagctactactactattatttatataagagattgatccaagaaaaggcatccagaatgggcatcagagagagaagacagagtaggaaattgtactgggcatatgatatagaattctctggttgaggagatgaggtctgagaaatcatttacaatttaataaagttattggcctaagaatttgcttaatattcaatagcccaggtacagagcctcaagtaggttgttaattgaatagtccttgtggtagaaaaattggggcctgctatttcaagagtatttgtagactgtggtttgaatcaagtcctgttggaactgggcttattaataaacaaaaagattttgtagagccaaagtatatctttcattagcaaatgtaaaaaataccccaataccacatcaaaattagttgtacaagagagaagggaaatgtaatactgtcttgcttctaatgataaaataaaaatagtggtattttcattttttgtttgtttgagacagagtcttgctctattgcccaggctggagtacagtggtgtgatctcagctcactgcaacctccacctcctgggttcaaacaattcttgtgcctcagcctcccgagtttccaggcacgtgccaccatgcccagctaatttttgtatttttaccagagatggtgatttgccatgttggccaggctggtcttgaactcctgacctcaagtgttctacccacctcggccccccaaattgctgggtttccagcatgagctaccgtgcctggccaatagtggtattttctataacttgtgtattaatgcctaggttctttttgtggattgttttcaacagccatttttgcctctgtatgctccccatcagttggcatttgagtaccatttgtgcataataagctattgctacttaggaggctgtatgtatcaaatacgtgatattgtaatatgtgataagagttcagaggcaggagtgtctggaaagacaaaaaaatcggaagtattaactacaaataggaagtgatgacatacaattaaaaggaaaataggtgatgtggtgtttgtgcactatacagattaatttaatattcttctttatgccatatgacaccacctattattctgcattacacaatagttttttggccttccttattttttttttaagatggagttttccctcttgtcgcccaggctagagtgtaatggcgcgatctcagcttgctgcaacttccgcctcccaggttcaagcaattctctggcctcagcctcccgagtagcaggcatgcaccaccacgcccagctaatttttgtggttttagtagagacggggtttcaccatgttggccaggctgttcttgaactcttgaccttgggtgatctgcttgcctcggcctcccaaagtgctgggattacaggtgtgagccaccgtggccggcttttttttttttttgagacggagtctcgctgccaggctggagtgcagtgacccgatctcggctcagtgcaacctctgcttcccgggttcaagtgattctcctgcctcagcatcccaagtaactgggactctacaggcacgcaccaccacacccagctaatttttatgtttttagtagagacggggtttcaccatgttggccaggatggtcttgatcatctcttgacctcgtcatctgcctgcctcagcctcccaaactgctggaattacagacgtgagtcaccgcacccgaccctgagtctttatattgtctttttgctgtatagtggtaatagtaaatgacctgtatacttttttttctttcttttttttttttgagatgtagtcttgctctgttgcccaggctggagtgcagtggcacgatcttggctcactgtaacctttgtctcctgagttcaagcaattctcctacctcagcctcctgagcagctgggattacaggcgcccgccaccacacccagctaatttttgctttttttttttagtagagacgagatttcatcacattggccaggctggtcttgaactcctgacctcaagtgatccgcccgcctcggcctcccaaagtgctgggattacaggtatgagccaccgtgcctggccaatgacctgtatacttttaatctgaaaacaagagtaacttttaattaaatctccttatgatgttttgaaataagtgaatatttattcctttttttttttttttgtgagacagagtctcactctgtcccaggctggaatgcagtggcgcgatctcggctcactgcaacctccgcctcccaggttcaagtgattctcctgcctcagcctcccgagtagctgggattacaggtgtgtgccatcatgcccggctaatgtttgtatttttagcagagacagggtttcaccatgttggctaggctggtctcgaactcctgatctcatgatccactggccttggcctcccaaagttctgggattacaggcatgagccactgcggccagccttttttttttttttttttttttttttttgaggtggagtttcgctcttatgcccaggctggagtacaatggtgtgatctcggctcaccacaacctctgcctcgcaggttctagtgattctcctgcctcagcctccctagtagctaggattacaggcttgcatcaccacgcctggctaattttgtatttttagtagaggcggtgtttctccatgttgatcaggctagtctcgaactcctgacctcaggtgatctgcccacctcaacctcccaaactgctgggattacaggtatgagctactgcgccagtcctattcctttcttccaagttgaggtaaccatgaagtcatctgaaaaatatatctggtaagggacttgtagctagttacataaagaactcttacagtccaacgataaaataacaacccaattaaacatgggcaaaagatctgaaaaacattcttcaaagaaggtatacaaatggccaataggcacgtgaaaagatgttcaatattgttagtcattagggaaatgcaaatcaaaaacacagtgaggtaccatcacactcagtaggatggctataaaaaaataataataacaagtgttgctgaggatgtggagaaattggaacccccatacacttctagtgggaattttaaatggtaccagtgagctgcgcgtggtggctcacgcctgtaatcctagtgccctgggagactgaagcaagaggattgcttgagcccagaagttttgagaccagcctgggcaacatagcgagactctccctctacaaaattaaaaaaaaaaaaatgagcctggcatagtggcacatacctgtaatctcagcactttgggaggctgaggcgagaagatgctttgagcccaggaggttgaggctgcagtaagcttgcattgtgcagtctgggcaacaaagcgagacctcgtctccaaaaaaaaaaaaaaaaagtacagttgcttgggaaaatagtcttacagttcctcaaaaggttcaacatagagtggtcatatagcaattccactcctaggactgtaccctggagaagtgtccacacaaaaatgaatgcattaatgttcatagcagaaatagtcataattggccgggcgccgtggctcacgcctgtaatcccagcactttgggaggccgaggtggtcggatcataaggtcaggagatcgagaccatcctggctaacacggtgaaaccccgtctctactaaaaacacaaaaaattagctgggcgtggtggcgggcacctgtagtcccagctactcgggaggctgaggcaggagaatggcgtgaacccgggagatggagattgcagtgagccaagatcacgccactgcactccagcctgggcgacagagcgagactccatctcaaaaaaaataaaaagaaatagtcataatagccaaaaattggaaataacccacatgtccatctgatgaatggataaatacagtgtagccaaaaattggaaataacccacatgtccatctgatgaatggataaatacaatgtagtctctctgtataagggatattattcagctacatgcatggaatactgatacatgctataacatggaggaatcttgaaaatttgccacatgcaaataggcagactcagcccggtgtggtggttcacacctgtaaacccagcactttgggaggccaaggtaggtggatcacctaaggtcaggagttcgtgaccagcctggccaacatggtgaaaccctgtctctactaaaaatacaaaaaattagccgggcatggttgcgggtgcccgtaatcccagctacttgggaggctgaggcaggagaatcgcttgaacccgggaggcggaggttgcagtgagcggagaccgtgccattgcactccagcctgggtgacagagtgagactccatctcaaaagaaaaaataggcagactcaaaaggccacatattgtatagctccatttatatgaagtgtgtctagaatagccaaatccatagaggcagcaactagattagtggcctggtgctgaaggttatagaagcattaagggttgatagctaaggagaactgggtttcattttcaggttatgaaagtgttgcaaagttgactgtggtaatgtttgcacaactttgtgaatgcagtaaaattagtgaactgtacactttaagttagggaattgtatggtatgtgaattatatcacaataaaggtgttacaaaataaatcgctaatggaactgaaaaactacaaatgaaccaatctcattcctcaagtagcctcagggttaggacaggcctcagggttttcttggtgaaaattatttatgcttccccttttttctacgaatttcatgctcactgtatttttgatacggcttgacaccatattttctgggattgtgtgggttttattatcattaagtgtctgagaaattctgtgttagagataagcagtcttctattctcgtttgtttgtttttgttgttgttgttgagatggagtcttgctctgtcgcccaggctggagtgcaatggcgtgatctaggctcacggcaacctccgcctcccaggttcaagcaattctcctgcctcagcctcccgagtagctgggattacaggaatgcaccaccacgcccagttaaatttgtatttttagtagagacgggacttcaccatgttgatcaggctggtctcaaactcctgacctcaggtgatccgcctgcctcagcctcccaaagtgctgggattacaggcgtgagccaccgcgaccggcctgtagtgccattcttatacctaatggttttcagggaatagatttgaaactattattattttttttgagacggagtctcgctctgtcacccaggctggagtacagtggtgcgatctcagctcactgcaacctccgcttcccgggttcaagcgattctcctgccccagcctcccgagtagctgggattacaggcatgctccaccacgcctggctaatttttgtatttttagtagaggtggggtttcaccacgttggtcaggctcgtcttgaactcctaaccttgtgatctgcccgtctcgtctcggtctcccaaagtgctgggattacaggcgtgagccactgcgcctgtccgaaattttttttttttaattggggaaaatggtattgatagtactcactttttccctttctattgcttttgtgtaaagggtctctttatatatctatgcgcccaattagtacatgacatttcaatatttgattagaggcgaaactagtagttacatgtgaaatgtagcattgaattatcactttgcatctgttctgttaataataatactgctatagtatgttatttgggtatattaatgatttttttttcttttttttttgagatggagtctcgctttgtcacccaggctggagtgcagtggcgcgatatcggctcagtacaacctctgcccagctaatttttgtatttttagtagagacggggtttcaccatgttggccaggctggtcttgaactcctgacctcaagtgatttgcccacctcagcctcccaaagtgctgggattacaggcatgagccaccttgcccggcctattaacaattttaagaagtttctacagtagtgaaatcttacaaatgatttttcctaaaacttgattgtgaatcctctcccaccccaagagacgaagtctcactatattgcccaggctgtcctcaaacttgccttagcccccaaatagctaggactacaagcatgccccacgatgcgtgccattgtgaatttttgaaaaactttatgggttacgcttgagaaacattgctctatagaatatgatacatatggaagtgaatttttaaaatcttttcaaataacttaagagtttcagtatttgtaagttttttctatctgaattaggcttagagtgtggcatcaaaccataactctgaaatagataacccatttccccttaatgtgttaattttttttaagatgtcaaagtattacatgcacattattttaaaagtgtcatgaaaagcagcatatctttaatctctcttcttagaggaaaatatttgttttggttcctcttacttcttgaataatgtataaattgcaacttttaaaataaactttactgaaatacataaattgagaaaagtatacaaatcataaatgttaggcttaatgaattttcacaaagtgaatgtgtcacctcatctagaccaagaaatagaacactacaagcaccccaggaggccccacccccaatggtaaccgctatcctgatttctagcaccatttattagcttgccttgtttttgaactttatacataaatgatttcctatagtagatactcttctagcacctttttcacaacataggtctgtgaaactcatctatgtggttgcatccaacagtagttcattctcactgctttgatactatagtttatccattctgctactgatagaaatttgggttgattccattttggagctattaggaatagtgctcctttattcttggactttggatacacatatgtacacacttgggcaaaatcccaggagtagagttaactgggttagaaggtatccatatattgccaaagagtttttcaaagtgtccttgccaatttgttcttatgaaagcacagtactggatttatcaacattagactataaaatataagattttattttccttaacctctctatcccctcctactttgatattttgagttcttcagttgcacaaaatgattataacctaaaatctcaaatatctgctctcccataaattttgaaagtagcttttgtccatttgtgataagagaaggatactaaacacctcctcacctcaacagtattattcagaaaaggaagaggccctctttcatacagagagtaaatgcacagaatttaaatttgtgccacatcatgaccaggaagtgttcacaaggggaaaaaactcaaatagggttaacaatgtgatagaagacagttactgacataagaataacatactggaataaaggcatctttaccatgtgtattagggcagggatagctgcttaaaatatcagtctcaaaatttccatggcttagcatgagagaagtttatttcttgttcacctatagtccagtgtaggttttctttgtaagtagggtggctttcctgtatgtacataggatatggaggcctaggcttcattaatcctgtggctctgccatcccttagggtcttggagatgtctgcattttgccagagtcggggagagatggttgagaaagaacttgtgcttctaagaataaaagtcttggacagtcgtgtcctatgcccacattcagttggtgggaacttcacgtggaagtcgccccttggtgtaagggggctggggaatagtccctggctgggcacttgtctcatagtgccaactccacaggaacttgggggagcatggggttttgatggatagctagctagccatccctgctgtactgtctccttgaggataagattagaataattaatattcattaactggggacagtttcacttctgttaaggtgctaattatgttaagtggtgaatttttatgtggaaatcaatttagatttataactaaatgggtttcttgcctcctttggtactgaatagttgtgtgattcattttaactaatttccttatactttatagttaggtcacctctcagtgaaacctagaaagtaccatatttacatcaattttgcaaaccactaaggaagaaaaaactatcaggctatgatgttccattgcttgtaaacattgattacattagatttaaccccttctccatcttttttctccttctcctttcttctagtttgaaattggcacaatggaagaagctggaatttgtgggctaggggtgaaagcagatatgttgtgtaactctcaatcaaatgatattcttcaacatcaaggctcaaattgtggtggcacaagtaacaagcattcattggaagaggatgaaggcagtgactttataacagagaacaggaatttggtgagcccagcatactgcacgcaagaatcaagagaggaaatccctgggggagaagctcgaacagatccccctgatggtcagcaagattcagagtgcaacaggaacaaagaaaaaactttaggtaataatccgttcagtggttggacgtttcacatgctaatcattttacttgtgttttctgcagcccagataattttgaacacagccactttagaggtgcttagccaacacccctagtgtcttcggtgaggtcagtccatgtgtctgctgcagttatgtgcaggaggcgaaaacagcagagaggacgcttagttttttttttttccaaataatcaagaattggctaattaaaaaattttttttgtagagacaggttctcactgtgttgcccaggctggtctcaaactcctaagctcaagc

SEQ ID NO: 712 - DNA, 32744 bp, Homo sapiens
  source 1..32744: mol_type = other DNA
agtcagggtcaagtggtgttagcaatcacatcagcaccaaatggctcaggatgctctggtttcaaagcttataaaacagagggtgattcccttgggactcactcagctcggctccgaaaagcaaaggccagaaggcagcagtgagcctgggtccctgctgtgtagggagactcaggggctgggaagaaggatggaatcagaaatgctgaaggtttacgtgagctttgcaccgagcgcctccgaaccactgcctctgggctcaacagaacacaggggtaagtctccatgaacttctcaaaaagaaaactgggaagctttctgtcttgatgatttgaggacccactggtttcagaggtgccacatttggaaccagatccgagtctttaaggtttgtgttttatttgttcatgtcaaaatgtggcttcctgcttctaagaaaagaaactcaggctcataaaagcagcctccaagggcttcttggacctcaaattgcgctttcaaaatgtggtctgatgggttcagtgtaaatgcaccagaggcatgtgggatccatttaccttaaaatacacttgggcctaaaaattaagagaaaaacagtccagggcaaagtgtatactgcaaagtcaagctccaaacatttgggaaacagttctagaggctgctggaaccccaaatgctacttgctttacctaccccttgggaatcatcaaatgttattttttgtacaagactggggatgagcctgctctctgatcccagtgctgtgctctgctgtgcagttctaatggggcaggctgtttcctggaccctgagatctccaggctccctgtgcctattccttgtcagctttgccccatccaggagctgggctgagcttgtcaagtgacctctgctttgtaccactccatcaggtcctgaagaatgaagggtaccaaggtggaaggggcgcaggattaagagtagggacgcctgcaaaagctctcgtgttaccacctcatcttccaactttcatgtgggtgaaaacgttcatcctaaataattgcttctaattctgaagttttgtgattccttgaaatgtactttggggatgacagccagcatttccatttcactgcaatttcagagttttgcagtggtttgccaatcataacactttctaattggcacaaaatccacctacctgttgcctctcaggcttgggtaacatacttcagacactttcttaggtaagtcttggcccttggggtgttatttgcccagatggtaaaaacatttaagtaggtctgattatttcattttcagtggtttcaacgcatttttgtggcctgggtggttactgtaatgtgcccaagttgttcattctgagccaacggggtcacccacagagagaagacttgacaaaggaactctcctctactcccctcttgccagatgaaatattgtttgtaaaaggtctttgtcttgagaggatcacatactttggttaagaatccactttggttaagccggttgctggattcagagacatgaacaggatagacagtccaccgataactttataataacacctttttaataacacctttaataactttttaataactttaaaagttattaaaactttataaaaagttaatctaaaactttaataactttttaataacacctttagccaggggtttatgcagcatacacgacaaaactggaatataatgtggtaggtgcagtagcagggtccacaaaattattttagttagattttaaaaattattaagacatctgttttatacaagaaaaattcttatgaaaatttatagacatgtgtttgaaatttagaataagttgcctctgcttagaattattaagtattttgaaaggaaacactaataaatgctagataaactttttctttttgatacaatttgtgtttactttaaatgcaatatttttttatctgaaaaaaaacgtgagcacttagcaaatctcttcattattttggaattggccaatgcttataaactacaaacaaatatacagattgttccttgtgctgatatttttgttttcaaatttcttagtcctgttacttaacaaatggctgatatctttgttggaatccctgaacatagctaaaagatgtttttttaaaaaaaaaaaaaaaaaaaaaccaagaggctccaagacaaaggagtgcacagaggcaaaatttatcactttggtagcttttgcggggatgaaagcctccagttagaatgtttgacttactaatggttcttaataatgaatcttagccagcagccatcagagaaataaatcattaaagtgagaaaataggtgtcaacacaggagtgatctactgaattgccattttggtgttctttcagaggggaactgcatgttgacaggcagtgactttttcaggaatttgggatattcttgagcaataatgtaaagatgaaggcagggggctgggcacaggggctcatgcctgtaatctgggaggccgaagtgggcagatcacttgaggccaggagttcaagaccagcctggtcgacatggtgaaacccgtctctactaaaaatacaaaaattaggtgggagtggtggcacacacctataatcccagctactcagagactgaggcaggagaattgcttgaacccaggaggcagaggttgcagtgagctgagattgcaccattgcatttcagcctgggcaacagagcgagagtctgtctcaaaaaaaaaaaaaaaaaaaaaagatgaaggcagggtaaattgtacacacatacaaatacagtgccattatgatacctgtttattaggatttgagaaattaattaacattgatttaaggccacagagtcattggatcacttgattctgtttaaaagaagttttcgtttgggtaggattgttttggtttcaacctgttccttttttctaagtcttcgtttccaaccttctactcagaatgaatttgacattgcaaaactggcttgtatcacgatagctactatgctttaaaatagggtaggtgctttggcatctttggagttttaacgtatgaaccattcataatttatccctaaagcgagtgtggattgttttatttgtgaacgttctacatcccctgatctgaaaacttaccaaaaaagccaacattgagatgaagcagggaccccttttaggggcctccttccccctactcccctacaagcatggaaataaagcgaaatcttgagttcctgcaagggaaattccaggcacccagctagccctgagaagtaaggagcaacttggtaaacaagaaggtaatagtagcttaaaacaatagccagggaagttagagttgcgagatgtttggttccctccagagactaaaggtaacatcttaacatatatccctgagttgtttttcagaaacccagacccccaccaaatggatcccctggcatgcagacctcaggtaagggagaactgaggactgaattctgaggactgaattctgacctctgttctttattctgggtttttttctttttttttgccagggtctggctctgttgcccaggttggagtgtagtggtgtaatcatagcttactgcagcctcgacctcctgtcctgtgatcctcccatctcagcctttcgaggagctgggactacagctacgtgccaacatgtcaggctttttttttttttttttttgtagagatggagtctggggtctcgcttttttgcccaggctgatcttgagctcctggcgtcaagtgatcctttcaccttggcctcctaaagtgctaggattgcagctgtgatccaccatgcccagcctccattctttgttctaaactttttcctgaagggcctggaggaagtcacacccacaggccagaccccacattcttttctgctgaacccaagtcttttgacaaagcttcccttctttaaccaattgcaaatcaaaaaatctttgaatctacctatgactttgtaagccccccacttcaagctatctcacctttttaggccaaaccagtatataacctccatatatcgatttacaattttgcttgtaacttccactttcctgaagtttacccctgcctttagaaacccttgcttataagccattggggaggtcaggtcttaggcgtgagctgcccaattctccttgcttggtgtcttgctaatcaatccccttccttctcccactataaaactttggtatgaacgtttggccttactgcgctgggcaagcccactccagtttggtttggtaatgtcactgaaaccaagctatgatatttgtagataccttagatctttatggtgatgctgtaacctcatagttttgttttgtcttattttgttttgttctagttccacatttaaaaagatctcatggaggtttccgccccaaggctggcatttccacacagccagtctttctaagccagtctttccacaccagtctttctaagaagcagccctatgggccagtaacagctacatttttgttgagcaaaggcactattaaaatcatcatctacatctttcagtaaaaccataattagtcaaggagatcctttcaactcagaagtcatacagagaggtagactcctttgcttctggcttttgttgttgttgttgttctgttggaactttggaatgtgttatcttgttagggccttcaatgagattaaagaaaagaatccgggacatcatttttcaccataaaagctgggacttttcatcagtaggtggtgaagagttcccaggtgtactccaagaagttttggaacaataaggcacaccaaaaagaagcaggctgcctcatttggagtgactgcagggatggggcaggccgcagggaggagaggaagtggctccttccagcaaatgctgagccaagttgccttgtgctcctcacacttgatctgcagcagcaggaggcttccatcctaggaaattgcctcgaggctgctcttgatcttaattttcaccagatttccctcagccccactccgctcctttgctggttcaacaaagaccaacaaacctgttgacggctgaggtgaaaaccaagaggaaggcagatatgggtctgattctctttctcttcctcttcctcgcctgctcaaactctgaatccatgctttacttctttttctctttctttttttttttttttttttgagacagagtcttactctgtcacccaggctggagtgcagtggtgtgatctcagctcactgcaacctccatctcctgggcttaagcgatcctaccatctcagcatcccaagtagctgggaccacatgtgcccgccaccacgcctggctgatttttttgtatttttggtagagatggggtttcgccatgttgcccaggccggtctcaatctcctgagctcaagtgatctgcccgcctcagcctcccaaagtgctgggattacaggtgtgagccaccatgcccagcctataatttaaattaagaccaattgattaaatgagttaaaattacaaaattgagttgctgagtcagatgcaatgcatatatatacacacacacatatacacacatatacatatataaacatatatatacatatatatatatattttccaacgacatggtttcactctgtcacccaggctgcagtgcagtggcacaatattgcctcactgcaacttccaccttccaggctcaagcgatccttctgcctcagcttcccaagtagctgggattacaaacacccgccatcaggcctggctagtaaaaataggatttcaccatgttggccagtctggtctcgaactcctgacctcaggtgatccacacaccttggcctcccaaagtgctgggattacaggcatcagccatcatgtccagctcctgtttacttctgcataagagctggtgacccctttgcttccctccacttcctcctcttgtttcttcccctgcctctcttctctctcttctttctttctctgcactggcccaccttcccctccgtctgttctccatcccaaagttggaaggcagtagtcagggttaggtcctgtccagtgaaagcaaagctgggtccaagggacaaagcacaaagctttttatgcattattacttcttctgccttaaattcctcttttcttctctccttagcacacagaagcagtctctagaacaactcttcctgagcaaagccatagctttttgttgttgttgttacttgccctcttcctgttccggctttaaaaaagaaagtatctgtatcaacttatgtgaacatggtactttcttgtggctgttcttctgaggattcattctctggtctttctgatttccagtctctccatcctagaatcaatttccttcattccagtaccccttgtcggagatccaggctacctccactcattcccaaacatggacttcaaaacatctttccagcactccttttgtcccactccattatggtatccagcggcttgacatgatgcttctgttcttcatgtaatctacagcagagaggctgggaaaaactgaagtttctttaaatacaggacagtgcagtctccagaggccagagcctctttgccagtcacaaagaacccttaattgccttgtaaaatgtagtccagccctcttcacagattcgcagattacagagttattcatccaaacaatttccacgtactgcatagagggtttcatggacagtagccttgattcagaccaacctgtatctctgcaaccctcactacagaccactttttcacagtggagttgctatttggctatggcttaaaggatgacccagaattcctcaagcatagaaagaggggaagggcagtaagaagaccagtgtggttggaacagaggatacaaggatgtgtgtgtgtatgtcaggaagggataaaagttgaggctagattattcacaagactattcacctagttgagtttggacttcatattgtgcaggtcagcatttcacagaagactagcccatgaagatgctaatcaatgctccaagatcaaggagctcacttgtttaataagttggggatttgaatgctgaatcccctttttaaagagtcacagttgattttagaaaactgaaggctctgagaagtcctgcaatgaaaagaaaacctgcttaattttgtataaaggttaatccaactttttttttttttttgcaaggaaatgatttccccccttccccagccccccataacaaaacttaacatctccaggaacaattttccttggagtctggaattgctgctgtctgctatgggaagctgtggtgaggttttaattttgttttgatttttaattagggaagacacatcatcttgttttctactttggaaatggtgtatggagggaggggagatgagaattaagaaaaataattgcagttgttcacataagagacattatttctaaagcgatctttctaaagagtaagactgactaggtccttagttagaaccctactgacattccctctgcccacaggttaagattcaaactcctgaataggattgacaaaaccttccgtgatctggttcctgcctgctgctccagttccagctcctaccactttcccctcctttagaccaaattcttggagaaacaaacacatccccaacaaaccagaatggcttatgtactccctccagctgctcctgtctgagctcttctcattggctggaatgcagttcttctctttgcccatttggcaaatgcctattcatctttccacagagatcagcctctctaggaactttccagagccatccctgacctctgtggtctgtgcagcccaccaagcccccacccctgtgtagagggagtcacttctgctgtattaccagtgcccctgtggtgtagtttccacctggggttctaaatgcaaactcctgcatgatactatttgtgtgttgttcataatgtagacttacagcctagcacagtgcctggcccatagtaggtggtcagtgtcaataggttgagtagaatgtgatgatgggaaaatgcagagaaggggaaagcttcaggagaagtggaatgggtggaatcaataggtcttggtgattgatcgggtacggaggcttagggagccaaggcacaccctgaggtgagctaaagacctcaggaggaggagttttggtagaggggaaaggtgaatgtcattttaaacttacttctttttttttaatttttatgttttgttaaggtaagatttacatacagttaaatgcatagatattaattacacagctggacaaataaaacatgctgaattgaagatggccacatttgggtgaaggtattgtgaagatggccagcagtgtgtatgaaagcacagagtctggtgctagagaccgagctctggggtccttgtgggaagtgacaccaggtgcagataaggtgaccccttgcggtgagaagctccaaatatcccagtatcccgaggtggctccagatactgggatatctggagctctctcactaatcactaggatgttttcatcttcgtttggctgttttctgcttttgttttggctgggctgggcttccctcttgttgtttgggctattaaaggatcagaaactatgctggcgagtagaagggatatggaatgggatggccacagttaattgggaacatgtgtagaggacccactctttgatctgcataaccacgcttatgagagcagtttcttcatccactcgcagggggtcagtccatcacttcctgagtgagtgacaaagctcctatccctggtgactagggccaccacacacaacagatgaggaaagaaattctaagataaacaaaaatgactcatagcataatatgaaaactgaaacgtgcattaaccaagctatctctgcatcctgaagcagcagagtcatttgctaatgaactcattaggaaaataaatgttctcagttggaggttagcattcatttaccccaaagtatactgcatttaattaaaggtacaggaaaaattttcctggccagaggagttacggtgatgtgacaggaagatccttgtctgaaagtctagacatctttggttctttgtccaattctctctgctgtgtgacctagggcaagtcatctggcctctctgagcctcagatccttcttttgtaacctgctgaagatgtcgatgtcaaccctgaatcctgtatttactcaacttctcaacaaatattcttggctgggagtgatggctcacgcctgtaatctcagcactttgggaggctgaggcaggtaattgcttgaggccaggggtttgagaccagcctaggaaatatagtgaaaccccatctttaccaaaaaaaaaaaaaaaaaaaagaagaagaagaaagaaagaatcagccaagcatagtggtgcatgcctgtggtcccagctactcaagaggttgaagtgagaggatcacttaagcccaggaagttgaggctgcaatgagccatgatggcaccaatgcattccagcctgggcaacagagtaataccctatctcaaaaaacaaacaaacaaagaacaacaacaacaaaaacccaaatattcttcaagcttctactctgttctgggcactgagctggttaaatatccctgcatgaacacttttttgctgtggtccctggccaaacagctgttactcccaattcaatgcatggctctgttctttatgccaaacttggaaaagtgggctgggtaccactctggttctttagaggaattttgttgtggttcaggcgactgtacatcatagtgcgaatctgttgccaatagtggaaggaatgctgggattggagttgaatagacctgaatttgggtctcaaccctgccacttactagtttgtgacctggactaatttactgaggttctttgagcctcacttttctcatctgttaaatggggataataataccggctccagttgttttgagaaataagatgatgtgtgtggaggtgcttggtgtttttcttccctattgtctgagaaagcagcaggtgcccctacatctttcttcacgtcaaatgttccaaatacccaagccattcacccaagccacgactcggtttataaacggttcctgggacttgggagactaaagtggccccacttcggcattccctcagtgctttcctctcgttgcatttcagaaagatttgaaatcagacccatttcctggccactttctacaaactgggaatggagtttctagcaacgttttccctctggaaatacactatgggtgtaccagggaggtaattttaattatattttgttgagaatgcttccagaaaagtatagaatatagtccatgacaactgaaaggatctagaaattctgtcatgagggccaactgcctttacaatgaggactctgaggttggagtggggcattgactagctccagggaacgctgggagtgagtggcagattggcagatgggtctcttgcttgatctacctcttggtctagcgctctttctcataaaccacaggatctttccaatcctaaactgttgtaactacttgtatctcaagtgatctgaaaacagctggcttaatccacggggctctccttgccttttggcgttgaaggatatttcctaatttagaccacttctgtgacctttcaaggtaaggtaaactctggtggcactagggacagcaaaaaacaccaagaggccagggtatatggccactcaaatgagagtttagatagaataagcatcactggaaaaggatagagagaatccagaggccttggtggaagatggactgctgcctcttcggtctaaaggcctgtggtgcagagagggctcccatatggcactctgggctttgacattaattagggtcatgaacaaacagccacagtatagacagctctggggacagcggaggaaattgttagtgataccacatgaagcctcccaggcacagctctccctcctccctatcttccttttttcttccctaaacttgtctttttttttttttttttgagacaaggtctcactttgtcacccaggctggagtgcaatggcacgatctcacctcactgcaactacttctgcttcccaggttcaagtgattcttgtgccttagtctcccgagtagctgggactacaggtgtgcaccaccatgccctttctgtattttttagtaaagacagggtttcaccatgttggccaagctggtctcaaactcctgacctcaagtgattcgcccacctctgcctcccaaaatgctgggattataggtgtgagccaggacgcctggcccttaaaagtatcttgaatactttttatatgccagattctgtgttagagccttaaccctgaccccaaagagctggtgctttttcgtttccttgtctctcttcaaaaactcatctgtctttcatgctcatctctccaccttttgtccttccttctgcttcatctttttttctcctctctcatatgtctttgttttatttgtaacccagaagtcagctgtggtttcctggcctttgagatctagatgatattactttgaacttactccctgccctgtagaattccaaagtcttcccacacttctaaaaactcccataggaagtggagggagcttttattttcatggtcacttctgactccaacctcggcacttcccttgaattcgtttggttcacaggccatttttaccactgccacaactcccctcgccccgcaccatccaatcgtcccttgccagttggccctgacatgagattctacctcttactcaatttccataaaaacaaaaataaacaacactgtagtgagttgaatagtgtcctcctgaaaatatatgtctatgtggaacatcagaacgtgacctcatttggaaacaggatctttgcacatgtaattagtcaagttaagataaggtcatgctggaatagggtgagctctaaatccaatgactgatgtccttacaagaggacacacaaagatacacagagaagagggcggccacacaaagatggaagcagagttggagttttgaggctataagccaaggaacttcaaggatttacatgaccaacagaagctaggaagaggcagggaaggattctcccctagagcctctggagggagcatggccctgctgactccttgattttggacttctggcctccagaactgtgagagaataaacgtctgttgttttaagccactcggtttgtggtacattgtacagcagccctagaaattaatacagtgcatttgcatttgggtctgtaggcaaatttcctgaggatttgggagtggaaggtgggacagaagcgaacctgcttttcagccctccatccctgccgttccactggttcccacttcaaccacccatccttcctttcccctgctcaacttgtttcttcatctcctctttctacacagtccccaaactccaaattcatcctactctattatgcagaactccagctcccaaactcagctcccagcccattgttcaggtcagaacccctccagatcctcagctgcacaaaaatacgttgcaaggaatagcagcctcctctcagaagggagaggtgagtttaaaaagctatccctatccctctttggggaggactggctccttctctatttcctgtccttcagtctagcagaggcaatggggtgggctgagccaggctttgctctcccctactcctcagaatattcagggtatggattgtggaagtggagagggacctgtccgtctgtcagttagtctagactgataagactgtcccctgtgtctgaatgcttccctgggtgcttcaaggagatactaaaggaatacaagaggttgtccctccctagaggaacactccaaagacaacccttagtctttcttctttaaaaagctttgttcagtttgtttggtcttttgcatcttcaaataggaatctcttatgttttaccccctcctcctcctcctcctcctcctcctccacctccttctcctcctctccacctcccctatctcctcctccttcccctccccctctcctatctcctcctcctccttcccctccccctccccctcctcctcctcctcctcctcatcttatgtgtagagcttttaaaagttctgtcacttgctattttattttatttcttatcctcgtacatttctaagacccatgggtaagtatttttccttccagtttctataggaaataaggaaaatcaagcccagggtaaagtaagttgcccaagattatctgtgtttaagccacagaacttgccctaaactctaggccagtaccctgtctgcaaaccctatggctttcttagagtggtcagaagctgtgcctttagcctggaaaaacctatttaacttagatcagccatctcctgttagagctagagctgaagtttggttccacttcaaaaccacgctgtgttttaagacttctaacctatttttaaatttaagtttataaatcagtttttaaaactctgtattttgactctggattcagagaaatattcttactaggttacacgaatattttgaaactcagtacttacttttttttttaattcaataaaagtttgcacaaacaatgcatcccacaggagaagcttatgccagatcccagatgtttaacacgtttgcttcagatattaagagttcatggcctcttgtgcttgttaaaccaaaaaatgcaagcccatagaaatgatttttaataactaggagtgctgcaaggtcaggctgaattctgggcaactgcagcacttcaataacttttttgatcacagattgtgtgtgtgtgtgtgtgtgtgtgtgtgtgtgtgtgtgtgtactttaaaaaaaaaaaaaaatccaagcagagaattcagtgaagggcagcatgaactcttacttttgactcaatttcacttcaattgatacatgcagaaatgttcaaaaagttccttttctaattctgacatcaactatctagtttgtaatcacttacctgggtctgccatgcaatgaaccaaccatctactattgagtcttggggttcagaatgccattatcgcagtgaacatctactggggactgactgtgccaattattatgctgtgtatatatcatttaaccctcatacctggcaccttcactcctacaccctgagtcccagccaccttcctctctcaccttcattataggcagaatcagttacctggtccctctgccttcacctctgcccctgtcccttccattctattctcaacccaacagttggagtgatctgtactaaggtgaaatcagttcatgtcatttctcaactccaaactctccaatggcttctcagcctatttagagtagcagcaaatgtttaataacagccatgttgtgtttttgttgtcgttgtttgtttgtttgtttgttttttagatggagtctctctctgtcgcccaggctggagtgcagtggcgggatctcagctcactgcaagctctgcctcccaggttcacgccattctcctgcctcagcctcccgagtagctgggattacaggcacccaccaccacgcctggctaattttttgtatttttagtagagacggggtttcaccgtgttagccaggatggtctcgatctcctgacctcatgatctgccccctctgcctcccaaagtgctgagattccaggcgtgagccactatgcctggccaactctaccccatgttcttctgccctctcttcctacccttctctttctctttctcttgctccagtgggtctggccctctcactgttcctcaaacatgtcatgcaaatttcttgacatggtatggtttactggtcaagctaagattaaagcacacacattatattacatctattaaggtaggaaagtgggagatcatttgctttaaacaaccagttagtgatctattggtgggggtaacaaaattcaaaaattcttgatactctattctttcacaacaatctttgctttaggaaatgtgatcaaaggcaggtttcccgattgaaaaagttaaggctagtgaggcagagcatttttttttttagacggagtttcactgttgttgcccaggctggagtgaaatggcatgatctccgctcaccgcaacctccgcctcctgggttcaagcgattctcctacctcagcctcccgagtagctgggactacaggcatgcaccaccacacccggctaaggtttttgtatttttagctagagacggggtttctccatgttgttcaggctggtctcaaattcccaacctcaggtgatctgcccgcctcggcctcccaaagtgctgggattacaggcgtgagccaccgcgcttggccgcatttttattccaatagagtatgcctattgctgagagactgtctgttttcacaagtacaatgttaaggattgtgaaatttacattatgggaatctagtacctgtgattaacttattgaagcattgaatgagcaatgatacttgaaaactaaggccatcttgaatagttagaaaatgaatcattttgggaaatgtacttcagataattcagaaaatactttttgaagcactaaacctttaaataactttagttattttgatggatgctaaaaataaagtgtggaccactttttgtcttagtagctagactccaccacgtatagagttttacttcatgatgatccaggataaacattggtggcataatacagtgtggaggtctgtttgcccatatgctgaatggcaccaggctagtgtgcttcttggatctgcatgtcttctttgaataattttacataggcatttgggaagagaaaaagaagttataaataggcaattttcagcctgagaattttgtgagagcctcagccattgtgatacttcaaagggacaggtaagtttatgtgctaattataagtgaaagagccttaggtgatttttaaaacttccttcttcattccgacgctacggcaacagcatcaaacagctctagagcactggccacttacagaacttgggaccagacacaccttgacactctatttagaccacacagagggagaacaaccaaagaaaggttggagaggtactgtccacaaattccactcactttacagcttgtttataggaagctctgttcatgacactgaaattgtcattcagcccaagaccaacgtaagttgccagtgttaatatttatacacaccctgtattattgtaaagtggtcttcattatataattcgcatttaaatagtccttcagaacagtggtccccaatctttttgcagcaggaccagtttcgtggaagacaatttttccatggactaggggtgaggggatggttttgggatgattcaagcacattacatttattgtgcactttatttctattattattacattataatatataattagataattatacatctcaccataatgtagaatcagtgggagccctgagcttgttttcttgaaactagatggtcccacctgagggtggtgagagacagtgatagctcatcaggcattagatatttttttcttttttttccaagatggagtcttgctctgtcacccaggctggagtgcagtggtgcaatatcggctcactgcaacctccgcctcctgaattcaagcaattctcctctctcagactcctgagtagctgggattacaggctcctgccaccacacctggctaatttttgtatttttagtagagaaggggtttcacagtgttggccaggctggtcttgaactcctgacctcatgatctgccggccttggcctcccaaagtggtgggattacaggcgtaagccactgtgcctgggcaggcattagattctcataaggagcatgaaacctagatccctcacgtgcgcagttcacagtaaggtttgtgctcctatgagaatctaatgctgccactgatctcacaggaggcagagctcaggtggtaatatgagtgatggggagaggctgtaaatacagatgaagcttcactcgctcacctgctgttcaactcctgttgtgtggcctggttcctaataggccacaggctggtactgatccgtggcctggggtttggggacccccgctttatagtgtatgcttttgtgttttttctttcattcaccaaatatttgttcagtatgtactatactgtcctaggctttaaagtagacattagaaatgcaaagatgaatatggccccatccctccccattttcttattttgattatcatcatgactctgagaggttgctagggcaacaattataattatccctttttttttttaggaaagagattgaggctcagggaggctcttgcactgtcaccatgtttaaaaagtattaatgccagaacttcaactcaggttttctgcctctaaatcccattttttaaacccaatctttttttttttttttttgagatggagtttcactcttgttgcccaggctggcatgcaatggtgtgatttgggctcactgcaacctccacctcccaggttcaagtgattctcctgcctcagcctcccgagtagctgggattacagtcgcatgccaccacgcccagctaattttttgtacttttagtagagacagggtttcaccatgttggccaggctggtctcaaactcctgacctccggtgatccacccatcttggcctcccaaagtgctgggattacaggggtaagccactgtgcctggcctctaaaccccatctttaatgccataaacaaatactcagaggcaagcaattaaagaaaataaacatttatgcaaatcatagtcgaataaaaatgctaaagactcagttccaaagaatcttagagggacacagttttctgagtactcatattaaatctcttgtgtttaagtgacaagaactaaacatgtattaacttaggcaaaatatattatttatgggcttatacctggtgtgatttgtgtactagtactaggggaaaagtagaggtgaattcaaccaagaatgcaaccaagaaatctaatgcctttggaatccttcaccatctcttatctttacttctctcagcacatcaacttcactgtcttttattatggattgacctgttctacctgggaaacgtggccaccaaagtgtcttgtgtcactataaagaggactgttttttttttctagttacagttttaaaacaaattctagggaaggattttgattgaccgccttgggttagataccatctcatgaaccaatcaactcttactggggaagtgaaatagtgggaaatcacagcagccacgcaactttggaatggaggaagagtggtcctcatgatgagactaaaagcagatgtcgactctgagtctcctacacttaattcacacaaatgttttttcaggaaatatcctattaaatttctggaaattaaatgtttgctgaactccactacactgttgtgctgtgtttaaaggtggcagcacaaggtcaaaggtagaaacaggaaaaagccacgtagtaaaactaaggaatcctcattacttttagtgacatcctgcccagaaagtgaaaaaggaaggcaggatttgcagatggcccaaagcggtgaaagcaaaatagtgaatgttggggagatgatgactatgaagagctaggcatacagcattgcagcaacaaatgatacgaattttcaggcatggctgtagtcatcttggaaaagataggagtaagagtacagaaactcctggagctcaagaggttattaatcttctggtctactcccttcatttttcatgtgagtagacggatccagggagaagtaatcttcccaaggctatcataaagccttagctatttcattggcaaaaatgggaaaaataatgacaccaacccttacatatgtcaggaggtttttcttcagagagaaattggaataaagttaccagaagttggatagtgcattttcctcccactaggctgacacttgcaagggagctggaataaatacgcagatggctgatgaaggtaagacaggtaacaaaaatgggagatgccagaaaaggggataaagggaaggtctgcagtcacatgggtcttgaaagtagacaatctgtatcatgctagaccctcgactggcttacccaggatactcctaatcctgtgggttttctcttagttatgtgcccgggctggccaccacctgagggttttctcatttacctgtcccttctttcagatatcttaacttggtgaagcgactttcccaacatccattctatcccataagcagcagccatgtggtttgggaaattggtctcaatttaagggataggcctgattagtcaaaatgatatcttatcctctttgccagtattggttcaaaaataagcatgtgacctaattctggccaaagggataagaggtttgctggcttcttggaaagttactttctcttaagagcattccaggggaattcattctattctcttcacctgaattgaaggaggagggtcttcccctggtagccattctacaaccacaaatggaactagatttaggatgaaacttacataatgcagaacagagaaaagggaaggaaaacactcaatgctaaatggttgaattgcaaatcaatgactctgaaggctgatctatctttggatttcctcataggttaaccatattagttatctattgttgtgcaacaaacctttcccaaacagtggctcaaaacaacagcattttatcgttatttagtttatgaatctgcaatgtgggcagggctgagtgggaaaggcttatatctgctccacaaggggtcaggtggggaagcttagccaggaccagggggatccacttccaagacggctccctcacaaactggaaagtcaatgctggctcagtcagatgtgaaggtcatgggccttattcttttctacgtggccctcttcatttgggtctccacaaactgtgtgggcttccttagagcatggtagctggattccaagagtaagcacacaaagataactatgtagaaactgcatcaccttatctgacctagcattggccatcacatagcatcatttccaatctactttgctggttgaccagtcactatggttagcctagatgcagttcagaggacacaggttccagcttttgttgaaaggagtttcaaagaactgtggacgatttaaaccattgcagaaactaaaacatttccttttttttttttttctgagatggagtcttgctctgtcacctaggctggagtgcagtggcgtgatctcggctcactgcaacctctgcctcccgggttcaagcaattctcctacctcagcctcctgagtagctgggattataggcgcccaccacaacgcctggctaatttttgtagtttttagtagaatggtgtttcaccacgttggccaggctggtcttgaactcctgacctcaggtgatccgcctgcctcggcctcccaaagagttgggattataggcgtgagccaccgcgcctggcctccttgtttttatgaccattcgaattgggttttctgttatttatttggggctgaaagcatcctttttcatgggttttctgtttatctggggctgaaaacatccttgttgatacagttagtgtcacctcagccatgggcagcagaatgtccttaacgaacagccctcagtcacaatgccaattgtagcaaagttaccagtaatttgttaccagtaatttaatacaaaggttttgcaataatttattttttgttcttttcaaatcacagcagaatcaagcttaccacaataatagcagaagagtcatttatttaaattcaagtagaattctctgaatgggagtaaagggatggaatcaaagcgaggatgctccacagggcacgtgggagctttactccaggttgagagctgttgggctggatgcctcttttggtaagagagttggaaacaactttagagtttcgttgctgtggctcaaattctttttcttctccacataagctcctgtgaagccagtgcagccgaggacttgtcaccaggcatttgataatctctctctagttttgatggtctttcggtggacaagggaagagattaaaaaaaaaattcttcttgatcttctgtcttggtcctctccacgatgaactctacctaaatacaacaaatcattttttagtgtccactgtgtttttagcactctgataaggccattgcagatagaaccccaataagatgttactgtaagaatctagaaaataagtagagggcagttggagagcaatgggaggctacttaaaatccaatcctaatgcaggtgtgacagtcttatgaaagaaaggagagaaaaagctgagcgtctatctgttggatttcagggtacttccctgcccagaggtgcagcagcagatcccttgaccctcttctccccagctacctctgaagtggaccagggtaaacatctgatcaacgggtgcccaaccatagactagccagcaatttgtaccttgtgtgtggcctgactggaaaatatgagctgagcaaatcagattcctctcccagaaaactgggaagggagaagcacttacttctaaggtggtggctcctgagcccagaggctggatagatataccattgaggaagtaattagagaatcaggtgtagactgcagctttgagagactggtgactcagataagctgattgggatgtgcaggtgtgcaaaaagaagcagtcttcatggaatgcgaggctgaggggtgtctgggctaccttaggtcctgcactttctgatgcctgcttgttcagttctctgaatatgttcccatatatgttcccttacccaaagtaagggtaggaatagaataccattccctgccttttacttgagctaattggagaggttttctgttacttgtaaccatcagaattctgtccagaacaagtcaaggacccacagaagagatgacaattccaatgggctttgagtaaggaaacaaccttaagtctaggctttacaatttaccaactaaatctgtgacttaacaaaaggagcttgagctttagagtcacacatagctttgggttcaaatccaatctgtaccattacttctttgtgatcttggagaagttacttatctgtaatgcctagataatgcctactaattcttaaatggttgttgcaagaattagactagacgtataaacatatttatttatttatttatttatttatttatttatttattttgagatggagtttcactcactctgctgcccaggctggaatgcagtggcaccatctctgcttactgcaacctccatctcccgggttcaagtgattctcctgcttcagcctcccgagtagctgggattacaggtgtgcgccacgtcacccggctaatttttgtggagacggggtttcgccatgttggccaggctggtctcaaactcctggcttcaagtgatccacccccttctcagcctcccaaagtgctgggattacaggcatgagccaccgcacccagccaatgtatacacacttacttatatggaccattaacacagtgtttggcacgtagtaggtccatgaagaatgacagctattgtcatccccaagtatgttgatgtactatttggatgggagaaaggaagtaatctttgaccctggtccctgccagtaacataaggtggctttttttttttttttttttttttttttgagacagagtctcgctctgtcgcccaggctggagtgcagtggtgcaatatcggctcactgcaacctccgcctcccgggttcaagcgattctcctgcctcaccctcccgagtagctgagactaaggcatgtgccaccatgcccagctaatttttatatttttagtagagacggggtttcaccatgttggccaggatggtcttgatctcttaacctcatgatctgcccgcctcggcctcccacagtgctgagatgacaggcgtgagccaccacgttgggcccataagatggttttgatggaaacatttttatatttcccaacattttaagagtggctttatatattggggtgtgtgagtctgtgggcatgtgcgtttgtttggcaaggatgttgtttggctcttcctcccccgtttcctattgaagttgtattcactatgtcattgttattaatcaggcaagcaatatgagatgaacaggagtgatgagttgctcaggctgccaaacaagttcatgttttgtaggaaacgccaaattgtttcctggggggatgttacttaggaatggaagggtatgcctctctggccctcacagaccctgtcccctccctggagtgctgtcaactctcagggcaatgggataactctttaaaagccactttatggagctgccgcccaactgtgctggaaatatatttgcatttttttttcctttcttctggtaaaaatgtaacccacgtcaagtaggaaatggattacagagctcccacatttcctcaaaaactatcccaacatcattagtcccttcataagctagaagggtggaggaagatagtgaaaggctgggagtggtggagaaagagggaatgtctgaaaaaaaataggattataaagcattttgagcccctccctccacttctaattcatagagagactaacgtgtaaactaataaaccaaaggtcttaactaaaggcttaaaaaagatgtccttgaatattgggttcatctgccaaccacatttattcatgaattatctttatggatgtggagtgggtttaaaaacagatgaggaaagctttggcgtcctaaaactccctggggattttgctgggcgtaggtgttttcctaaaactctgatgaaagcagaagttacaaatgataggcttcgaatgttatttcacacagtgattttgagtggcatgtacaatcactaatattcagcagtaactttctgaaaagttgttaaatctttctcatctctgttattaaaaaatatttagattttatatctaacccaaaggacagaaaatttcaagtgaattgtattgagggtgagaaactgaatcctctaacttactattggctaaattggtgctgcccagtgacttgagaggggagtcctgggcacattggtctggaactctggggtcatgatggggttagatattctccattccagaaaatcatggtgggaggacatgtcaggtaactatttctatgtaacaaatattcccaaaatgccatggtacaaaaaaaaaatcatcttttatttctcacgcttgctgggcagctggggattagctgttctcagctgggtttacctggcatgactctgctttagggtgtcttaccctccttggagcagctggctggcccagggaagtcttctagcattggtagaagtacaagaaggcaagcagaaacacatgaagtctcttaaggcctaagtgcagaactgaacacgattacttccatttcattctgttgaccaaagcaaatcatgtggctgaacccaaaatcaacgggtagggaaatatactccactccttcagtggaaggaacttcaaagtcgtagcaaagggcatggatacagtgcatgatgaagtcctggggccaatactgtaacctactaaaaagaaggaatatgactaggactgtggctccagtaagtggaaccacatagcttatctgcaactgtgacaggttagtcccttctgtggtattgatggtagctatcatatctcaacgctaacgctcaatattcctcccaactctcctaattttcattccatttccctgatcaggcaaccgtttggttatcatttagcttcctggatagctatttcttcagggcatagtgttttggcagtaagatacatgtttgggccttgcaacaatcctatttctcattctatattaatagacagacatactattgtctacttctggtgagcctgaccaaacttccttcttcaagagagatttactcagtatgctaaaagagaaaaggaacaagtttctaagctcgaaaagctgaaagtcagttgttctattatgtaaattcagtgtgaaggcagtgggcaaccagtcaccctctcatggggagaccactactagggcataatttttacccaaatttctgtagttcctatagataaataacttcagcacttggcctttaatagtgtaggggaaggaggtcaggcgtggaggctcatgcctgtaatctcagcactttgagaggccgaggtgggcagatggcttgaacccaggagtttgagaccagcctgggcaacatggtgaaaccttgtctctgggcaacatggtaaaaacctgtctctacaaaaaaatacaaaaaattagctgggtgtgttggcatgcctatactcgcagctactcaggaggctgggatgggaggaccagctgagcctgggaggtggaggctggagtgagccatgatcgcaccactgcactccagaccctgtctcaaaaaaaaaaaaaaaaaaggtggaagggaaggatggatggtacaatctgcataatcttattgctaggtagccaagaacatgaatgatgtattggaggggtttaatcagggaagcagaaccactagagtcttactgataatgggactaatctcttgcagaattatgtgagaaactggtgaagtaaaggtctgaaagtggaattgaagggttagagaaaagtcactagccagccatcctgaagccctgtacaggtggacttgtaaggccagaacttgcaatgattctaggaagccgcacatgtctaactgctggagtggtacccaggaggggggctgtggaaaagtccatacatagctgccacttctggaggtctcccaccaagctctcaagtcatcttgggtcctctggccagcagggactagagttgggaagaagagctagacatgaggaggaggatgagcaagaacctcccagaatctctgtgtgtgtctgccaccacgtgtagtcatgaggatcttcagagggagtggctctgctccactttcaccttccaaatcttgcctcaattcttctttttggccaacctaacttggaaccatatagggaaataaatttggggaaatggagttccaacttaagcaagctgatgtgggtccagaagaatgcagggtcatttgcttcaggtttgagtcatttcttccagtccatacagaggtcacagaaataggggtttagatgtttctctgctcttctcagtgagtctgggagcctttgttcttgaatcctgagcagtttcatgtgctgtcatcctctttggaccagctactcagcctgggtgagttgatcatgtggttggtggaaaaccttcttttgtttttggattctctctttgtttcctccttcacagatttcctttgaccccactggtgctattgcctcctgctctaggtgctgaatatttctcatttacacctctaatacaactgtgtcagccttttagtgctatgaagtttcattgattattggggtttggaggaggcagatgggtgttttgaggaagggctttgtgggagggcactgagaaatgagactctcatgattagttctcctggtggagcatctgtgaccacccattatcccattgttaccttagtttagtgggtaacagttatccaggtaagatgatgagggagggaaagaaaaaagaaaaaagcaactcttctcactacaaatagttcctagcttattcaactatgtatcctgtggattaatggacaaattccttagtaagctattcaagaccttttggagcctagcctttttatttttctcttttcctgaatatatactagactttgagtaacactggatctcctgaagcccactcagggaaacccttcaaagtgcatgaaagagacagagaagtgcagataaagatgatgaagaaggcataatggtgactctgtgcttgttttcaggtcaagatgtcagcattctgataaggtggccatctgagagacagaaagctatgtatccataaagatttttctttatctacttgggacaaacttaaagtttctatgaccttaataagctctttgataaattttcatgttctatgtctcccatagaatgcctacagcatgagaaacatttttttggtatgtttaatgtaatctatatgtcatcattcatgacagtgcctatcagagtaagtaaatccaggtgttagaaaaaaaccccaaatattagtggtttaacacaataaaatatatttttcactcacatcaccatccaatcaaagttagtgggcagtggagagagctttgttctatgaagccaatcaaggacccagacatttctcccatcttgtcgtattgtgagctttagcaatggttagcatggtttagtccaaggttgtcatggaatggaaagagggagacagtggggtgaaggctcacctgttcttagttgcctagatgcagaagtgaaactctatttctgctcaaattccattggtcagaactggccacatgaccttacctagatgcaaggggagtggctaggcaaagcagtttagcttcatgcccagggagaggaattgaggtttggtgagcatccatgacacttttgaaatgtcacttcctctctgaagcaagtgcctagtactgcacctgttacatggcaggcactcagaaatattttttgaacaaatacatgaaatgaatgaatatgtataggcttctgctgttatgttctaaggcagaaaatgggaaggaaataattttgagagaagcaaaaatctgtctggtacccccaatgtattcatgaccatttatttgtaaaattatttcacaagcactctaggaatttatactctttgaaagctgttttcatttattcaacaaactgttgagtgccttctatatcaagtgctatgctgtgtgctcaggaaatagaggtggaagtcatcattcctgcccattggtaactcacttggaatgcatctagagggaagtgggaaaagaagccagtaatcacagctatgatgtaggcaccatgatagagatacagatggattgtggtggttatgctgggaaatggcacctaattgagtcaggaatgggtgttgtggggtttcattgtctagaagaggtggtatcttggttggatgaacatgagtttgctagttgatacctgtaagagaagggtagagggaatggtgtgtgcaaattcgacagtttatggaactgcaattccttcagtaggtcaaaaaggtgtgatggaaatactgggagataaggctggagaggtaggcttgggctgagtcacaaagcacttctaaactgcattaaataaagaatgaataggggtttagagtaggaattatgcgatttgtctctatcaaatgaaagaattgatacacacagtaatatctaagcagccacgttatccatattgaccagtctatttttctccttagatcggcctcaaataatataaaattgctaaattaaaaaataaacaaaaacccgttcatagtattttgaggacgatccttttgtgggaagagattagaaataagagcacaaagaaaggtgtacaatatcctccattcaagtagccttgcctcagatagaacaggaaggaggcccatttcaaggaaaacaaaggaattggcttcatgattttacaagaactgtatctgtcaatagagaggattcttctaggaaaatgttttaagatggactagggaagaaaactaggaacaattaggggagctcctgctcttggtacttctgcatcagtgaagagtttgttaaagttgttcatttaaggaaccaagcatcagctcacttcaattagtagttattgagcattcattcctccttcattcattcagcacatttcaatgacacttttgtgccctgcactaagtcaggtgctgcaaggaagtaaaagttatggtcttgcccttgagaagattcaactaacacatgaatctagtgatttctaaccaaggatgtgctctccttaggtatcaagggaagctgggcactgtggctcatgcctgtaattccagcactttgggaggctgaggcatgaggattgcttgaagccaggagtttcagaccagcctggacagcaaagcatgaccctgtctctataaaaaaatttaaaaatttagccaggcgtggtggtatgtgcctgtagtcccagcacacttgggaggctgaggtgggaggatggctggagcccaggagtttgagacagcagtgagctatgattgtgccactgcaatccagtctgggcaacagtgagagcctgcccaaaaaaaaaaaaaaaaaggaacaaatgagagagagacagaatgaatattagtctaaaacgccttggagttcaaagttcagattcaaatcttgactgtatgtttgggcaaccactaactggttgtctgacctttaaatattttcaactgcaaaatgaagataataacagctacattgcaatttccaggattaaatgagatgactcatgaaagttttgtgtgaacagtgcacaactttgcaaacatttgtgatacattattaaatgtgaacgtactaggagttgaaagcagtggttttcaaagtgtttgttgaaacactaatgcccaagattggaaacaggcctttctcaagaaaagagttctatggtcaaacacatttgggagatgcaggatcaaagaaagtaaaacatggttcttatgcctgtaaaatgctagtatgcattgtgaatctcaaggaaaacaaatattttgtgtctctctcccccacattaatgtgatctggtgatctacccctactcccactgcagcatctctaggaccttgagatggacagaactcactctgggaaagactgctctccagaaggaaaagtatgaacctttctttcaattttacagtcccaccacccaggctggcaccgtggctcaatgcttgtaatcccagcactttgggaggtggagcactttgggaggcagaggtgggaggatcacgtgagtccaggagttcaagactagcctgggccatataataagacttcatctctacaaaaaattaaaaaattagcctggcatgctggctcgcgcctgtattcccagctacttggcggaggggctgaggtgggaggatcacttcagccccgaaggtcgaggctgcactgagccacgggcgcaccgctacactccagcctgggcgacagaacctctgtcaaaacaaaacaaacaaaaaatgctaagccattcttcatcagacagtctaggaaactcatttccaagcagtgttgagatttccaccaaggaagcccagagaaaagggccaggccccccgctttaccagggttagaggggatccctcatagaatcgggggtgtgaggtgctgtggtggatacatttaatattctttccaagacacccattgatggcaaggcagtagcagatagcaacaaaagcagagagcagggctgatcctcaaagactttatagactttttataaaaactctaaaagtcaagtaacaacatgactactccgcttctaagtaaagtgtgcataaacatcgccagaaagactgcccctgcctccccaagtcagagaagtttcctcaggccaatagcttcccctctcttccccctcctaccgcttgtctcccttcttctcccaaaacacaccccacacctggcggcattttacaccttcccaggaaggggctgccaagcgcggagtcgcggaggacgcaggcgcagcgcggctcaggtacgcgggaggccccgcccctccgcgcccagcccttctgcgccactccactccccgccctgccccgccctgcctcgcccctccccgccttgcctcgcccctccccgccttgcctcgcctcgccccttagcgcccgtcccgaggggcggggcggccctggtgggtggtgtgggagtgggtacggggagggaagtggaggggagggggtaagtgatagggtaggggaggccctgggaaaggcaggacctcgaggcgcggccgcgcgaggtgaccggagtcacagttcccgcaggcggcgacagcagagcgcccactgcctccagcaggtaaccggccgcggccgcgcggcgccggcccagcgcgggcgtgggacgtggagacccggaggagggcggcgggacccgggcggggaaaggcgcggcgtggcttggctcaggtgcgcttctcccacctggcagctcgctcagggctgtggggggtgcctgtgagggcggccccgccttgcgggctggaggtgagtgtcagttctgtctcttttgtctttaactttctttaaaatggggccgtggtggggcccaggggctgttcccacgtctcctcagcgacgcctgtgtcgcgggggcctgagagagctttaggccccgcgacagctggaagcgcggtggtctggagggcaccaggggtgggcgacggggcgaggctaggtccccgctggccaggtgggcggctctgcctagggggacccgtgaccggggacggtggagaccccagcccaggcggggacggccgcgcgccgggcgcccggctccctgctccgtgctcgggcttccgacggcgcgtccaggtggtttctgggctctggggaaagagaagcgaatttcctttccctggcggggtctgatgagaagagcttcgcagagggtttttacctgtgatgtttctgaaactttgtgaagtggcgaaagggtgttaaaagtgtccctttactgtggtgtttgcaaaccacaatctacccagctaggttttagatttgacttctatttcttccaggttttcctttgctatggttttctttagaggaagatactgtggatgaactgtgggctatagtgcacaccgatagacatctgggtatagacaagatagatgccaagccaaaaccattgatttctttagaacatttaaaatacagcatataaaaggattgcttttgtaattgaaatattattctagttctccctttaggtaggcagttaatagaaatttgttttccctgattaatattgtagaacatagcctggaaaatattgagaattagcaacaacaacaaaatccatttaccagtttcatattttgatgtgtaacttcagcatggttaaaaattgctttttctggaaggagggagtaatgttgcttgcctttgagagctgggatatttgctttttatcatctcttttgtattttgtaatttttgctaatgaatatgagttaccttcataactgaggaagaggccataatacaaatttattctttgtttaacccttcatgaaaaatttaagtatatcttgtattttattgacttcatatgaattataattgtgcatttacgaataaaactaatattgagagattaattcaggtggagagaaaatgagtttgagattctggcgggacatctggcatagctgtctagtggatatataccaatagatatattggtatcaggttttctgaagtcaagatcagacttacaaatgttggaagcagcagtggatttgtggtggttaatcctgtaagggtgtaagaaatcattcaagtaagtatagtgtaagaagagggcaagaccaaggatggggaacaccagcattaagcgatgggtagagacagccaaggagtctgagga

SEQ ID NO: 713 - DNA, 32742 bp, Homo sapiens
  source 1..32742: mol_type = other DNA
ctcacacagggctttgcagtagtggtggcagccgcggcagaaactggctctggggaagcaattgattcgtctactgccagcagcccggagttgcctacgcggactggaaaggaagggagaagggagagagagagagagagagagagagagagagagagagactcacagagctaaaaccttcatccatgtggaggacagtctgagggagccactgtcccttgtccactgactcactggctggtccgagttttctccgcttctggcagtggtatttctttttgtcttggtcctgcatgatttaggggtagttgatgtgtctgtgtgtctacgtgtgtgcactggtgctttgattttattttgggaagagtaggagagtcaaatgaacaattttctttcaggcacctccgctgagcttttaaaccaagtcattgggacttagcgtctttctacccggcagggaagggaggagttggcaagaatttggctcacccattccccctgcaagcctccagcgtcgcggtaagtgatattctcccgggttgtgcagatgggctaggggtgttggaatcccaattgtgatgtgtgttcatgagctggtggggtaaagggtagttgggaggagaagggtatcgaggaacgactatgcttatttgcctacatcctgcagtgttttatcacctaagcggcatcccaaagccaaatgagattttggcttagtgcccagggagggggtaaaatgtgctcatgttgtaggcaatgcgatcaagattgtggcttctgcccaatttgccctctcctttgcagcagaagctggtgaaagtagccggcagttctctgagagagttaacccttcgtggggctggctagtctagcatggagggactctgggtactctgacttagcaagtgagtgcttatccctggaggggagggggtcacctgagactggaagggtaacttttgcctgggcacactgggtaagatttgcacaggacagagcttagattgtaccctcttctaggaacagctgagtaatttaattgtggtgatttttgcgaggttggctgttcacgctttcctgagatggaagacctgggagccaggaaagggccacactatgcctgggatgagtggtcaggctggccagaagggagcagccactgcctgcagaggagatgatgttttattttcacaggtggcgtaacctgtaagtgattgtatgggggagcgtcctggcactagcttgggagattctatccttgagttcatctcagaaggaaggaggggaacaaagcttgttcaaattctggggaaagattccaggcttcagcttcagttttgttccagggtagaccgtccccctgcactagtttctttttccaagatcctgatggggaaaggctgcaccaacctgttagtgagtgggaagtggaagtaccttgaaattgaatccaaaagctcacatttaattttgaaatgcttttgatgctaatctgctacccatcaaaaggggatttcactttgctttctgctttgattacatctacttttctggaaatgaatgcccttgtttttagcatttttgctattatctcaggggccacctcagtgttctgcacccccaaggatttcctttttagattcttgctcttggaggtgggaggaataaaacaacagtcagagattggcaagcctgaaatataagcagggttcactcattctttttttctctagccccatagctaagaagagatgctgaaatcccacagcatgtgcctgctcaggcaggacatatgaggcagaagaggagggttgtctggtggttagtgtcaaagatttggttctcaaaatccctaacttctcttcctagcttctcttgctgggtgaccttgaggaggaagttgccttagattcctcactgggaagacttgagtgtgaataatgaatgtgtggaaattttgttcaaaaaaagaaccacatatctggctatgggtgatatttaaagtattgaaatttggtactaatcgatcagaatggctagggtcctggaatagggcatcttagggggcccctgctgtactgagtgttaatcttttaattgctggattatggagaggtttggggggatcttagggggctatcaagagagccacgaggcctcagggcagcatccccatttaattttaatatttatattttattttaatatttttaacaactggtttagccatgcagtacaggccagcccagctgggatagctaatacttgggtgtccagatgtggacacttcccaaatatctctccactgggtcacttccttagggatggccaagatccaagaggccgccctccctcctcccccatcacatttgaagtggtgcattgtggtgcaccagggaaagggaaagagaagcttctggaaagagccttggacttgggtcaggagacctgggttccagtcccagctgtctcccctttctgggcctcagcttccccatctatgcaatggggcagtctgtctgggtggccctaagtccccttcaagttctggggttctctgactatgagataggtatgtgtgtgagtgtgagtgactgcacatgcccacatttctaggaagggttagcactgtgcttgagaatttatcctgtgtcggggagaggccctgtttggggtgattggggataggggagtctcttgtgagaactttgctaggtttctagaatcctgagctcagctggaaaggggtctgctttatttatggcctcagatgcacagagatgtagattttgcagcacttgaaggctccaaagagactcttctcaggagtagcagcaaggactccttggagaggctctgctctgaaaagatgcatatacacacaaacacacaacatcagggggttagtggatcctcaataatgcccatgtgagcacccccccaagttcaggacctctgatttagtctaaccctttccaggggggcccagagaggaaaaacaatttgcccaagaccacacagtaagttatggcagcaacatataaacccaccattatgaagaccaaggcatcatcccctcactcctggctccagcagcccctactcccccagtccagcctgaggtacagaggaaggatgttcagcagtgtctctccagcccgtgctggtaatcaggaagcttagccatggagacaaatgtggacatttcctttcttgttggcaggagagaggcagcagacagagattctgtgattccacaggggtagcctggaaagtcagtgcccccagcctactctgcctttctccttcttattgctccgtacacagactggctgctttgtctgaagatgtgcatttggttggggtggctgctcttgggctttctttgtaggctgtgacattatgctttaactctttccctctctgtgaatgggtcctacagagtttatggctttccaataaaaaccaccatgacacatggacctgtcttctgcccttcaccctcattcagtggggagctgattgtaattgcagataagccaggaattgatgtgaagccaatgagaagaaaacagtgtggtttatttctgttaagagctgtggccataatctgggataaaaataattctgggacccagtcatggtgggctgaagctgatgattttaaataattcagctgccacccaggatggagagccttgatgtgctgaaagagtgaaggaggtactgcagaaatagcccccttctttctgtgcctcacacctatctaccttcttaaccagccaggggctgcagtgtgggctctgggggcggtcagatcttagttctaattttgactctggcatttccttgctgtgtgacttcagacaaggcccttaatctctctgagcctcagtttcttcaattaggtgtattagggtagcatgatatagggattaagaggatgggctctggaaataaatttcttagggttagatcttgatcctagcactttctgattgtgtcacttcacctctctggacctcaattttcccatctacaaaatgggaataagaatgcagttgtgagaattttaagagttaatgatcactttatactgagtctggcaaggagtaaatatccaacaaatgttcgcaatcggggcgatgttggtgatggtaacagtgaaatcacccctgaccaaaacaaaagtagggtgaggtagaggaaggtgagttctttgggctagttgtgtagctgtatgactcacaagagggaggacaaagcttggagacaggagctgccagcccctcttgttccccactgcagttccccagttgctgcaggtccccataactcagtttcttcatctgtgaaatgggcaaaatgactccctctctgtttggcttgtgaggctctaagcaactagcaggggagtcatgagcctggggggtaggccccagagaagaattctaggaggagaagcactggtgaccactcagtcttttgttccttcaagtccctgggaggtttttgctgaatcatcccaggctataagctctgagccgtgtattttctctaggaaacctgagccttccttcccttccctgggaaatgcctatggcacttctttgtaggagtcctcaggtgctacagggtgagatccttaagggccaaggctgtgatatcttcatttctggtgtccgggtcagcacccagcaggtgctcagcaatgacttactgagtgaatgaatgaatgaagctcaactgatttactagcgaacatgtcagtttggggcctgtggtccagccagaggcctgcatacagtaggtgctcagttagtattgattatgatgagtcagtcgttggtgaaaggtttgaaaggacttggctcctgcctcagatttgctacaggcaaaggacaggcctctctctcttcctgccattgctatttatcatgcattgcacatttattgactacctacagtatgcctggcaccatgatgggcattgggaataaaatggcaataaagacacagtcctggcccggtggggtggttcatgcctgtaatcccagccctttgggaggccaaggtgggtggattacttgaggtcaggagttcaagaccagcctggtcaacatggtaaatcccagtctctactaaaaatacaaaaattagcttggtgtggtggtgtgtgcctgcaaccccagctatttgggtggctaaggcaggagaattacttgaacccgggagatagaggttacagtgagtcgagatcacaccactgcactccagcctagggtaagactctgtctcaaaaaaaaagacacgatcctttttgggacttagataaagtaagtggctacctacataatgtgatctttggtggggggctgtggtacaaagagggctccccgagtcacccaaagatattcagttcactgatacctgaaatttccatcattcaagtttcattctttttcttaaggctctgctcttggttaaagagcagatgctttggagcgagttaatgcatccagccttattagtcattcacactttaatgagaagctataagagcctttcctaaaagtgaagcaggcttggtttcttggagcagggggagggggctgcattactaggcttgtaggcaaaagaggggcaaagaacagagaaaggtggatgttgctggatttacattctgttggggggtaaaaagctcttgatgcccggagtcatctgatttcctttctgctactgaatcccacaggagtgtgacctggatttagcatgtcgctcccattccctgctaacctcagacaattccaaggagtcactttttgctaggcaggaccccaggactcagtttctcaggtagatttgtggcaaggccttaataatcagctgtccagccaggctaggtctttgggatttgcaggcggtggctttgagagtgaatgaaaaaaaaaatttttttttttttgataggatcttgctctgtcacccaggctggagtgcagtggcgtgatgatcatagctcactgcagccttgaactcctgggctcaagcgatcctcttgtctcagcctgccaagtagctggaagtacagacacgaccatgctgggctaattgtttaattttttgtgaaatggagatctctctatgttgctcaggctggtctcaaactcctgggctcaagctatcctcctgcctcggcctaccgaagtgctgggattccagccgtgagccactgcacccagccaaaagtgattcttcttagcccaactctgctccccatttgggccaggaaaagagggaaggcagcagtgctgagggcccaggctgctgtatgcaatgtcactgtggtttcctcgaagtaattgtcttgctgtcattggttttaatgatataacacacgcttaaatctctttgtaatggagctctgtcagactctggtttagtaatccatccagtgagcaagataacatgcctcaggaagctgggttttttaccaccccctgcaattaatcaacaagaggaaactcatctgacagcatcataatgatgtttggttcatgaaggatttatttagagagcgagggggggaaatatcttctcatctctcaatataatctgagtgagttcattcagctgcatttttctttctttttcctctctttcttttccttttcttcctttttaatgcacctacacaatgacgagtggtgacttgtgaatggaagcagctttcagcagagaacatattatgtaagcaggttttggtgccagccattgatggcggggcggcattctggggctgcagagaagagagatggtttctcgaagttcgttgggaggcttttcatgcaaggtgctgccaaatggcatctgtgtggtccgctccattgcacatcttcctccctgccccctttcccctttccgtctctgccttcctgtgtttttcctctgtcactgtggtgctaagcccctaagtctctgtctttatctctccccctctctctcctttttccctgcccctgtctccttacttttcccaccccttaaataattccctgctttctccttgcagtctctcttttctccccatctttccctctctccctttctctctcctctgcccctggcctctcttcctttccttttctctctctctctccgtcttcctcctctcctaactcctctgccttcctcatctcatctttaagacacacagaaattacttgtaaagggaatgcatttgtgaattcatgagactccaggtgatgagggctccaagtagggtcaccaaccattcagctttgcttggagctgaagggggtcctgggatataggactttgtgttaaaactgagaggcagaccagggatgatggctcgcacttgtaaatccctgcactttgggaagccagggcaggaagatcgcttggagccaggagtttgagaccagcctgggcaacatgtgagactcctgtctctataaaaaagttaaacaattagctgggcatggtggcacacacctgtagtcccagctacttgggaggctgaggcaggaggatcacttgagcccaggaggctgaggctactgtgagctgtggttgtgccactgtactacagcctcggtgacagggtgagaccctgtgtctaaaacaaaacaaaacaacaacaaaaaagaatggaaagagtactgggcaaactgtgatgagttggtcatcttacctccaagccaaatgcttggaattttgtagaattttcaaaaagccaaagattcagctttctgggtgagttgcctgcctttctgctctggtggcacacagtggttctgaagccctcccaggcttggcattctctgcatggctccggcatggactatctagacacacaaaggcctttccctcagagctcagaggtcagtcatgggcaggagacttactcccttcaccttccctaacccctgtccctgacaagactgatcacccagctagttattcgctcattggtcacccgggggatatagggtagagattgcagatggttcaatgcccaagcttctcaaacttgagcctgcatcagaaccccttgcaggagttgttaaaacacggagtttgtgattcagtgggactaggatggagcctaagaatttgcacatcaaacgagttcccaggcagtgttgatgctgctggcccagggaccacactgtgagaacccctgctctagactcattcccccattccctcctttccagacaagtcttgtacactgttctaggcactgcagactcagcagtgagggagccggagttccctgccccctgaagccgacagcccagtgggtggcaaaaccaataaacaagtaaacacataaacaagaaaactccagaccgcgtgaagtgccatgaaggaaggagataggaagactcgatggagaatgacaagtgatgggttgggggagggaggggcgagactaacttataaaaacagcagccagtggaggctgagtttctaggaggaaatagccatgagtagatggtgaagggagggatgagccacacctgggaagtgggggcagtaagtgcaaaagcagagacaactgtggtggccccaagggacagacagtcggctggtgtgagtggggtgagggtcacgtgatggggacaaagggagacaggaacaacaggttcagatcaggacctccagatctggttagacaggacctcccagggtagccaaggagtctgggttcgattttattttgcagggagcgttttatgctagagtgatgtgacctaatttacaatgttagtaatgattgttttggtctctgagtggagaggggagtgcaggaggtgggatggaagccaggggaccagtgaggggagctgtgatggggcagggaccaggtggtagcagagaagaaggtggtgacatttggggtgaattctgcgggagtgcagacgggctttactgatggatcagacataaggggagaaggccagagcaatcagggtccactccagtgggactggaactattcctggcaatggtgcagcagttgtgatcctggggacatggagaggggccttggctgtaaccaagggccaatgggttaagagacaagaacccagcagtgtgtgcagagtcaaggccgttcagggagctctgcaaatgcccgttccacgctagctaaaatgcacggttcccctctccccggaagaaaaggcagcagcgtgggttttttgtttttttttcttttctctcccatgaatagtggctggattaatctatcagcatgaagcaggatatcgtaacttggcaaaggggatgacaccctgtgaagtggcaagctggggtgtctggccaagcctttctccaggggctgcgggaaaggctgctggatgtgatggaagacgtgagcttctggtgtctgcagcttcctctctgatctgatctgaacctgttgttcctggagctagctaggcccattcaaaaaagaaccagccggactgggcttgcacctaaggatgaaagcaggagaagccagcatttggagcaggagctgggcccttggcggggaaggagactcatcacacagagcatgcagcaggcttgcctttcagatagaacctgccgctgtttctgtagatgttctttcttcctttttcttttccttggaagggtttatctgactgggcaggcctatgtagccagccttggccaacttccgcagaggggtccaggcatgtcttctcatctgaacgatggataagtgcttcgaggaaagctcccgagggagaaataaatggtgcacactcgtgttggtgacccggagggggactgtggttttaattataatgagaggggaactggcctcatttgtagcctgtctgttattcacggaggactcttgggctttgtagattagaagaatctttgttagggtgcgagatgatgagagttgagttatttttcccttcctggtacacagccatcattgatccttgcccgcctcttcctccatttttcattatttatcctcttttttcctcataccccattcccctccattcatagacaaccctattctactctgtttatgcgtatttctattgcttgtatatgtcccttcaaaacagtatttttatagatctcataggttctcacttcttttccactcagcagtatgtttttaagatccatccacgttgcaaggtggcatctaatcttttgcttctaattgttgcttttctccaaggcatcagtcccctatttttttctccatttttcttatgtgagtttccctccagcaacccagagtatttctgaaaatttttttctctgcgctggccagctgggattctttcaggacaggaagactcattttaacagagatttaatgattgtttgggcaacacaggtagatgctttgctctttcacttttgattctttgcctaacaaatgctgagtgtcctcatgacatcagacaccatgcatgcatagagggaggcagaagagagcagctggttctggagctgggtggacatgggttcgaatcctgcctctgctacctactgcctgtgtgacctttgccaaagtgacttagtctctctgagcctcagtttcttctgtaagatggggataatgctagtattcattttataagcctgcttgagagtgaaataagatgatgcctagtgtgctttgtgtgattaaagtttttttaaacagtcccctgggtggttaggtaaatagatgtttttatcccatccaagttgtgctgggtctgcctgctgtgctgtgtgtgtatgtgcgtgagtgtgtgtatgtggtgctgtgagtatagggggtatggtgcgagcatgtgtgtgtgagtggtgtgtgtgggaatgtgtgagtgcacatgtgtgtgttcaggagtggtcccctggctcaggctgagacgttgcccccctcttaaatggctacttcccactctgtgtggagagaccctgctcccatctggagtagccatgctggctcctcatcacctctgtccattccccagggcctctgtccactccccagggcctctgtccactccccagggcctctgtcctctccccagggcctctgtcctctccccagagcctgggtttcctcctgtaacaccgacgttgcctctgagaatagattggtgaaagcagaaaggctcattttgtcctgaacatgctcagagggtaaaagctccagcggctggaagtgggagtccttgagtggccagagaggcccccagaagctgtccaaagcctgggattgagaagactctagatctgaaaaattcttcctctggttgtcatggcagcgggtctggatgggagcctttgtcccaattggttactatggggtggtcatttctggttaacaccaagtgtgagggcagccccaggtctccacagcagggtggtctctgatgccctgaggggctcctcacctgcttccagtgttacatcaccctattgctagaaaggacactgagttaagagtctgtccatttgggtacaagttccagatgtgcctgataattcatcctctccctttctcccagatggagagagggagaggatgaattatcagggagaggatgaattaaggcccatggatgtccatgtgcttcttcatggagtcacagagcacgctgtgtaggctgccctgccctttgggttacatgactgacctccttcaaacctcatgaagccttgggaaggagatattattattattattattattattacaattttgcagatgaggacacaggctacagaagataaggaggcctcagttcccccagtttacactgtctacttactaattgcaattgtgaagataaagcaacttaaaagtgctttttaaaaaataaataattaatataattaatcataaaaataaataataaggctctacagaaattgattctttagtcttcagctccttccagcttggatgcaatgcatggacatcattccaataaaggattggacacactggccaggaggaggcagtatgcgcagtccttagaagcacggctgctgtccccagaccacctggattggaattccagctgcaatacttgccagcctgtgaccctgggcaagttacttggcctctctggcctcagtttactcacctgtaagatgggaataataatagtacctccctcatagagtggctgcgagaattccatgagttaatacaatatgaggcacccagacactgctggatacatgcaagttgtttgttattgcataggacttgaatttttttaaaaaaattacttttagattcagttttgtttcgcaataactttttgaagaggagagttggaattacttcctccattacagatgaaggaactgtgccccatagaggcaaaccaatttcccaagattgcaagattagttaggaacgaaaaccaggttcagtcatcagggatgacagtggccaaaccataaagctccaaagcatagtgggtccaccgggccaaccacagtcacagacaggctggaaaaaagcagatggtgaatttggtggtctcaggatccttcccggtggatcccatcaggtggggctgtgagcacttccaggtggatgcaagtggtcactgcacctgctccaacccacagaccaccagaccacccaacagtgcttgcttcccagagggtggaaagttgaaaccacacccctgtgtgtgccatcagcaaactgttgggctctctgttctttagccccatccattggttggttgaagcctgggatgtatgtgtgcaccaggcaggtgtggccctcgtgacagctggctggctggtgatagagcacaacagttaggacttcagcacagaaagccaggctccctgggctcacgtctccacttcgccccttcctagctgtgcagacttgattgattaccacagccccccgtacttcagtttcttccagctgcagagtggggatgccgctaataacagcagatatctcctagggttcttgtaaagatcaaatgggttcctacctcttaggaatgaacctcttaggatgctatcattgtcatcattatttcatagcagccaatacgaactctttctttcgtctttggattttcctaattcaggaaggctcctgaagtttctttacttacgctggtggtttccaaactcagatctcgcctgtgacaaagtttccactggccctggtgaaaggagaagaactaggcatttataggtgggcaaaatgttgccgaccgagttttcctagaaaaaacaaacaaacaaacaaacctctatcctgaccatatctcttttctgcttatttaacgttaaaatatattttttaaaaataaaacattgcaatgtatggtagcatttttttaaacaaaagattggtgccccttttttgtaaataaaaacaacaacaatgcaagtggacagccctaaatttggaagaaaattttacttatctgagaaattcaaatgtctgggtgctaattttgtccagtcatgaaccttagtggttataacatttagtgtgtgtacgaatcttctgggattttttttttaatgcagatgctcaaggcctatccccagaaattctgattcagaagggttagggtcgcaccaggaatctgcagtgtaaagagtttcctgagtgattcgggaatgattcatgggtcattctgggaggaggatgaatcctctttttcactgcctgggaaatgggcttgagtttctccagtgaggggactctgcacccgcagaggtgccctgtgcattgtcagaaagggccagttagctaggtcatccttcctgatttgacttaagcctgagtcccatcactcttgattgttttgccttctggagcccaactgaagaaataatattcctaagacagagtttgctcgttgacagccaaatgcacgttagggggcagttgtgtgaggttaaaagcacatgttcatttttttaaaaaggggataattcagaagtgaatgtctagtctctgaattgctaggtgggacctccctcaatcaacatataattattcgtctattcatttgataaatatttattgaccatctactaacatgtaaatcacagccccaaatataacctacaatgttcatattttcccaataaaatgatgaatctgtctctccctccaaaaaatgttttgcccaacttgaataaataacccattagggatgtaaatggacttgtcaaatgtctattagtatttgattcattaattgtattgtactcacatacttaaaaccacatggttatataaaataaaccattcacccacacaactgttctttcagcacccatacatattgaggaaataattaaaccaggaaagtaaggaaggttttataactttagtaaaagtcacttactgcaaataccttttgttgacaaataggaaaggaagagataccacttggagttgcatgatggttgaaaaaattgagaaagaatttgcttaaactattttgtttttaaaaagaaagcacattgggagaaaagagaatgcttaacagtgtgaaaaacgttttaagaacctggacagaaagtgattttcagcttggtacactggctcacgcctgtaatcccagcactttgggaggctgaggtgggcggatcacttgaggccaggaatttgagaccagtttggccaacacggtgaaactctgtctctactaaaaatgcaaaaattagccaggcatagtggcaggtgcctgtaatcccagctactcaggaggctgaggcattgcttaaacctgggaggtggaggttgtaatgagtcgagatcacgccactgcactccagcctgggtgacagagagagactccatctcaaaaattaaaaaaaaaacaaaaaagaaggaactgattttttgttttctgaggaatatttgattgggagaaatcctcatcttctagttggtcgtttatagtatgtgatatgcactgtgctcagtgctgggatgtagtagaaaacaatttagatgtagcatcttcctgtgagcaggtagaaaattattcaaatggctgtataatgataaatgaaggcaaagattctaaagagaggggcacaattcacaaagaaatttgacctaatcttggagggcttcccagaggaagtgatgttcgacctgagatctgaaggatgaataggagttaactgagtaaagagaggagaaaaaaacagttttcttggcagtgggagcaatatgtacaaaggccctgaggtagcagtgcaggatctgaaagaaggccagcatggttagagtgtgagatgtgagggtgagatgaggcgggtggtgcctgcaggaccatgcaatcaagacaaatcaagcaatttgtcttgattctgagagcaatggggtctcacaagcagaagggtgacctgatgtgatccatattttgaaaagcccatcctgcctgcagtgcagggttcacatgaaggcaagaacttggagaggcttgatgaaaacttcaaactggcccagaaagggctgcatttacaggctgagccctccaccctccactcctcttcacagcaccaactacctggaaatgaagaggacagtaggacccctctctacccagagggagattttgttgtgcaatctaccacagatgtggggccccttcctgagaagcaaggggctcagagtagaggaagggggtagaaataattgctcatctatctgtgttcaggttccagctctgctgctctgtggtcttgaacgagttaccaaatctctctgcatctcagtttcttcatgtgggaaatgaagataacaataacaactaccttattgggttgttttgggaatttaccaagtcaatatattatgtttgcttggaccaaagcttggcactttgtaggtgctcagtaaacattagtcactcttattttgatgatgatgatgaaatctctgagcttgatgttctggaaaaggtcctgttagtcctttgcaccttctgtccactacccacctcttccagatctttcttcaaatgtcatcttatttaaaattttacctccctccccagaactctgcctcctccttctccattttcctccctggcacttggcaccgtgtacctgctatctactttaattatttactttgtccatcatctatttccccccactagaatgtcagcgccaccagaacaggataatttgactgttctatttaccactatatctccagtacactatcccctagtgtctggcatggagtaggtgctcagtaagtatctgttggataaataaacactaacagtcaacctaatgatctttgctcttattcaaaaccttaccctctccccagatgactctaactaacctaatgggtcattaaacagcaacaccagcaaagaggggaaaaatccccaagccttagaagggatgcaggatggggcagggaaggtgtggaggctctggggattttagtgatggagaagaacgtgaaggtcttttatgaaaccagctctgcagcctgatctttctaacctgattaatcacattaagcctttgtcaatatcaacattacctcagccccagccgcggcagctggtggagcggcaggcttattcaatatttaagaagacctgcattgcaggcaagggtttgggccgctggtggaagagcaagcagtaagtgctcaggggcagtctcttaagtggtggattattttttaaaaggaaagaaacaagaaaagggaaaggcaacaagccctcagcctcccctggctttccccagtttctggtagaggttgagcagcatgcctgaattactagctgtgattcaggacaagacagtgttgctagaagggaaaccatgaaccagaacatttggtctcctgggtttgattttctagcattgcataaagtggcggttctcagaatgcaatccacagaccagcagtaccggtattgcctggaacttactagaaatgcaaattcttgggctctgttccagacctcctggatcagaagctctgggtctgaggagcgggtatgaatttgtgccttaagtatccctccaggtgattctgatgtgctttcaaatttgaggtgcactggcttgaaggaagggcgggattgcaagcaggtggctctcggccctggctgtgcattataaacacctggggaactttagcaatatagccataccaggactcagccctagagtttcttctttagttggtttggatggggtccttgcattgacgttttaaccctgcctccaaggtgatcctagcgcagaactaggatgtgactgttcaccacctgcctgacttcggtgagttatcttagctcacagatcctcaatgttggcatctgtataatggaccctaaacctcccaaactaaggatgggacttgcaacaaaatcatgaggcttaagacaaatgctcttgtcttgtgaaatatttgagggctgttgtttggtatgtcagtggggagttcatgagggtttcctggggtatgccagtatcttttgaccattcttgaccatttccttctggtggcctgttctgcctcttctcatcgtgggaatctggggccacaagaaccctcactatacaagcattttaaaagaacattgcaggctcctctgtgtggagatgactgtccctgggagaggagaggttgacatgaagcactaagggcagaaaaaaacaaggggaaataggtataaattcaaaccttatgggctgtcgttggcaatgaggacttcacgctagcatattattattccacaataggagttaccagtttttgagcatttgctatgggccagcaccatgccaggagctctgcatgcctcatttcatccccttctcccactagccctgggaagagagtacaattataaccagcattttccagacaaggaaagggaggcacagaggttaaggaacttgctgagttccaggttagcaagggacagagccaggactagcccctgtgacatgtctggagttaaccactttatgtcaaacaggtccctaggctctctaggaaaggtaattactgaggagaggcactaaaagtgtctccagaaacatggagtgaagtgcctcagggcggagttgaacatcacctttccccgcctcctcttacctgtaaattctgaccctaaccacaatgcctcctcctgctggcttcagttctatatgataagagcttggcattcagttttctatggcttcggtatccccagatccctcaatgaacaagaactatgtgaaaaagtaaacaggcctgctggggacatttcagcttcctttctcgattcctcagactccaaactaagaaataaatctgcaaaatctcaatgcttctttaagaaggaaatgaccttggagttttcctttctttcctcaagaaagagctggaaatcagggctgaatgaattcagtactcacttgtcctcagctttgaaagatgggaaccctcctaaaccctcaaatgcagcccctatcagtgactgattttattgtagaaactaaactggcagcctggctggggatgaaccacttgcaactacccctcactcacccttagctcgctgcagaccttccacttctgagcatgctctgcggatgccggagattgacaatacacttataaacccatttgctgctcggccctggttcgttatctgatcagacttcagaaaggctgtgtgctagatgatccctgtaagttttctgtccctgataaatccccaatccaatgtgttcactcttggcaggtttcttttcttccactttacctccttctgcctccacaaaagtgatggcagaggaaccaggtcgaaatgtaccgttagtttcttgtgggagaagctggcccaaaaacaacccctaagtatggtatgttgtatgttcctggcacttttcctcccaaattggctatttgcatcaactatcccattatctgccccttgaatccaccatattctgaaaaataaaatagataacagcctaaattactaacatctgtcccacttaatattcttcattgtaagaggaaaagtgaaactgtaaaaatgccttttgattaatctagtactgcatacatttgtatattgtataatatttattatgtatataatacattatactatgttatttgttttatatataatacatattttttgtgtgtacatatatgtgtgtgtgtgtgtgtgtatagataaagagagagcgagagggagtcaattcccattactcatgatagttatgttctgcaaagttgccacaaacactgaactagtaaatactgaaccacattgctcctaggagaaatacagggttaggttcctacgaattttggttccagtatcttcaactgatcgaatagccttgttttatgtgtgtttctgtttaaagatacctcatttaatacattactgattccattaacaggctcccaatatcttcaactgatcaatacctaatcttgttttatgtgtatttctgtgtaaagacacctcatttaatatactgttgattccattaacactgaacttgtggccaatagcatgaggcctttattcagttcaaaagcactgaacaaattgtatcatatgcattattttctctgtaaggcaaatcacagccttcctgctcctaggaacactcaatagcactatgcttgagggccatttttaaacagcaaaattaccaacaaaaagtgcaaaaatgcaaaaaaagtgtggcactaaatagaaccccccccccaaaaaaaagagacctgattacagcataacagctgaaacaagaagaaagagacctgctttgtttaccttcagctaggagcatgcatgtgaggtgactcaaacattttggtcactctgtgcatgtctgtgaatgaccatgaaagggtcacgggtattgattttggggattccaaattttagcaagtaggcaaatttgcaaatgtggaattcacaaataatgagtattggctatgtgtgtgtatgtatctgcattcatcatgactatattgattgcaaaccttactcaaactagttcaagtgataccaaaggacacttatttgctaatgtaattgaagggtcccgcacatggtggaggcatgactggatccagaggctcaacaataggctagaactgagttctcatcatctcatcgttctgctttcttctgggttggcctccctttcaggcagacttctccgcctggtagaacccaccaagtccaagtttgtctcatccagcttcagtttagcagaaaaaaaaaaaaaagagcatctcctttctaggattgcaacaaaagtctgagcattgagtctaattggcttggattggggaacttaaccaactttgagtcaattatatgtagttacaagggggaatatgctgactggtgaggccagagtcatgtgagaacccctggagctaagaattgaggccagccccatcagaacaccacggtctgagggaaaggatggctcctttaaaaacaaaaccaaaccagggtgttagtaccaggagaatgaggaactggtgtccactccccatacctccatggaactttcagtcctgtggaggattatttcttgaaccagtgaaggctaagccatgagcttctgaatcccaaatacattaaaaattcagagaagaaagaatggattgaagaaggcattacaggacagatgagagttgagctaggattttagggcttacagggagaaaccagcatttcagggtgtgaaaaaagttttacatcattctatgccatcttgatagctgcatgaatctcacggagaagagtaagtcaagtcatacatggtacatggttggtggatcccagcttgtagaaagtgtgtcaatttctgattctatccccttctctctctctctctctcttcccctctctccctctctccctcacatacacacaaaacccctttgtatatttattcattcactaaaactggggagaggaggagaggagtaatgtgtatgtgctactgtctatggtgctgaactacagctctggccttctgatttctatctctttgcaaaccttctttgagccaatgtatacaaattacttagtgcaatccctggcacacagtaggtgataactacattatagctctatttggcagacttgatatctggagatgaccacaagggtgacttcatcctctttatttaaccatgtgccaggcattgttctaagcactttacaagtactaactcatttaatcctttaacatccctgtaagataggtgctgttatcatccttgtttttcttagaaggaaagaaaggcatagagaggttaagtaaccatcttaacatcacacaactagaaagaggcagagtggggacttgaatcttgacagctcagcacctctcagcctctgcactcttttgcctccagtgatttgagtcataacacccgcctgcctgggtgattggggagaccaagggctttgtaaattgcagagttctccatctacagtacttgatgttttgagggttgtgttcacaggggcaagaagaggagaagaggaagattgtggtccattcatgttctccagccaatactggccaaggttttattttctgtttctttaccccacctggtgcctggaaaggaggggggaatagatagaggcaggccttgaagatttattgttcatgagaactaagagaagcttttcactgtttctgaagtggccttggatttcttaaaatccacaccccagggaagtgaacacagctggactgtgtgaggcagaaagcgtacttcctgtgactagagactgtgctaaaatgtgattcgggagaggtgcggttctggaagaacacctggacaatgcctagtgagggttttgcctgagctggtacaggactagatgctctctgtgttactttttgctgcaacctcaaaaaaacccacaaaagtgggtgctgctacatcccccacgtaacagttgagggaacggaggctctgaaaagttaagtaatttgcccaggctcagacagcttagctgggggttgaacacaggtctgtgtaactctaaagcctgggctgttgctcactgcccttgatgggagatagtatgttgaaatgtgtactgtgggtggaaatgagggtgttgtgtttgtatgattgtgtgtgtgtgtgtgtgtgtatagtggagttgagagtggttggagagtgggtatggtgggtatggagtaaactaggatgtgggagtggggtgtgtgtgtgtgtgtgtatgtatggggtatatttatgtgggagtgtgcacgagtgtgtaggggaggatgtggagtgtgggtggggatgtgagtgtgtgtatgtgcgtgtgtttgcagcaaggtgagaagataagaagagccctttcctggcccatcttaggccaggatacttcagctttctgttatgtaacagaaactagttcttcctgcttgatcacagggtcaggccaagtcaaatgccccctatatgtggggcattttaaccacatataagagagaagagtctgtgaacttgagccattccttttcaaatacagaaaggggtagtttcaggaaagctcatcaccctctttatgacagccccaacaagtggttttgctgtttgtgcttgattacctccaatgatggggagcctattatctatcaaagtagcatgttttcattttgatggggctgatggttagaaagctgtttcttatctcacgccagattctctcttactggaccttctactcagtggttccaggtctggctgggtggccaggttgtaagagtggttatctagactagtgattaagactgcaggtattaaagggagaacatctgggtttataactcactgactccaccattccttcctggtgatcttgggcaagttaattcacccctctgagtgtgagaaaggggaataacttcagagcccacctcacaggatagtggtgaagatcaaatgaggttgtatatgaaaattgcccacctgaagactggtgctgttcatttctacactacatcccacctctgcagacctgtgaaatgctgacactcagggcaggatagtgagctggccaagaacacatgttctagagccacactgctgggactccaagtgtggcgccatcatttattagctgtgttatctgggcaagtccttaacgtctctaggcttggaggggctgggaggcaatgtaagtggatgcgggagagaaagggccggatggagaggtcctcctgacaaaagctatgaccttcagaagaatataccccagcctgtctctcctccctccctccagtctcctgctggtgcctcccattggacaaacccaaccagaagccagagggccaggagcctgctggtgctcacacacgggtcagcctcccagggcacagagcaggatggaggatgaatgggtctggaggcgcaaatagaaattatcaagcaaagctactttattattaagttgaaccacatgacgctgccattatgcaaccatttttgtactataaaaatagcaaattaatatgtttaacccaacaaataatagagcaggagagtcaggagcctcatttatatgagacccatatttgagtcactggaccagcatgaccttgacaaaccttggcctcaatttcctggcctataaaatgggaatgctatgtctcccatctaaaatttgtgaaatgcccctcagatgtgaggaccaggactgctgccattttttaaaggagaaaaatgcccctctctgctgtgagcattttgtctctgaggcagaggagggagcaggacgccatttgtggtcttccgtggcttgatgagatttagagctgcagataagtcaactccagctgagttttaatcagaatgaatttcactgcagcctgggcctgagtggcagccaggggccattaagctaaatgacttgttttaatatggagacctgtctaatcacattttctgtgtggggccagtgtgtctgtgtgtgcatgtgttgagtgctgaaatcaattctgagcctttgccttttccctgcttaccacaatgtagctggggcagagataagccaggttaacagcatgacaaaagcaagtttccgctttatcaaggaattgggtaattggctggaccatgcagggagccctgaagagtgttctgttgaacgatgtctggtgttaaggttttgtagacacagggctcacagagactcccataacccaggggaggaaggaaaagttttgggttcccctatccagcaggagacattcgcctcaggaaggtcaatcctggatgctctgccctgcctccagtggagtcatgtactatatttatttctgtgggctcatttcaaatgcacgctctgttgtgacctcctggctgcacgtcttccagcaaatgactttacccctccaggcttcagtttccccatctgtaaaagtgggtcatgtaagatcctgttttctacgatcattaccaagatcaaataagacgttgcatgtgaaacatttggtgcagcttctggcccatagaaaacacaggcaggctgggttaggttgtgctgtgctgaccatttccaaagtttcagatttgtttctcactcatactacttggatatggtgagataacaggggatgtcttcagagctgggacccaggctgaggaaggctctatcttcatatgtacatgattgtccagataggaaaagggtaatgtggtgagtatgcactggctttgaagcttccacttggaaacgttctttggtcgaaacaggtcatgtggccactcccagcttccccagggaaagggagggccaatctcaccacacaagtcattaacactaaagacaacgacggtactcaacaaatgacccacgcttgagaattatattattattattattattagtgtattactattgtagttatttccataatccatcattgttttcctccatgtacttactctggtttcagaaaggctgagatatttcattccagtgcagaaactggactcccatctcttaggaaaacataactgagattattattcataataaattaaggatagcttctacttgacaacggcatgttttgtgccaggctctggactaaggacttcagataagtgatttcatttaatcctcacagttccattttgaggtgggttctgtttttgtccctgctctacagatgaggaaactgaggtgttggaaggtaagtaaacttgcccaaggtgacctggctcataaatggaagaatggacttgaaccccaaacccatacccttagtcaccttgctgagctgtctgctaagagcaggggatcttagtctctggatcttcaaatggaagttggggttggctgagtggagatgctatgcactatcattgttgatccacagaaatagggattcagccctggccccactttctctttttagccctgtttccccttcctccctgtcttccatctacccaggatccatccccatgggtctttctattcccaaaatgtttcatgtccattgcagcctctgaaccctgtttactcacttccccatccgttcctccatcctttatcctcacacaccccagctcagccttcaaggtccagcccaaatgttcccttctctgggaagacacccccacccccaccccaggcagaaccaatcccacagtctgtcagctcccagggaattttatacatttacaaaatataaatcttttctagaaatgcacacgtgtgtgtgtgtgtgcaccccccaccccccgcacacgcagcctttttagaggagggaagaaattggtctttgcttttaattaatgccagctctctcatcctgacttttaatactgccacctcatttgtcttattaagtagttagttttgcttttaattagtgttgtttattgtcactgaattttaattgtcgttgtaaggtctcagcgggccttagtggggatgtattagaaacactttctgtcctccaaggagcttggatggcagtgcctctgaggtagaggagggaaggattcaagggggttgctgaaggctggtgtatttttctccaggcttcagtcaattctggttgtctttggaatccctgtttgctgcaaggtagcttggtctcacccagaagatacacagagaaaactcaggaaaatggcaggaatttgattcaaattggacttgaatttgacttctcaacttaagaagaacaaaaggccgggcatggtggctcacgcctgtaatcccagcactctgggaggctgaggcgggcagatcacgaggtcaggagatcgagaccatggtgaaaccccgtctctactaaaaatacaaaaaattagccgggcacagtggtgagcgcctgtagtcccagctactcggggggctgaggcaggagaatggcgagaatccgggaggcagagcttcagtgagccgagatcgcgccactgcactccagcctgggcgacagagtgagattctgtctcaagaagaataaaaaaaaaaaaaaaaaaaaaaaagaagggtggagaggggacatattggtccatagtagcccaaaaggctatgatagattgatagattcaggcatggctggatccagcattccaacagcatcatcaggaatcagtctctatctcccagcttttatcctttaccaggcttttcttgtgtgttggcaaaagtgatcaatagcagctatagaattctgttctatcagtttagcagcccaatggaaagagaatgcttctttccacatagttccagcaaaagaccaactcaggtcatgtacctatccttgaaccaatcacagcagcctaaggggtgtaatacactgatgggccaggcacaggtcattggcccacctctaaggactagggttggatgagccccacctggaccacacagattgatactgagagaggatgttttcccaaaagaaaattggggtgactttaccaacaaaaggctatccagataaatgctgggtaggcaaatgcaatagatgtctaccctagagatccactgcagtatctcactcaggcttaagcaaacacctaggatttagacctttgtttctctccccagctctgccctcaaataacactaacagtgtcctccctgactgatacttggaaaacactttaaattacaaggccccttcacatgaattaactcattggttcctctcaacaaccctgcaagacaggcataagaagaatatatatatatatatttgagatatgtatatatgtgtgtatatatatatatttgagatatatatatgtgtgtgtgtgtatatatatatatttgagatggactctcactctgtcacccaggctggagtgcagtggcatgatctcagctcactgcaacctccacctcctgggttcaagcgattcttgtgcctcagcctcttgagtagctgggattacaggcatgcaccaccatgcccaactaatttttttgtattcttagtagagagagggtttcatcacgttggcaaggctggtctcgaactcctggcttcaagtgagccacccacctcagcctccccaaggctgggattacaggtgtgagccaccgtgcctgattaagaataggaatttttacatcctcattttacagatgcaaaacttgcttagagtcatgcagagactaaaaaggggaggtaggattggatcccagtgctctgggtctgaagccagcaattgtctcactgcaagaggctgcttcaccagccagtttttgctgtgtaacaaaccaccccacaaaatagtggcttagaacaacaaccatttatttaccttatgattctctgggttggcaattgggttgagttcagctgggttcagctaggccaaacttggatgatcttggctgggcttgttcgtgtgtctgtggtcatcctgtattttggctgggactggctggtgtgtgacaggacagccttagcagcttggacagctgtggcctcttgccttatgattgctcattctccagcaggctagcctggtttctcaaatggtgattgcagggttgctaaaaaaatagcaaaagagaccaggctctgaagggctagtatttccaagcctctgaatgcatcacatcttctactgtcccgttggccacagaaagtcttagagccaattcagattccgtgggtggggaaatagatttcacctctggatggtaggagctgaaaaggacaaggatacagaaagggaagacatggggctattttttgtgatcaattcaccccatctgcagtgagcttacctctctatttcctgagctgggggagaaagagggtaccaaatacacctttagggagcaatgctggtggaggaaatttggagcaccgtgaaatctatggaagcatttagtgcttttccaatcacatcatataagttatgctccactttagctgctggagagaacgaacactgatggacgatgatggagatattgataatagtgacaataattaatgtttactgagcacatactatgttccaagtaccacgttttctttcttgccttcattttcaaaccccattcttcacaacaatcctggaggcagcatagtagagtgattaaacatgcaacattgcatcagatcctgtaggtacaaatcccagatctgccggtcgctggctgggtgggtaagtcacttagtcttctaagcctcggtatctccatctgcaaaatggagataatacttgtaccttccttaatgggtgtttgggagagttcaatgaagccatccactgcaagcatttagtccagacccaggtacaacctaagcagccattatgatgaagtaggtagtgctgggatgaccatactcattttatcaatgaggaaacaggcccacagacattatgtatctgcccaaggccatgcagcttgtaagtggcagagcagtggaggatgaactctgtgcctactttaaaatctgtgaaatggggactgtcctgtggggttatttagaggctcatggcaggcaccatctgttattgctatgtggcaatgggagaaccatatggaggggacagtgagtttgctttgttgtttcaaggccaggaacacaaagtcacctttgtctctaggacctcccaggcctgtctctgtcattgtctctggcaccaaccagattggcatggaaggagccaagctcttgtcgtttcagccttagtcggcttcagggaaggctgagaatgtcccagctggctctaggaacaaggaaaagccaacagcagcctgtaccgtctggacgggactggatgtgtaagggctgctggagtcccatgagagaaggcaggaatgaccaggcgggcaggcaagtgaaggggcactcggctccatcaagcacagtagacaaagcaggaggtcgccgtctttctctttggtgtcccaagtgtccttgtcatagtaagggtttgtagaaatcccaacagcctggaaaatagtcaactctggatgcatatttgagatggaatagaatatactcagcttgcatcactgttcagaggctttctgggtctcctgcatctctcaggccagaagtttacatggtcttcatgatctgacacccacccccaccaccaccactctgatctcagctccctcttgctctctttactccaaccactctgtcttccttaccatttctccaacttaccaagcacatgcctgccccagggcctttgcatttactttttcctctgcctgaaatgctctcccccagatggccatgtggctcagtttattacccactttgggtctttgctcaaatagcatctctcagtgaggctccctctgaccacctatttaaaatcacacttccccccaagttcccaatcatccttccctcttttatttttctctaaagcactcatcacctgtggacacatttaatattctacttgtttgcttattgtcagtcttccctactagaaggtatgttccatgaggacaataatttttgtctttgtttgttttaatgttatatcccctgtgcctagaacagtgtctggcacatagtaatggtaaatgttccataaatattttttaattcttctaatttcccaagagaagctggcaatctgtgtttttaattaaatcctgcgcttttaagatattgattgaattttacccttaaaaaaaaaaaaaccccttcatgggccaaacaaaacattttcagcctggattctgttcatggacactcgtgcttcccccaatgtgaggcccttttgttaaagtacattttccaccccatcaaatagtcagagtgattttttccagatacctagttgagcagtgatatactgcactcaggggaagagacaaggggcaaggaaagagatcaagagatggaactgtctgggcattgtccaaacttgtggctgcaggttctgctgcaaagcgtctggtttaattccaagactgttgggatagggaggccaactgtggcattgaactccacgcagacagctgcagctcctgccggttccctgcagtgccctgaagtgctgcataaaatccctgccagcccagccccgctgggtcacgttcagacacctgccacagcaactcagaaactaaataggctttgcgttgttttttccattcaactacaactagcagaaaaccctggagattttgggggatggaaccactgttccttagcaagcgatgctaaggagagccaggggagaagcaggcagaaccaatggcaaaggaggagaagggaggaccctggaatctgggttacctggggttaggacagagtctttgtagcagtctgagattccaggtctgagattcagtctaagattcagattcatccagctatccagtgcttattattagacgtttagattgtttgaaggaatttaagcagaaccttggaaagttcacttaaactttcctcaactcagttatcccatctgtaaaatgggacaagaagagcacatacctcataaggctgttgtgaggattgaggagataaaacttgaaaggtgcttagcatggagtaagcccttgatatttgaactttcagttgttgttgttgcttcttttgttactgaaagtagatgattctttagagtttgtacaaggactgtaggggaatttctgtccagctaagaaagaagagctggagtctctggtttcaggagaagaagtcattttatgcttttgaagttgcagctgcagggctggatttaagccactgccttggccttacccaagccaaagtatgtgatctctcagtgtagcctgggagagggctgggtgggtaggtatctctttgtctctgaggctgagaggtgaaaatgcacccaggggccagagggccaggaatggacaatcaccaatcctctagacacttatcagaacccaacaatccaaagcccaggggcaatgaacgggtgtgaacagagtagtgagtaagcacatgggctttggagtcagggtccaaaccccagttctgctacttggtagctgtatgattttgagcaagtagcttagccaccctgagcctgaattttcttacctgtaaaatgaggataataccatctaccttggagtaggattgtaaggagtaaagcaaataatgtaggtatggaatttggtgcatagcaggtgctcagaaaattgtaagtcatcatcctatacccgataagtataggagaagcaggaaaagagaattaccactttacaagtctttgctgtgtgctagggagtgtagctgatgcttacttaaacttatcagctcagtgatgccaagtttctgcagtggtcctagggctggaatttggtactatttatgtgacacttacatttatacttttgcttcttgtatccatggttggtttccttcttctggtgctccctgggcctcaggcctccagtctattatgacgatggtttctctgtagtgagtgatgggaaagtggggagtggtttgagaatgtctgaggttcaccactagactttctccatttctgttgactcaccctcaactcctcatgaagagttggctttcatgaagtatcatctgcaggccagtaggaaaacatcttaggagaacattttaggatcacgctgtgttggattagaaaacagctaagtgaccactaggggtgatgtaatgagctcgtggagcagaaccatgcttccctgagattctcctgtctcctcccacacaaggtcaagttccctagaagcagaacctgagatgtgcattcttgtactagtgatggactcagggagtgctccaaggaggaacctgctagggaatgagggaagcaggaaagggcagcagaggaagctaggcgagggcgtggcttcacctgaagtctggcctcagcccaatcctcagggagctctggagtgtgatggcagcacacagccgtcttgccctagaagaagggggctgtacttttctaccctcctcttattcattagccattggctttgtgctgctccctggtatctctgggcaaagcagctcctgttggatgagggcgattctctggaaaatggtgctgctatgagcccttagtgtagcccttcatggctaacactcctagaggctgggattgggaggatgcaccagctgtaggggggatccagatgaggaatcaacagtgactattagggtgcctcc

SEQ ID NO: 714 - DNA, 32744 bp, Homo sapiens
  source 1..32744: mol_type = other DNA
acaagggtcaagtagtccagcattctacagtttgtgtgtttgagagaaaaataagcccataaaaacattctaaccttcagattaaggtaagactaatgcgtttagggatctccagtgtgatatctgatttcttaatttctgtattttgtgtgtggtaggggagtagtgggatttgctggtcaggaagaaaacagctccttccaccatttgatattgtattttacagtaaaaaagggagaaatatgtacagaagggacattttggccattggtagctatgagtttaatggattgaggagagaaatataagtatctttttgttattaacacttgattctatctatgaagtgaagcattgcactaggttctactgaagagtgagtgcctccaggaacaaatatgcattctagtgacataaaaaaatcaaattcacagcagaagtgttgcatcattttgctataaatctctcacacctctctatataaacctctcacatctctatataacatagattgtccttttgctctgaatttctttcatttattagaaaatttagatgtttcatttggaattatttaattgtttttacattcagttccatttttgatatggacaaatatccagtatggatataaattcagtagaaggattaataaagtctgaaaaacctggaataatttcaacatgaatatgatactgtaacagcttacagaaatgcgatattaactgtgaacattaatatactctgaaaagatgcatcagggtttaaaaaatttctccttaatgtagattgttttaattaccaatactgtcttcctcatttaaatgaaaaacgtaattttacaactattaatatataacttctctttgctccaagtatatgtgtatgcctggagaaaagcatatgcctggagaaaacaggagttatatatttatagcattcaaaatagtataaaatattgtttacatgtaataatgcatttagaagtactacttcagtagtagcctccttaaaaagtattttaaacacaggaattaagtatataattttttcattttgtaataagttgtttatatgttatttggacaacagcttacacacaaaagtgttacaattcataccctaggtcttaaatgcatgaagccatttgtttggactctagtgaaatccttaaattggtccttgcatccctcagtatatatatgtacatacccacatatacatgcatatttacatgtgggcaactaataactgagaaaatgtcttactgctcttttagttgttgaatcatgctttttctatgtatttatgatttcctgaaattctttgctattttaagtttgggtattagctatgttatccttctatttattcagatttgttaaagtcttctgataggtttagtgaataaaattattgagcttctacctcttttcttttggaggcccatttagtatttttgttgaaattacttccttattattatttagtatgttaagggaaggaaaaggaaatgtagctttaatatgtaaaatgagcagttcgttttacttaagctctattatatgatgatgtatcttatgactattttgccatcctgcgtaagcacttagctaatcatctttaatacattctacttaaaatctacttgtaaatatgcttttgtacattcatatcttacttgtctgtggtctctcatcctctttctctctcacccctctatatacattcacacattttccatgatttcacaaaacttctctccaacctcgttccattcctggttatctctttctgtggggagtatcatcatttcctttgacctctgtttctctacatcttccatcttgcttagcccatggacttttgattttactgaagacagcaaaaaagcagatggtgcttctgttacttgcagagttagcaaccgctgtggttaccttaggttctgaaagattatctaaaatagggaggagctcctagaggaacaaaatataataaacatgtagtgtactgggataaaaaattcacttgatctggtctctctctccttttaacaaaaacatttctctaagaagtgattaataaaacataccctactgcctcactttctcttttaaaatctttctttcaaattcccctatgacataaaatcaatcttcatcactttattgacactgtacttccaagggtcacctgtagtgctgctaggaaattcaagtacattcatttatttatgtattcattcatccattcaataaatatttatttagtgacagctatgcatcaggcattgctgagcactgaagttacagtagggaacacttaagtctgcctttatatatctccagtctagttaggaagggtgttaactcacccaaataattcattacaagtgtgataagggctataaggaatacttttccaaattctcattttattcatccccttggctctatgtgacacacatgatcaattcctacttcttaaattttctctttccttcttgtccatgactctatactatttattcaactgcttttctaccacttcccttcttgtctatttttccttttctcttccttaagtttgggtttccctcaaaggtttagcatttatttagcctataacctattacgttttgcctttctctataacttcttatcaacccttagttttaaatatcacctctaagtggatacctccaagacttccatttccacatcttatcttttccatctgctatacattttcccacttgtatgtccaagggtcactcgacattcatcatgattgtagccaaactcacagcttttatgtcaaaccacttcccctttcatttcatttgtttctgtgaatggcattaatgatctcttggtttctcacatttgaaatcttggagtcaattttgcttctaacttttcctttgctctcaatatccaaaccactaccaagtccattcatttctttaattataatgtatctagaagccatcctctctcatctcccttttctgttatttttttcttttattctctattttctcatccttttttccctcagtctaagagctacctacaattcaaggttttggtcaggccccatctccatcagaaagtccacacctcatggatatcttctttttctaagccccagaatcattggggtagtgaaaagaacatagccaaagagccaggtttaagttttgattctaccattcactgccccctgtgcactctctgtgaaccacagtttcctcagactcattctatctcatatagtggccacaggaacaaatatagtcatggagaggaaatcattttgaactatgaagaactatatagatattaaagtaagatttgttgctggaagaataactcagtagcagagaccaaaaccccaggtcttaactattgaaatcatattgtgcaggggttgagagtgttgactctgcagtcagatgacctgagtttgaatctcagctctgctacttaccagctgcatgaaattgagaaaacttagttagctttcctgttgctgagtttcctcactgtcaattggggataacaatagtttctactgataagagtgttgtaggattagaacgtttagtaaatgtaaaatacttaaaatagtgcctagctcatagtaagtgctctgcaaatgtggaagaggtggtaggggcctatgaggctaagtgtggttacgaggtgaaagccaggtattagaactgagccaccagatggggattaggtacagcaaggatgcaagcacagagctacagactggacacatgtacctagatgaatccctcatgattcagataaaaaaaagaatgatcttgccatttggggcagaactgagcaaatgatggaggtatgaacgttctgagcgaccattcggggcacaaaaatggggataacagtctttcagacacattttctttttgttaaagaagaacaaatgttagattgcccttttgtgttgtgaaatatgtcagtatatcatggaatcaaaatgtcagtatccaaataaatgtccaaatgttgagaaagctgactcaactgtcctctatattctagaaatccgtctctttaacagtcatatgcttattgcatttcagaggacaagggcccttagaaatgtcattcctcacaatttataggattattgcccaaagtgtgtatttttactaatacacttggagattagtttgtttgattgtttcatgtcagaaagaaaaataataataatacttagaatattctaagggttgttctaagtgccttaaattttttaactcatttaatcttcacaagaacctcatgagatgaacatcatcatcatcaacatcatcgccactaccatttacataagaataaactgaggatcatagaggttaattggtaattggaccagatttcaaatccaagcagcccagcaccagaggcaattttctcaagcactgagtgctatcatatcagcaactctgtgttttagaatctggttaaaagggcatgctctggagtcctagactgctgttacatgttgcatctccagttttccttgacaagtggtaataaatgtttgatatttttcataattgataaaaattacttacataagatttatactaagtaatccaatgtccagtaatgctgtgcaagaagagtctggtttttctcatccattattctgtatttgagcatcaaacaaaggcctcaaatactgatgctctctgtttcctagagagtatgttatactgctggccgggcgcggtggctcacgcctgtaatcccagcactttgggaggccgaggcgggtggatcacgaggtcaggagatcgagaccatcctggctaacatggtgaaaccccgtctctactaaaaaaaatacaaaaaattagccgggcgcggtggctgccgcctatagtctcagctactcgggagactgaggcaggagaatggcgtgaacccaggaggcggagtttgcagtgagccaagatcgcgccactgcactccagcctgggcaaaagagcgagactccgtctcaaaaaaaaaaaaaagagagtatattatattgttttgccctgtacttaactgatgttgtacccgtgtacttaactgctgctgctgcccgtggggatattttctagggtatctgtgagtttccatctttgtctttgctaactatttcaaaagttcaggctcaatttttggagttgctatgtttgttttctatttcctattttaactacttcttgttcatttaaatgttctctcaccgtagtttagtgggattttttttttttacttttctctaagcgttagctacaaaaataacttaataggcttttagttcattttcttcttcactgaataagaatattaaaatcaaatttaccttcaccgaacacttaataacttttttcatttccaagaaggcccagtgccatttgtaactcttgttaaagtttaatttagcagtttccaatttttgtaacagtcgacttatccaggctaatttgatttaatatttctaacagaatgccaggaaacactctgttcctacaataagaacatgtctgattcatttaaatgaataagaacacgtctggttcatgtaaatagacttcagcggcatttttgttttggtgttgtgcagtcaaaaaatatttccgagagaatatcaggacttggaaagaaaccaagaaaatgaatacaaaacaactctaagatacatatcattctaaagcaagtaaaatcctcaagaccaaataatataatttaaacaaccatttaacattgataatgtttactaagaatggaagtggtagactttaccagaaaatatagttgagttggggtgggacgtgggggtgtgcaatagagaaaccaaacttggaaagaagccatcagataatgatgttccaggttcaaatataaactttaaatccaaatatacttttatctggattataaaaacgaaagttcagcaacagcccactttgtaaacacagaacaagagtgatcatatcaaacaggtttacttaatacaaatagcagagtatagacaaatccattaatatatccccctaagagctatttatgtacaacaatagtcttctctccctggtgtgaagttacattaaaatcagtatatgattaaaatttttgaaattgatttcattaaatcaagtgacattatatcaaagatcagttttcaaacaaagcagtaagagcctattgcaaaataggcatttttcccaactttcaacagataatggtatatccaaagatgtctgtggccacaaacaaatgtataatttttaagttgcatattttgactagaactagatatgtactaaaaaaccattttgtgatgaagaatcacttcccactaattgagagaccagcacagggagaatactattgatcttaaatacaaggaagtccagacattaatatggaaaaaatatagattgggatgtcctgtttgcattagccatgttcaagaaggaagaatttaatttgctttgaactactcacagctgccatctaattatttttgttgactgttacagagtttgagctccaaacacaggaaggttatttctaaatcagttatacacaacaaccaaacagctattgattttctttcaagtgaattcccatctgactcttattgttcttgtgaataatagtcatatgtatggctttatacttaagcacaataggatataactaaatattggctcaactcagacctaaagagtaggttcctgaacagtgagaatatcatctagtgataatctttcactgcttatactgggaaaaatgttgaacctgggtcagcaaacatgaaatgtaggttcagtactgctcctaatgataatgccaaaggctcacactttctgaggatttaccgtgactcaagaactattcaagtgttttctatgtaaccaaggcatacagaggttcagtcatgtttctcagaaattttagagccaagatttaaaccagagttcctgctttgtaccagagtcactttggtcagcttaagtaacttccaaaggcatcttcctggggtattttttcctgctgcaccaatttttacctttcttcctgattctcaggctcactcaatctatactggtatctgcgaacctgtcactgacctcaccccatctccagcatctcactgattggtttcctctccatgatcttttcttaaggggaccctgcattctttgggcccctcatcattactcaaggcccctagatctactggccccctcagtcctcctagtccctcaaccaccaccaactcctcctctcctagcttagctcccccattcctgctcacaggagccaggtagcatcaggacctccccaatctcattttcctctctaccctctccacactctgactactgtttcagcttttatttctttctttagtcagggcaatctgctctgatgtcatatcctacatcctctctacactgtcataataaaactcttttggtatgtacaagtgtgtaccctccaaagcaggagtgctgggcactggtataaatttgaccaatacaaaattaaacacacacacacacctgtgtgttatgttgtatattatgttatatataatattgttgtgtgtgtacatatatgttatatgtatgtatatttaattctacagtatattatagtggtcaagagcacagtcaatagagtcagaccccttagtcagaatccagcttcaccacttacaagctgtgtaacactggacaagttacttaacctccctctgccttggttttcctacctgtaatatgggaatagtgaaagtatctaaatcaaataattgatattgtaaaccaaaaggtatctgagacaggtctcaatcaatttacaaagtttattttgccaagattatggatgtgccagtgatacagcctcaggaggtcctgacgacatgtgcccaaggtgattgggacacagcttggttttatacattttagggagccgtgagacatcaatcagtataggtaagatgaacattggttcagtcaagaaaggcgggacaactctaagcagggagggggcttccaggtcacaggtagataggagacaaatggttgcattcttttgatattttgataagcacaatttacaggaatagtcacttatgccttagtctggcttagtgaaaaaacagggcaaaggaagcaatcagatacacatttgtcttctgtgacagagggatgactttgagttctccctgtcctttgtccacaagaaatttccctgtgagaaaaattgtgagggaggtatgtagcttttttatctttgtaggtatcttatttaggaatagaatgggaggcaggtttgcccaatgcagttcccagcttgacttttcccttcggcttagtgattttggggtccagagatttattttcctttcacaatgtaaagattgtactgttcatatatgtaaatcaagaattcataacagggcctgaaacttgtatataagtgctgagtgttcactatcattattaccatgactcataaggaaaaagcattaaggcaagtataataatggagcaggaaatatacatttaagtggaaaatatagtacaacatggataatatgacatgtgtgattaattacgacttgaataatgcgaagcatgtaattatttttggctttgcatttgatatctgaggaatcccaccatttcacatgaaaaagtgcatgtgacaaggaatcttccaggaattttgcattagaagttccttttgatcctcctcaaaaccctgtgaagttagtactattattatctccaccctgtatgaaaagaaaccaaggttcagagaggttaagtaacttagtttctgtaacatagtaattgccaaagctaggatttgaatgcagagcttcctgactccaaaacctgactctttgcaattctccacttgaggtgtccattggaaccccataggacgttaaaaaaaatccatggaacacaaactcaagagattctgtttttttgaaaagcagcttttgtgagatataatgtacatactgtacaattcacccatttgaagtgtacaattcaatgtttttttttttttagtctattcacagtgcgtttagccatcaccacaatctaatttcagaacactttcgctctgggcgggcatgtccacagaatccctggggtcttaatttcaaagccacagaccttgtaggagtcttgaatgaacttcaaatgatttgtgaactttttctaggatccacagctttcactatcttctctaaagtgataaaaatataagccaaaaatgtattaagaaactctagaccagaatggccttgaactttaaggtacaaatcactgggggaccttgttaaaatttagattcaaattcagtagctctggaatgcgctaggcctactatcattaattttaatgataggaatgctcactttaagttagatgttatgtgccctaaaattccattcttctctttagtagatctatgctatgaaataactgcactcaattattattgttatatttttaatgtcatcggtaaaatattggcagacatttattttcttgattgatgcatacttatccacaaaatagctatggttttggctcttggcgcaaaaagtctaaaatatttactaattgttccttaatagaaaaagtttgccaacctctaatatagaccatgggggaaagccacctttaaggagcagaaatgttgttcatcttactctccacagctccttgctacatgtggcagacatgacattatcaatcagacttataggaatcctaaccaagtatgaggggcagcaagctggctatatttatgtataactcctcctctagaggagaaatctgggcagatgagggtcaacttcacttttagtttaaaaatacatctccctagagcttcaagctgctctcctgggtgatagcatgggtgggtgtccacaaaagaccttcatgcattttcagttaggtcatgtctctatgatcttggaagcaagattccctaagagtagtctgcaatccatatagagagcttggttaattgggtttggatgatggttcaccaaacgtacaggtagaatattttatcttcttacactcaccttcaagctacttacattaaggtgtttgttcagaacattgaactttcaagagctgtctgaccatgcatttcatatgtatgaaggcatttctgcttattttccaacactaactcactttgaatgctgcaaaaatgatctatgctatgttaatgcctgaatatgcatgacttcaaaattctccaggcttcaggtggtctcctgcaccataagcctctactgcagagcatcctcttagacatccatcttgaactattttttccttatgtcttagtctatgactttagatctcctaactaatggttgatttttcagccaattttgttgttgttgttgttgttgttttttgatgcgagaggttgcccattctcaaaacccacttccttcttccaaccaatgcccattgctacaaggcccgcaactgtgttcagctttcagcatgctccaggggaacaagtacaaagtctgacctggatggaattagattatgcaccaaaataattccaggatttactaatttatatcattagaaacctagaatgttaggccaaggaagatgtaatataacactggattaggccaaatgtattgatatggtgcatttttcagagattctggatttagtgtgatacttcttgcagctggaggtgttgttaacagtttacttgattgtttagttgaaatgtgaacttagcaatgacctacatcattgactctgtgtgatatacttgactcccagttcattagacttaactaactgctcctcccattctgttgatcatccctcttcagtctctttcatcatctcatttattcctcttgtccctggaccaaaccgaagatcaggctgcttattctcatggcccgataacgagattcagataagctgggaaagaaggaagtttatttctgtaaccggctatggctgaaaaatatctccagaccaactcaaaattacaaagttttttgactttgtaattttgagttggtctggagatatttttgacaaagagcttatataccttctaagctatatgtctacatgtaagtgtgcattcatctaaagacataagtgatttacttcttctattctataactaagatctgactcctaaagaccttcctctggagcctcagtaaatttacttaatctaaatgggtccaggtgccggcggtgattacccttatcttgtctcctgctaaatcatggaggtctggggagttccttcagacccccaataaacttgtttgtggaggtctggggcgtttcttcagacccccagtaaagtttgttttatcctaaatgggtcctgttaagaattccttcattatcttgccatacttcaaggcccaggaaaggcctgggcaaaactcttggtgggcttttgttaccttccagcctttgtataagggcactggctctatcagcttttaatatttaacttcaccactcagtcagtgctgaaacagttgttatggaggcctgcgttagtgagacctggcctgccacactctgtccattctttaaatattgttgcttctcatgattctatcttttgcccctttcacttctcttcctggtaatctcacttgcttgcacagcatcaaccaccatccaccatcgaggcaccaatgattcccaattaaatacctctagtatagacatctgataagctataaacagtttatgggaagtttcctattctaaatgcctttctggacaggtctttgttgttgcatcataagtacctttgttgttgcaccataagtatccggacctcaacatatctaaattgcaattaattatttttttttctctttcaacgttttttgtcttgtactctccatcactgtgaacagtattatcatcaacatttctaggctttacccccgtgttactgaatcaggctctctggagatagacacccagaaatctatttttaacaatatacttaggtattcttatgcacactaaaatttaaaaacctttgcagttccccatgctggaaacctcagagtcattctcttttctcttccataccacccacatcgaagaggtcactggatcttattgagattattctaaaacgtcccaaaagtgactcttattttccttcccactacacagctttagttcctaatctctccctggcacttctgcaagagcctcctcattttgtctacctgacctttcccctgtctttcatccaatcactgagtgctggtctttcaaaaaacaaataaaaaattcaaatatgattgcgctgttccttggctttaaagcttcaacagcttgatggcatgagaacagttttcaggcttcttaaggtcatggaattctttcttcaaataaaatcctaccaggaaatctaacttatagaacagatgaaaacggagctgctctgtttgaagcagtcgtcggcgccacaggcttggccactcagcctctttcgctgtgtttcctaagaaaacattcctgaagatacagtttgaaaaacactggataaagtccatattctttgtttggatgccaaattcctcccactctgacatccccctttctcttagctttccaatattaacccagaccccagacctggagttagtcactatttcttctggactagttgtgtgttcttatgactttttcacatttgctgtctctacaacctagaatgaccacttttttcttcctaattgttttttcctttgtgttctcaaagccaaaattgggatttatgaaactgtgattttatgtttatgcttgtctccactagaaaataatagaaaatagagaagccccttgaaaacagaacctatgcattcttcatgaatgtatcccctagatccagcacagtttctttttttgttttttatttgtttgtttgtttgtttgagacaaagtctcactctgtcgcccaggctggagtgcagtggcgtgttcttggctcactgcaccctccacctcccacgtggagggtgcctcagcccgggtgcctcagcctcccaagtagctgggactacaggtgtgtgccaccatgcccaactaactttttatttatagcagagatgagagctcattatattgcccaggctggtttcgaactcctgagctcaggtgatccgcccgcttcggcctcccaaagagctgggattacagacctgagccacaatgcctggcccaacatagtttctgacacatgattctatacgtgtttactgcacgaacatttatatgctctataactcattctatctgttctttggttttatattttcttcagaccgaacatgtctttttgaattaaacatcactttaggaactagatgtattaacttcaaagctatatgacactcatactgttctttgcctgtgttgtagcctagcatgataattattgataatcagtggatatatgcattgtgcatcatgacatatgaagcagaggtaatatggctataagatatttttgacagaaatgccatttgctgtatttttttaactgattttatatgtaacatgtattcattgtaaaaacatataaagaaaattataaagaagatattaaaatacatttataactatccagaaatagacttaatattttggcttattttttctcattctttcttctataatacatatatgtgtgtgcatatatatatatatatatatatatatatatatatatatatatttcttttaatataattgggaccatactgcataagtaattttgtatcctgagtttttttcactgcctttgtattgtgagccttcaagcatgccatcacatataaaaagactattagtattattaataatggtattaattaaaaattatgatgtttctaaggaattgctaagatttataaattcttaatagaaagtctaggaagccagagacctctgggtattttgtgaatcaaagggaatggaggtttgtgttggactgatgcattttaatgacgtattgcttaacttcattgagaatagaaacgatggaggggtctaaattttctgagcatctgttatatgccaggcattgtgctagacactttttatacattaactcattttaatattcaaatgatatattcttcaaacccaggaagtagatattaatatgcccatttaacagatgaataaactgagatgcaaagacaaagtagcacatctatgttattatctcagggagtagaattttaattccattagtttccaaagcccataccctttcctctaccccacactttctccaacaccaactttgagagggtacacaaagtcagtcttttattctgaagatgttgtattagcagtgcttaccctgtggaccataagcccttgggtgaccacagtttataaacccctgaaattacctccctttgtcattagaatgtatatgtatatttttgaggtagagagcctatagttgtcactgattatctaagggatcaactgttcccaacaatgtttatgaatctctactgcaaataatgggatgtatacaagtattgcagaagccctttgaggagtctttagttttgcttgtcaggccctgtggtgaggggctatattccaattttcattttaggcatcacttctcaaatgtcttattttgcatttaattcataaatttattcatttggcaatattttcaaatacctactatggtgccaggagttgtgaggtgttaggaatacagggctgatcaagacaaaacgagatatcccacagagcttagacattagcagggaaaaccaatgcatgttggttaaaatcagcattttaaatcagcatgatgagtgcttggcatagtccttagcattgttcaccaaatatttacgatttcttcctcttgtaggcagatggcaggataccatttactggcccccttgtaattgggtagggctaagtgaccatcagttctgtttaaggagttgtaagtagaaataatgtttttcacttccaggccaggacatttaattcctactatgaaacctttcagaactcttttttccctctggtgtggcaattggcagtgttcaagatggtagctccctaaacagcctggattcttgagggatatatagcatggccaagaaatatgaaataaacctgtgctgttacaagctgttgcaatttgcgagttatttgtgtcacaacatagtctaccccagtactgctcaaaatgtctgtgatgaaggatcaggttgtttgttacttttattttcaacctggatagaatagtatttttgcaaaatacaatttaagtaaattagcagataaatgagacatgaaatacataaacattcaagtacaaattttcatcagattcaacagatttaaaattactctgtcaaattactataaaaatttctaaatgcttattcttaatttctttacttatataattgcaaaccagtaagtttacagacctgcactggtttgcaacccaaactttgaataaagctgtattagcctatcccaactgatacagtgttactgtaagagaagtatgaaaatgtattggatagatactatgagtttccaattgctgctgtagccaatcaccacaaacatattgtcttaaaacaatacaatgtattatcttacagttctgaaggttaaaagtccaaaatgagtcttgggagactaaaatcatggtgttagcagggttgcatttcttctggagcctgcaggagaatctgtttccttgtcttttccagcttctagaggccatctgcattccttggcttgtggctgttcctccaacttcaaagcccatcacctcagcctctgcttatgtcgtcacacctgcttttctgactttaactctactacctccctcttgtaaggatcattgtgattacattgggatcacccatctaatccaggctaatctctttatctcaagacctttcacgtaatcacatctgcaaagttttgccatctaaggtaacatattcacaggttctggggataaggatgtggacttctctgggagccattattcagtttatcatagatagctaagctaaactaggagtcagccatttaagtagatccctgtggatacttaggaattaggagatggagaaatgggggaagtatcccaggcagagtcttacaaataggaagatctggaggtgaggaagattatggcttttttagaggaatgaacttttgagtgtggttagaggatagatacgagagagagagatcagcaagggacaaatcatgaagggttttgtaaaccatattaaacaacttgaactcttaaagagcaaagggaagacatcaaagggtattcagtataaaagcaacaattatcaatttgtattttggaattgcatatagaagagccagattggaggcacaaaactatgatgctgatgaaccacggtggtgtcacctaattcacagcatgtctgaaacccaaatccattatttcccacaaaagccagcacattctccatcttccctattgttttcttctaggattcaattcttaacattatttttagcctctttctttctttggcttcttactctagtcagtcaccacaccttattggttcttgaaaattttttaaagacataatatatggttacatgaatacatccaaaataataaacaatatggaaataagtcccttttcatcccttctctgacccctaacaatccaactctcatcttcatatgcaacctgattcattatcaatatgtattatcctgtgccttttattatgcatttacatttattatgtacatgcatatatctactgcattgttttaaaagcatttgcattaaaaagcataattatcttgtctattttcagctcgcaatataacttagatattttccatgtcaatatatttattttaaatgcctcattttaaaattgaacatcggtattgctctcttttccagcttcgagagcttctaactctaatagattctaacagtttctaactttagactattacaaactttatcttataacttatttttcaaatctttctcttttgaaatttttattaaggctttctcttagccagcatttttaaaggtagaagtagtcttctctttaaaaatatcaaaatacacaatgccaagaaaataaacagtgatcttaaatattaggttggtgtaaaagtaattgcagtttttaccattaaaagtaatagcaaaaactgcaattacttttgcaccaacctaatacctttttccaaactgagagctctgtgaaaattcacagtggacattaaagactctgagaagttctgtagaaaaaaaaatatttaacttggtttaactctacatatccaaattttttgttgaactacatcacttgatatggtttggctgtgtccccaccctaatctcttgaattgtagctcccacaatccccacgtgttgtgggagggacctggtgggaggtaattgaatcatggaatcatggggacgggttttcccatactgttctggtgatagtgaataagtctcacgagatatgatggtttaataaagggcagttaccctgcactcgctcttttgcctgccaccatgtaagacgtgcctttgttcctcctttgccttccaccatgattgtgaggacccccaccccagccatatggaaatgtgagtccattaaagctctttttttttaaataaattacccagtttcaggtatttcttcatagcagtatgaaaatggactaatacagcactgttaacaattccatataatatctaataacatctcatgggatactgttgttccatgaagtcactgtgtggcctcaaatgtagtggttacaagcagggtccctgaaaccaaactattctgaattacttaccagttgaccttgggcaagttacttaacatctctgtgcctcagttttctcatctataaaataggaataatagcaatttgtttcattaggaagtcataaggattagttgaataagtgttagtggttattatttggagcattctgaggatactgctcttgaagtattggtatgaagttgatggcactgttagcctctctactgttatttgaagaatccatatcattgtgaaattaaaaaaaaaatcttgactatggcactcccatataatgtaccacacagaattgcccgtgtgagaagaaacagctctgttgcaaagaaattcctgtaattccatagcatctctctttgagtcattcagtttggggttcgttgtaaaagtactacttttttctctatccacagcatgacagttcttaccttttgacagtcttgtggactgctgtgcttgtggtaatccaatcacagctgctttgcaggatgactgctcctctatttgaaaggcatcctcaagggtattttgcgtatgtgatttagcttgtattctaagcatcctaaacatctctgtaagtgtgctgaaaattcatctaatttgtattgtcacatggtgacagtcaaacaggaaattaactttatttctattaatttcatcctaagagcactctcagaaacattctatatttaaagctgcatttcaagtacacagtaatgagatatattcagatataccctttcctttgattcaaatatcggcccctattatttttaggtgtgtgttactcaaaatagatgctttttaaacttatgtccctttgtgatgctatgagagtatttgactaccacatctttttgataatcagaagttaatgacttgtccaaagttatctatgctgaaaggcaatagaatgacatacaaagcatcttgccatctttctaaacagcttagcatagttcaacaaagttactggccacagagggaaaaatctacatctatatttaaagagagagatctgtttaagttaggaattgaacaataaaagaaaaatgaatttcaccctcctaatctgactagtgtttactagccccatttaactaaaagaatgaggatcaattactcatttttttctctacttgattaaaatgtgtaatgggtaagggattctccaggtgaggtatgaaatcgctgaaaagagacacacagtgatgatatatcctcaggtgaagtcattgcagtccagatgctggtcttcagtgcaaaggctgaaaaatttgatttggttagcacacagcaaacagatctgacatgggttcaaactaaaccaaatatggagaactccatagacaggaccagaacattcactcctgaagggagagctctatgggaagccaacttataatcaaaagtgtctggaaggaagtgagattgagcaagggtaattagctgtatgatttgagtgattcgtggcatgaaaatttctcagaatgaggctccatcacctagcatggaacatgcgctacagggaacaaacaactattttcattttcattccctttctctagttggagtctggatgggcactgacatcacctagctccttagatcttccttgtctatgccttggttcactgtctccttttcttcaccctgtatttctccggaaggactgcgttatcatcaactgcattctatcttactaaatttatagtcatagttcagtgctgccttctggagaaaacatcctgattttcttgatagagttttgcctacttctgatctccttagccaactgttactggaaaggggtcccgatccagatcccaagagtgggttcctggatctcacacaagaaggaattgggggtgagtccatagagtaaagtgaaaacaagtttattaagaaagtaaaggaataaaagaatggctactccataggccgagcagccccaagggctgttggttgtccatttttatgcttatttcttgattatatgctaaacaaggggtggattattcatgcctcccctttttagatcatacagggtaactttctaatgttgccatggcatctgtaaactgtcatggcactggtgggagtgtagcaatgaggatgaccagaggtcactcttgtcaccatcttggttttgcagcttcttcactgcagttttatcaacaaggtctttatgacctgtaccttgtgctgacctcctgtctcatcctgtgacttagaatacttaaccctctgggaatgcagcccagtaggtttcagcctcattttacccagctcctatttaagatggcattgctctggttcaaacacctctgacattttccccttcccttttacaagagaatccttaatcctaagggttgcagaggaatgaagatccatcttttgtaacttcttcatgctgaacaggggtgatgatattcctgcctaactattagggtctcttgtattcagagtagagaggagctcagttggaaagtgtcattacagtgagggccattcataactcttgagttctgacaaaaggtgatatctggaagattagtaagtgttcaatttaagaaaattttcagtaaacttattttgcattattacacaaagagtacaactgcaatatattccacaacagtaaagcaaaataagcaaaattatcccaagtaaactaaattagaaggctttccatgaactgggcaactgttggaaacaagctgatatggagtcactagccaattccaatatgtgcccagaattataatattgaaccatatttttacattacacagcccttttgtttcttttgagatgcagtcagacatcacgaattggttaacaggaataagcagggtcagtctaaattgcaggaaaaaaacgacaacaacaacaaaaaacaactgataagactagaatttaataacagaagtaccatacttctagaaacacaatttttctctgtctagttttccatttgtattaaagacaaatcatggtaagaccaatttgattgcaaaataatccttagtcttatatttaggctgattatttgtataaagtgcagcaagaataattatttttcacataggctttttaaattggctttgatggaattctgtcccataagaaatctcaaataagaccttttttttaaagccaagcccagccatgggtttatatcctcaaatacctatgaattaattcttcttcttttttttttttttttgagatggagtttcactcttgttgcccaagctggagtgcaatggcaaaatctcggctcactgcaacctctgcctcccaggttcaagtgattctcctgcctcagcttcctgagtagctggaattataggtgcctgcccccatgccttgctaattttttgtatttttagtagagatgggggtttcactatgttcgccaggctggtttcaaactcctgaccttgtgatctgcccacctcagcctcccaaagtgttgggattacaggcatgagccactgcgcccagccaattcttctcctcttgaggtcccaagataaccttcagctcctggacctattagaaagtgatattctttacttaccacaagtcagaaaccctgtacagggaatgtgtagacaagatataaggtcagttttcccaaggggcttttattggctctacaaatcaagtttgattccttaaaggaaaatgcatcattccagtcaaagccttggtaaaataatcagtttctccaattgtgtcctgttgcaaaagaaaacagattcttattgtgcttatgcaaataactatattgccataagttaagaatactcacaaataggttccaattctggagaagtcaggtagagagaaacaaatatgcctcaaattttgttcacaagagtacactttactcaactgttaaaagctataaatagctcaaaagaagagttttcttgtctctgaaaaacaaaacaaaggatcagcaacgttttaagcaaaaagtcaaaaagatcactttggtcttctattagctcaatccatgcagttaactcctgtcctgcttgatatttattaacatttcagcttttcatgagagtcctgaaagtttttttctttattctaatgtcataatccccaatgttatcagaaacctgcattcaagaacacctgttaaagtcctttagctgactataaaccaccttttaaataggattaaaataagacaacaactgttggtggatgacaaaatgtcttagggcagtcacagtcaaaagatatgattgacaaagcaatttgattacctcggtggcaatgttgacaatgtttcctgtatgatttttataccaaataagccaaacgtcatttttatattagtgtactactaatgttaaaccctatccttaataaaactttatagatacatctaaccaattttaatatttgaccataaggtaagattcttataccttttataactctttacaaatttatgttaaaaagtagattagtgctctaagaaaaacctgttgtgcttatattccaatgttcaattcatggaagaactgaataatacccctttaactttagccaatatgttcacacacagaatttcttttaaaagattagtttgtcacaagactttcccaactcactcaaaccttcaagcatatcctatctaacttcaaacaatcctttaaacttttaggcaaaaaaaagtccacattcctatgacttcttataatattttaccaaaaacgcatttcagtttctttacacaccttgcatgtaaaactgtttcttcagttgtctcaataacatattacaatgttagcttttagcaatttttacttttggtgaaaaacctggttagtaagcgattttaattatgtaccaggtgtggcacctaagacaacagataagatttgactttttccagcatagctagggggcatggctaacatcacatgtccccaggtcttatctagaatctaatgctctaaagtaggtaaattgaacaattttcaaaagtcaaacaagcagtttatgaccttaaagcatttagaaagcttaatatctgacctgtaaaatttagaccaaatgtctttattttatcaataatctttaaaactgtttttactttccaaagattacttaagtcgtgtactaaaaggcattacactttttacttttctgacaaaatatttgatttaagctcttatttttaaactaattaaagtttttaaaaatatctcacacacacacacaacacatataaatacacatacagaagaagattcagtagttgtaagacttttcatttgccagtttctaagtttgtctttaaggcatgcagtttctagggcttaacttgcaggcacagctggaaggcaaaacagatatacaaaattaaggatcccatttttatgccagatcctggatcccaaaaagagggaatcagcccatctccataggagtcttatctctcagcggtgggtggggacttttttttaaccttctaggttgccaacagcatacttctctgatctaaacatgcaaaaagccacatattcccccaataactgccattagccttccccaaaagtatatttcctacctagttattacacaacaaagttctctcataatactaagcaatttctgaccccccaaaagtgaaaaacgttggataatgcaatgcaaaacagaatagaaccttagatttttaaaggaatctatccatttccaattcctggagtttcatgaggaaaacaagtttttcccagaacccagtctgtggtgcctcctctgtttttcccaaggagtctcatgctgttagagcttgaatatccgctttaaataagctaaattttaaccatagcgctctttttaaaaagtccttttaaatctcttattaccgaaccaggccaaatggccaatattcctgtcttctgaactttaccaaaggtaatctcccaggtgctcaaagaaaggaaaaattccagaagggaagccggaagttgttcatcatgggtggggaagagaatctacaaatggcaaaagtcacacagatatcaaactagaaaagactcattccctaatcctggaattgaagctgggccaccgttgtaaaatggtgaagcctttgatgctgagctacagcattgggcagtttccattgcccttcccagaaggagcttagagcagccaattttgaacttgcaaaggcttttaacttctcaaggtaatttttagggctaaccatgaattccaaagttcctgctctccggaaggtggagaccaagagaaagtactgccacatagttataaggtcaagctctcaaggaaataaaataagatgagagggaaactttatccagttttttgtttttgttttttttagggacctgcagcaaagtttgtaactgaccagtttgctgggctggcttgaacagcgggcttacaggagtcctaagcctgtgttctatcttaaggtacccttctccattatagaacaacacagaaagacaaatttataacacaaagtacagattttactacagcttaagactagcctcacaattcctttttctgattaatcaaaacttgatagagttttggctacttctgatctccttagccacccatttacacaccagttacgataatattagtctgttggtccaggtacagatgaataaaaattcatttaggactaattttcttaattaaactctcacagggcaattttatttctcttatattctcacttgatctctcgtcttctctgtcaccttcatgtgctacccatggtgttacttccctcccttcatcctcctcacagggcagactcttggatttttagagagaagatttgtatttatagcccaaggcagggatagctataagcttcaggtcaagcatttttatagctaccaaccccttgaataatttctgaatatgattctataaaacattcacaaagtaaagtctaagtctgacatttcaaacacaaaatatgtcttcaatgaaccctgggtgtaatgataacatagtcattcactgagttttcaattttttttccatttcatcacaataccagatgagatacacaaggggttgaaaaaaacaactgtgttctttctctgcggagactgcagttgacagtgatgcaaaaaacaattaacctttctgaaaagccctgtttatcctaaccttattgtttcctgttcttttcaaacttggagcactctgggccttgttgcctctagagctttcaagatggagggaagacctggagtaaatccagagaatatgcactaacctgaacagcttcctaagagggggctggctctttgtctgtaggaagcagttcatttctgagtcatttcagcaaagttctggtttggtgtacactgtatagaacaaacacataggggtttgtggaagtcgaggaagctctggacaagatcctctcctttcagatctcctgagattttggggtcagcctgacctcatggttactgggaggccccaaagcagcctttaagtatgtatgtagttattcctgggagccttcctagaggcaagcataccaagtgtaacttgcaggtaaattgtagttcatagatcttggggaaagctaagggacagtatcatgggatgatgcccaatcacaaaaatcaggtagattacccaagaagtcatcattcttaagcagctttagagagagaatccaggtaacaaaccaatgaaagaatgtgctcaagagttaggatgagagtcagggcctggtgagcttcttatgttgacaaaggggtagttttaaaacatccattttacaatatacaatacatacctaaaataattcacaaacaaccatgtacatcatgagatataaacactcattttgagagcaaaacattacccaatgcattgaagccgctgtgttctcttctgtaattgaatacctgtgtccaccagaggtaatcatgatcttgaatttcctaatttgcctatatttatactatgaatgtaggcatttctaaattatatatatatttgcaagttatatacttcacatatatatgtatatatgtatatgctatcatttttcatgaattcttccgtaacgtaattttttttttaagagacagggtctcactcttttgcccaggctatagggcagtggtgaaatctcaaagctcactacagtcctaggctcaagtgattacctcctgccttagccttccaagtacctgggactacaggtatctgccaccatgcccagctaatttttaaattttttgtagagacatgggtctcactatgttgcccaggctagtctgaaactcctggcctcaagagatcctcccaccctggcctcccaaaatgttgggattacagatgtgagccaccacacccagcctgtaacttaattttttttattcagcagtgtttgtgagatctatttaggttgatgcatgtagcagaggttcgtatttgtctcaacagcagggctttttatgctgtgggcctagttttggaaaggaaggaagaaagaaggagggagccacttaaaggccctgatctgttatgggcagtccagattgtgcacttagtgtcccaaagtggtgacccaattcacccatcagtcagctgcaagagtggcgacgtgatgcagctggcggaggaagctaattataatggagaaaactgaatttgcatagagaaccaggaatcaactaaatccaaataacatttcctggttaaaaaaacactaaataaagatttaataaatgcatgtttactgttttaaaaaatagttttttgagttagatacaacaaaatttcaaaaattaggcagttttacaagtgctatgggaaaaatagcctaattaaatttttctctcctcttttttttctccaccgtcttagtgttttctgcattctctcccagcggatctgattcctgttctgaagaattgaagttgagcatcgttagttaaattcagctgctgcctgactgtataccacagcaaaggctttggaaacatttttcagttaaaacaataatgactttcttggagtgtaatcccagtggaggctgttctacgtatagcctgaaagaatacttaactaccatacgcaattctgcagagaccttgtaaaaatcacactttacaccaaacaactgagtgattctgaattggttgggggaatcttagttgtagatatcaattcaccttcttgaagattcaaccactgctactcagagctgctgctgaaataccatgtctaagaactcagagttcatcaatctgtcatttttattagatcatgagaaggaaatgatcctgggcgtcctaaagagagatgaatatttgaaaaaagtggaggacaagagaataaggtagtattctttttattttttcagtcctccttgactgctttctgtttgtttgaagcaatttagatcagaaatgggccaagtgcaaccacaatggggacagatgtcagttaggaacttcatgagttctcatcagtagcccaaatatcggaaaactttggcatttcaccatttagccagacatgaaaatggaatttagctaataaagtggtattgatgagaacacttaatttgctaataaagtcataatttttagttaagaggaaggactacctaagtttgagtaccagctctggcaagtattagtcgtgtgactttgagcaagctactcaacttccctatgccttggtttcctcatcggtaaaacaaagataataacagtatccaccttatagggttgttgtaaagattaaggaagtttatacatatgtagtgcctgtcacctaagtgttcaataaatgttagctattatttatttgtaatgccattgtcagatcagtcttactggggatttgcctccagcacagctgcgagaagaaagggacctggagagtaaaaatttcccatcataccccagaaaccacttgaatttttaaaaataagtttcttgtgaagaaagttgaacgatgtgggcacagttgaatttcatatccactgtaggcagagctcatatttagctggtttccccggcatgacttcacctaatatttcagccagcatcaattctgattggttgcgtcgcctgctctaattggtcacatcattgttctgatcatttgcaaaatccactgtgattggctgctgcctgtaccgtctttgttttaaaatatatttggtcattacaccttaccccagaaaaaaaggagcagaaatagtgttccttcctcagtcactgccaactatgcaatgtgtaggttttgtgtcttgtatggctccccaagctacaatcagaagcttatgtttattttacctgaggagaaaacttatcatgtgattatattcacatgttgaaaaaatctttaatgtgcccaaagccactaggatctttagaaatggaaataatttaagtattcttgattgatgtttatttcacagttaagagcccagaagcttcatttccacttttccaagatattcaactaatcttgaagaaacaaaagtttcgatgaaaattattgcactttttctatgcatagaattcaggtggcaacaaaatgtagttaataatttcaaagaaatcatgaataatatttttgacattagtagtcaagtcatgaaaagtaaactaatttgtgtaatgccctgccaaaaaaaattatgttgtttatagggggtgacatattaactaggaattgatgacattccaaggggaatttaaaatcatttctgtcctggctaacacggtgaaaccccatctctactaaaaatacaaaaaattagccgggcgtggtggcgggtgcctgtagtcccagctactcaggaggctgaggcgggagaatggcatgaacccgggaggcggagcttgcagtgagccgagattgcgccactgcactccagcctgggcggcagagccagactccgtctcaaaaaaaaaaaaaaaatcatttctggccgggcgtggtggctcacgcctgtaatcccagcactttgggaggcagaggtgggcggatcaggaggtggggagattgagaccatcctagccaacatgatgaaaccccgtctctactaaaaatacaaaaattagcagggcgtggtggtgcacgcctgtagtcccagctactcgggaggctgaggcaggagaatcacttgaaccccagaggtggaggttgcagtaagccaagatcacgccactgcactcaagcctggtgacagagtgagactctgtctcaaaaaaaattatttctataggaataaacaatttaataaccagatgcccagagacaatgaagtacaatgaataggactttgttctgaatatttgtttctgtcattatcaataacttgtattaataattgttggctgggcgcagtggctcacgtctgtaatcccagcactttgggaggctgaggagggtggaccacctgaggtcaggagtttgagaccagcctggccaacatggcgaaaccccgtctctactaaaaatacaaaaattagcgggtcacagtggtgtgcgcctgtaatcccagctactcgggaggctgaggcaggagaatcgcttgaacccaggaggcggagcttgcagtgagccaagatcgtgccattgcactccagcctgggtgacagagccagactccatctcaaaaaataataataataacaattattattattatactctttcttcctttttctcattccatttttcttccctagtcttctttccttattccctataagtaaattcggttaaattgggtgtaatatacaacagagtatcaagaataaagtcattggtttcctggctcttcaaacttttttgagaatagcataagaaaggctgtttataaatccaagagatacttttacagaaaagagattttctaaagctacgtcttgtctccttgttccatctgcattaactgcattagatgtgttgtctcattttgttctgagttcttgtaatatgactcaggcttcaccactcttaacagcttggtgtattcagaagtcattccaaagtgggtggcatgatgttgagggtgtatgctgttgaatcacacagccagagttcaaatcttactttcggcatgaaatatctgtatcattttagacaagatgtttccatggataaatctagtttccccatttgacaacagaaataatatcagtgacatcataagattgttctaaggattaaataagctaatattacaaacagcttagagcaatgccagcatacagtaagcactcaaaaattgttggttataatcattagccctatagttggtttgtggtgcccttgatttgctagttgcagtagacactatcagtgctctactcagatcccctggagtccctctcacctcctagttttcatgcactttattctaaggacttgaagtacaaaattaccttcgggtgactggagtttcccataggattaaagagacacaagtgccaggtaaacttgagtgttaactgggtagcccaaagccaatggttgacgggtacagaaatccattgcctcaaggcagaacagactctgcaatgcaacttaagctccagagcttcccgtgggatgatgctgaggctggacttcacctaaaaatcacacccttgcttagcccctctccctgccttctcctgcctcccttactcccttatagatttctcttgagagcactacataagtcgcttgcacacaaatctacatagcagaattcgcttctagaaaacccagtctgagacactatgaagtttgtattaccaaagctattactatttagtaaagttcgtttcaggggaaatataataagtctgcaaggtgagcattaaaataaagaattttggttcatttgatttacaagctatgatcttcccaacaatttttatcacagtcattgtggtttacatactggtaaagaaaaaagtccaagctaaagaaagaagcccaagattaagcatcttggtcagataatataactttctgttggcttttctccctttatctcctctgaatagccattttattatgaatttaagtacaacctaaatcagttcagggtaccttaactttagcgcagtgggtctgcatggcaattaaattctgcaaacatttttctgatagatagatagatagatagatagatagatagatagatagatagataaaaatatttattataaagaattggctcatatgattatggaggctgagaagttcagacctaggagagatgatggtataatttgaatctgagtccaaaggctgagaaccgggagagctgatgcaataagttccaatccatgtctggcagtcagtagcaagggaaaactgatgtcccagcctgaagacagggagagaaaattcattcttactcagctttttactctattcagaccttcagcgggttagacgaggtacatccatattggggagggcaacctactttactcagtctactaattcaaatattaatctcatacagaaacaccctcacagaaacatccagaaataatgtttaacaaaatatctgggctcccagtggtccagttaagttgatacaaataattaactgtctcaggaatttatataaagctggctatagcccccgttcccacacttttgtgaattgtatagctcatcctgactctgtacccccgcttctgttgaactctcctctctccttgcatctcaccacttatggctattccttactcttttctttgccaggccagagaacttagtcctttttccttgatatcctccaaaaccatcaatacaagaaatttagatgggtaacagattttattacaacagtaaactttggtgctagctattacaatagttttcatcatgctatagaggtacaaatggatattttggggggagtctaaaggaagaagtaattaattacaagtaagatagaaactgaagcaatggtttcacagaaaaggtgaacgtttgtgcttgcctttgaaatgtgaaaaggacttttcacattggcaaatataggtcaactatgttttggctgtttaccatgagccacaaagccaccttcagactgtactaatcagtttcagaaggaaatggaaaccaaaattttttttagactgaaaaagattacaaagaataaacttatctgaaaagttagtaaagtggagtttgggaggcagtggatttattgttcgtttgtgtgtttatttgtttgaatagcttgtcctttgagataaaaatgtagaagacggagaaagcgtaaaaattgtactgaatcaatattttaggcctgacacccaaatgtgcttcacagtccacatacccactaaagtgtggcattgattaaggtgggactggtctttggggactcgtaaaggtgctccatacccagaaggcacatggcaagcctgataattacctccaggcataaatcatcagctggggaataggcatctgtctactaccattgcattttaagttcattcaagaggctgaaatatatttgtatacattcttctccttcagactaagcaggaaggagtggtaggagatagcgagacacaggttttcactgttagagggtaagaatatttttaaggttctctatggagagcaagtcactcaaatttattgacggctttactgcaatgaagaaaaagcaga

SEQ ID NO: 715 - DNA, 32744 bp, Homo sapiens
  source 1..32744: mol_type = other DNA
tctcggctccaccgcacccttcgcgggaagtccccaggcttccagcaaagctcagcttatcccgcccccgcttccaacccggaaccccagaagaacagcatgatgagcctccggcagccaggtgggccacctccccgcggctcagtttgaggacacttgtgcggaaccctttcacatccccaccctacccagctttcacaactccgccgggttaaatggccaaagacaaacttctacctctcctgtccccggtcccagcttttcaaaaacccacagctggcgaacccacacacatcgaaactcctaggtcgctgttgcagtctgggcatgctcagtatcagggtaggttttgattgagagtaaaaaaaaaaaaaaaaaagctttgtattatgctctctttctcctgtgcatactgcttgctgaacagcttgtggggcattcctgagtctacctagaggttttatcagacgcccttgattgtgtctccttgggatctgttcccctcttacttcaccccctcccccaacccgcctccaccccgcttcccaggtccctgtccgctgtggggatggagagacactaacagaactgggatgggcgatgttggctgaacggatccacctattattagtgcgcggggattggctccttggcgcagcgtacccgaggtggagccaatcaggatgctggggctcggagatgatgggcggccgcctcctcactggagggattcctggagaagctgcagtgtggggatgctctagaccgagtactgcccccagtgtctttccacctcctcctgcagcagcggcagcggcagcagcagttagcagcggcaacttgaggctgcaccccgggcaagtccccagggtggtgctcagccgagaggggggcttggcgccccgaaggggtgtgtgtagggtgggggcgaccacgtgggaccagctggtggccctggaaaacctcccacacacccacacccacacaccccttttgtgttgcaggctgcccctccaagagcggaggcagcgagagtacgcgtgtgcctcgcgccggtccacgcggggagagcactggggaccgagacccggcaccacctcccggtccgccctccaggtaaggaagcgggactggcggcgcggccacctcggcggtgcctatctgctcgaatccatcccaaagattttcttctcgatacacttgggttttagtggtgggagtctgagacctagggagggatccccgggtggcctattgtgagaaatatgagactacatgtgcatctcctggaaaagcactttgcacagcgcccgtgatttagagcctggagttgatgttgggcatcccccatcttcttgcttcctctttccttctcttgttctctctcctccgtcccccacccccaatctcaatcttttctctctttctctcccacacctcccctctcgccctcctcccaccctaagcacgcacagcgtttctttctcctcctggagaggattgcctttcttagaggaaagagggggagtgaagaaaggagaaagatttctttctgttggggagagggatatgggggggggggggaacgtaaacaagatagaatacaagctctgcgaaaatcagagcacataaagcaattaaactgaataaggggagtagacaaccagtccagcttgggctgtcagagagaggaagcgtcaagtttgacttgatttcctccttgcaagagtctatgtctctcacttgattcgttcaaatggaacaaaaataaaccgacaatccaacccactttcaactgcttaattgcttttgcttttgagtgccaaccatctgacttttcctgtttccatctgtcctgtggggctaacaatttggtattgcacatcagtgttaatatctgaactttgaaagctttcttgagtaacaaaaaaaaaaaaacaattaaaatagattattactttcctgaggtttcttggtatggcctgttgttgggggatcaaaaaatgtaaagtttcaaaacatttgcaagggacaacaattttatagggaggcttggatttctactttgagaaagctaatcttctagttagctttgtgtacatgttgatattcactttctccagtattaaccctttcgtgaaataaagcaactgtttaacttttgtatggaagctacatttgtgtagaattttcactttattctacctttgtactatttgcattttattgtctggataccaaacttatgcctggctttattttcttttaataggacaatatttaatggatgtaaacatgatgtttatacaatttcagcactccctttagaaggcacatggaggctcagttggacaagaatcctcctgtactggaactaagtttagaaagtaatgctagaaagataccctaaattttaaaaatcctgaaggggaaaacatttttgtaacgtcttgttaaaagaaagaaaaatatatcaaaacaccaacatgcccctggctgcctgcataataggtcaagtaaatggtacttgttggacagagcctttacagcagcttcagcagtctctaattccatcattggggatataagctttcttttcttattattcttcagggacagctaagcgatagtactgtcagatggaaggaggtatagagaaatgcctcgtttgatgtaataggaaagcattccaagtgggtcttacctgaacacagagaaatccacagatgttagtatacaaaacacttctttttatttatcaggggaaatgcagagtcttacttttttttgtctagaactccacttgatataagaaaagagaatcttctatcttaactgtgtctgaccttccacactaattttgtatctcagagagtattttttcactacgtacgtttaatatataagtttacacaccaacttagagaagagctgaattcatttgccatcagtgtaatgtgtactattttccaaaccattttgcatttgaggcaatgatctctccctaaatagaattaccaagtcacgaaaaacgattttctttctagggctttgacatttaaatgaaaaaaaaaaaaaaatagtgtctctgttgaaagctaactctggtttttagaggtgccaccttttggttacaaggacaaagggacaatcacttaattacctcacatgtatgtacaactgaattaacaagtttagacatgaaaagatgtacaaaaaggaagccagctgccttcatgtgagaaaattaagattttgttttctcatttctccactgtcttaggaatatgtgaaaatttaggcttggtttgtgacatttattttcatgactctttacaaatgttaattatagaaataacatctaaaaatatggatatgagtagtttttcaaatacttctaaaaaattcaatatctgtgtattggaaatcagaactaattccaatatatagtgagtggattggggagagaccttacatgatatattataggaaattcttactttgttatcccacaaaatagtctaatgtcacaatttcatacaatctttgttttttctccctttgacaggatattttagtaaatctcattaatgtttcagagtaaatatgataattatgcctcgaggtatttttgtcagaattgaagactgctaatatatagggaaaatcctaaaatactaatttcacaaaaataccacatgattgagagttgttgctgagtagttttgaacttcatttcataatggagaatattagttatttcatctggtcaaattatcagatagttctaatcaacaaatatgaaaatgaataacattgtatttatacgatttgcatattagactgaaattgaaactaaaaaatagtattaattatatgcttgtattaattatatgcaagatgagctggaagattaataaaataaaatgtagaatatgttagaaatctgaaagttaatttgaacttcctgttagcctaataacaccattaacataatatcagttcatcacttttgatgtcagtatattaagttgattttgagaaaattcccaaaacagttagagccatctaatcttaaagaacacacacttaatgcagacaattatacgagcctgaaatatagttcttatgatttccagtttgtgcaacaaccaagaagagctatcactaattccaaattgaaacataatatttattttcctaatggtaataattaagtaatttggggggaacaagaaataaaaacagtttgattatataatggaacaaatctttgtctaatattaccaaaaacccataccaaagttagactttctgccattgtgtaatgtaggtatgcgtcttgcatgcattctgcagaaaatataatatttttaaaaagtaaatatctgatgtagttgtgatattttaaaattcttaaataatttatttatcataaatatatctgtaccaaaagttcaatacatgacgtggctgattttagctgaaattttttcactgaaattgaccaaagccatttaaaaagagacaaagtatatggcaatatacataataatttcagctagaatttaaggatatgtgtgtgtatatacatatgcatatatttgtgtgtatatatattccgaaattatctaaatttttcaaaaaggtttagaaactcatggacagtagactataatttgctgaaactaggggctattcatgtacaaagtaccatttaaagaaagatgacggtgtcttaggaatgcttttaagggttctttggttgaaagtctgggaatactcagagataatattaatgagagcctagagtttttttcttttaaaatggggttccatggctttgggcagaaatgatttttatatgtatcatgattgaaaaaactctcagtacaagatgatgcacttctttatacaggtaacaaataagttgaaatcatatttttacatgatttagatatgatggctgataaaacttctgtctttctaaggcttttggcagatgtttctttcaatatttgcattaaggtaaacattcttaattttttatgtaattgaatggcatgattatcattgcattgggtgggagaatgtgggttgatatgttttcattaaattcctcaagaaatgatcaacattttttcagtctttttgcaaacttgacttaaacttctccactaagtgtttccatttccttaaggagaaatttaacatttccaaaaaaaaagataaccagcatttttctttcagctggtcattttaagagtgttcttgaggagctagttttatatggactgtaagataaactgtggtagccgggtatgtgaacatcactccattcatatgtactagcaatacaaaataaacttatttaaaattatagtgcaaatgtatgctacctattagaagagagcatgccatcatttactgtctacatcaataaaattaacttttgttttattaaaaaaggaaaacttttctttaaagtggacaataaatatattgctatgttgtagaaatggtaaacactagagatgctatttctgcaatttaaaatataatattagagattctattgcaaagaatcctagttttaaaatggcatctacattacattattttaaaaaagcaatatttaagagagtttcaaaagaaattaaaacctacattaaagtaaaataacacctttatggtagtgttagaaatgaattttctagcatgtctttgacacatgcaaaacaaatattttaaagaattatttctgtaattgctctaatttttatatttatttaagccttaagttctgattgctgatttccatactttactaataatgcaaatgagaggtcaaagtttatcttttttggttactgctattgcggaaatacaaagaaagcatactggtcactcctataaatgtctcacacatagtatgttttatgtttaacattattacttatgcacataaaaaggcattttgttaaagaggagctctagaaaatcataaagcagatgaagatataaaacacgccttctatttctagctgtttgtacaaaatgagagctggggaatttccatgtagaacgggaatggcctataaactagtgtaagaattcggtgaaactacttggttaagatataatttaagatattatttccaagagttcatacagccctgttggacaacatttcatcacagatactagcttgcaaccatgctacggcaatcataaatactgttaaaaagacatttagctaagtgcctcagttagaaattaatttctgattgaaatatccacttaattaaattcaggtatggtactgaaacttggtcatatcttacctcaaagaacctatttctgtacttgtgaaatatagctttattaataattttaaagtgcttagagttccgatatttttttatcaaagggtattatataagtaaaagtaattgtgtcttatttcctgtgatagataaatgttttctttctcttttgaaatcaaagataaaatgcacatatgcactcaaatgcaaacatatttgaagagtttgaaatgtaaacattcttattttgcaattgcttacatgagaagtatatagtctcctgtcctcttccatcatgctccctgacagcagccatcatttcagtcccttgagaatagaaaggaaagcagacaaaccacctgaaaactctggtgaaagttctcatgatgtggcctccagggaacagcctcttgttttacttgaggctcatttccgctgggccatcctccttgcatgtcactccatgcctactgtgggtaggaaacaggtacttggattgactgattgctgctttgagattccttgacatattttttcatcaacatgaaggcaaaaggacatgaatactcagtcaaaacatgcagagctgtacttacgtgaacacttttaaaatgcgatactgaatcttatataattttaggataatttatgaaaaagcttttctttcttggaatttcttttgtttactcacaagtgatccaagcaaaagatgaagctgttaaaccatgagtcagtatagtatttttttaacttaacacctgagaataaagctgaaaggattgtttaaaaagtgtttcaaatcatactttcaaaatccatctgtgtctggagacccttaaataagcacatgcttcatggtcattatcccagataactgacaatttgtttttctacaaaatctctggatattatgaaacatcacacacgagcttgcttttaggatagattattaataatgtatttttcagacacaattgtatgtgagagtttctgcaagtataaacaataagataacattacagcagcaggcaacactcactaaaatatcaattttgaattgtctgctctctctttgagaaggagaaagagctaactgagtatctttttccctcatgatgtacttactggtctccaatatcctatgccatacaaacagtggacatggtccttgcttagctcctatgaaatacggaaactgcctacctgcttatttttgagggaaaaaaaacttttctagaaagatttttagacaaatgatttattggcctttgaagcaaggacaagtgctataacaactcattaagggacagttgagctctagcaatcaggttttgagttatcaagattattaggaagaaaagttgacacagtttctcaggaaaaagacaaggaagcaaagcattgaaatctgtttctgacttggagtgtctgccagatcctagtttacaaggctggctttctgcctaatccctagcattttcatcagatttgaagactgaataaagtgaactattgggcattagagcatatttctagagcaccgagacctcttctataaatagcataacatcactcttctattttaaccaatgttcagaatccgaggccacaagtttttatatttaaatatgtataaaccagatcattctatgcctgaaagtactagggttttatctgtctgtgtacaggaaattcttctgttaaaagcttagttaacaatatgacattacaaataatgtacctatttttagtggttttattaaattataatgttaaatttaaaaagccaagcattcaccttgagctacatctgagcctgataattcaaaaagtgacatttcagtacaaagccaacatacccttaaattgacaaaactgccctgcttttaaattgttttgtaaaaaagtacttgatatgcaagtttccaacgacttgttttttttctggagaatcttagatactttctgaaccactcttagacaacacagaatgaatattaatgacaggagagagctgactccttcaggcaaaagtggatgagacaagttcttttatgcctttgagaatctgtttcatcatttatatattgaacacatagcaacagttttatttctcttgatttctggacttttagacctgtatgcatcgaagcatattacacctcacagcctgaataggaaagatttgttcagttctctggttataagaatgatataggaattcctttgtgttctcttcctttctgtacattttattcctttctcatgtcttctcttcctactctgcccttcttccttcttttcttcattcttttgtctttcctttctttttttgtatcttaattaaatattttcctatagaatcactaaatgaaggtttagtacttttgacccatagtaatcttcaccagctgaattaatttgtgtcaacaactaagaaatgtaattcttagtttgtatacattttaggttagcttcacaaaatatatgtatagataaataaaggagcagccttttaatttgtttatgtaattggcacacttaaatggaatgtgtcatcatatgaatgtttttaaaattttgcatgtaaagggcttgcggataatttttaaaccgtaactttttgcagagagacagaataatgttttagagtccaaaaaactggcatgtactatttggcatgtttttctttattttctattttgccattgcaatggtaacaagttactgtgttcatgacaggcgtgcagcactgtatttttatttgtttatttattttattgccttgtttgatgttgataatgaagaggttctctctcttaaagatgcaatgaaggagactcaagtgttgttacttgcctgcaattacacatttagaaagcctcttatattttttgtctgttggaacttactgcctcagcacttaataaagcaggaaaaagcatgttttgtaattctcttactatgtaagaactagtttgcttttgcttatctaacatcattattgagtataagatacatagtctttatttatcccactgaaaaaataagaaagatttgatataccattatttcttctgtgactctaattgcaaaataaattgagtttgtgttttaaaattattcaagggacatttttgtaatctacaagaaaagtcactaagcttgagtcactaggctaagttggcctttagtcattgctatatcactgtgatgttagataagtcaccttatttgttttcttatttgtaaactccatagttccaagccaccaagtagggtgcaatgagaagtgattgtaatcataagtgttgtagctttatcactaactctccaaacttatctcttattattctcctcattgatattcatacacaccttcttgctgttccttcacataacattagtggaagttgttgaatctattgatactttttatcttctattccaaggtagaatggttaaacattctgctctaagtgaacatatccaaaccacaattattattcaattcaaatatgaagtctatcagttggcaattctttgtgttaagaaacacatttgcgagcaatagctaatagccataccattgcaatgtggaataatataagtgtgtttgtagctaatctgatttaagaaaacaggaattttagttgggaagggcctatagaaagaatacaaaattatatgaaacataggataggtattaagggagatatttgaatgaatacaggtattcatattgtttcttacaatatgtcaggcacttttctatgtactttccatgcttcatcccatttaatattctcaataactccttgggatttgtgctaatttgtttataatttttaagtgagaaagtagtggaaaaagaataactgagcaacttcccagggtcacattatgtagtaagatgtagaattaaacccaagctacctatttacagagccaatactcaatcataggtagtcacacaatcaataaactcataaatgtcagaagaagagaatagatggtggcaaagaggtagaggtacccaaaagagattaaatagtgataggcaaattgatccactttataggttaggtcaatatgagcatgatggcaataggataaaagtatgaaacttagagagctggattcagatagccaactctggaatggtgaacttcaataagatagttccccaggaatgaaaatgcaataatgtttgcaaattgtctggtgccctgttactatatggtagatttgaccacctttgctcctctttctctttttttattttcagaaattctttcacttgtaaaaatgccacctgactcaaaatgcttaagcaagaaaagggattttggtgctcatgtgaccataaagttcatgaatattctggcttcagtcataggtggaaatgggagctcacaccatgtggtcagaaccaagcctattctccttcctaccactgtaccactagtactcaataatttaacgactggtatgattataccagtgtgaaaagtctacctataagaggatattggctgagttgattgttatttaattctagttatgtccttgccttactctgtttggcttcctcactttttaatgcagaagggtagatagtctttattcatctcattgcaaagataagaagaaagtcctttacaagacttgaagaaattaagcttagtagaaccaagaacagcaaattgcagagccacttgcgtgtaaatgagaatttcaaacttttattagttttgtaaggaaggaggggttatttcaaggagtttataaagttttaacctacatatgctacagattaaacgttatcaatttgtacaaatatattatacatttttatctttgttgtactctgaattgaagaggaaatatttgggaataatatatttcttcggtaagtatgatgatgttcctattatatgccaggcaccatttggatgctggggatacagaaataaaaatagtagacaggtttcctgcatgtaggagcttacattctaaggaagaagagagaccattaaaaacaacaacaaaacattgctatggtacttatataataaatactataaaattgtaaaataggctaataaataaaacagagcaatagtggggaatgtgatcaaccaaaaggaaaaggagccagccctgtaactatcaggggaaagcactggggtcaaatgaagcaaccagtacagaagctctacaatgggaacagtttggtctatttaggtataaagacactggttttatgtgtttcccgtgccttaatattttaattaaaaataatctgcaaacattattaagaagttttcaaaacagtgtaatcatgtataatctcaccatgctttaaatatatgctgtctcatttctgtgtaatatgtttccagtgtgtgttcatatgcttacattttttatggcgacaatcatagaatatacactgtttttactttgacttttaaaatgtattctcagatgtcttgtagacatgtatttttatactccagttttatcttcggaagagtagctgcttttcttttattctgtatattcctcagacactttctacatatcttccgtttcttaaatcttaataattctttccctttcccctcatttctaaagaaattaaatacatggcctaactccagttttattgttcctataaatttaagtcaacaccttaactttttatcacattcatgacacttgtcaatgcaatttccttttgagtatatttttgattatatcctacaaaactctaatttagattttgaaacaaaagtaaataaacacagaaaacataatgaaacaaatcattttgtgtcgattatcacttagacaacacagttcttgtagcattaaccggaaattatttttcctctatctagtctcatatcctggtttcaagaactcaataacctaagtctacctaggttgctatatgatagtaaaccagttgcctacaaaggcatattaacttttgtgagactgcattaccacgcaatctgctacacagtaatgaagtaataattaaagcctcaatcataaatgttcctcttttattttctgctaatgctctctatagacattatattctgataataacatgttttgaaaatggaggtgttttttttttttttttttttgccaaactactctgctccatcaggctcttttgtatcctaaatattttatgttatactatatatatgagtgtgtgtatatatatacacacatatacacacacacgtatacatatacacatgtaaatatatacacatatgtatatacacacgtgtacacatatgtatatacacacgtgtgcacatgtgtacatgtgtgtatatatacacacatgtagtatattatataatatattatataatataattatatattatatattatatattgtatattatatatattatatatttatatattatataatacatataatatattatatgtaatacatatcatatattatatgtattatatataatatatattatatataatatatataatatattatatgtattatatataatatatattatatattatatgtattatatataatatatattatatattatatatagtgtattttgattttttaaatgcacctggctcctctagtaaatgccagtttttcagaattttgcgatgacatttttatcatctctgactcttcagtacctgaaagatattaaggagtgaatattttatagaatatttattgaatgagtgtattagtctgttctcacgctgctaataaagacatacccgagactgggcaacttataaaggaaagaggtttaatggattcacagttccacatgggtggggaggcctcaaaatcatggcagaagatgaaggaacagcaaagggatgtcctatgtggcggtaggcaaagagagagcatgtataggggaactcccctttataaaaccacaggatctcgtgagacttattcactatcatgagaacagcatgggaaaaaccttcccccatgattccgttacctcccactctgtccctcccacaacatgtgggaattttgggagctacaattcaagatgatatctgggtggggacacagctaaaccatatcaatgagtaaatccagtaactctatattttctaacatttttaactggcatccaaatttagtgtatgcatacacacactattagcaaaagttctatgaaatattacttgttatgctttctgatacttttcaattatccttttctatttcattaaataagtactggtcatgatcaactaagtttatattacaatctaacaatgtataacagcctgtattttttttcctttttgagacagattctggctctgtcattcaggttggagagcaagcacatgatcctcccaactcagctacctgagtaactgagactacaggtgcataccaccacgcctggctaatttttgtattttttgtagagacagggtctcactatgttgcccaggctggtcctgaactcctgggttgaagagatctccctgattcagcttctcaaggtactaggattacaggcatgagccaccacacctgtcctcaaaagtataatcttcttgctatattcacatacaggtaattttgtgtgaatttataatccattatttttaagtccacaatgaatctagcaccaatgctgttattggccactcttaagcagattcacgtcagttggctaccttctaagggattcagctaatagctcttaagcttccttttggttgtcatggggttgatatattgcactcttttttgtgtgtgtgtgtgtggataaactttcttgtagatcggaagaggatacacgaaaggaataagggattacctcttttcctttaaaatagtgagtggagaactagtctatggaaaaaatagacaatgaagattgagcataggtatttagagttttgtattcaaattaagaaacaaacaaataacataaaatctgtcaatccttcaccaagtacataatgtgggaattttactaaatgatttctctgacacctttcagtgctaacatgtgaaggtctgtaattgactatggcattttgctgcaagaaaattagacatatgagtaacgcagcacataaagcctttggcttcccttctaacatttgtttactctcatagtggtgaataagtttgaagagtatgtctttcatctttcagtcattcattaatctactcaaaaatagttaaagtacacaaacaaactccaagacaccattagccacccataaaagaattgagtaccatctagttaagagtgaaaccataaggaagtaatgattcattcacatgtgagctgtgaaatagcattgtgtaggatattctgtggtagcaaacagtacaaaagcctcaagggcttcagcacgaaagctttattccttggacataccacatagccattgcggatcagagtgtttggagagtacataggggagagtgtcctctgatttacatagtcattcaaaaatctagactctgagagctccagtgccccagtgtcttataagactgtcatctcaatgtaaagtttaaggattcattgcagtagggcaaagaacatcagaatttcttaccagcaattatctactctcaccctgtaaaagatacataaaatttctgctcacagtccattagccagacccagtcacgtggctcctaattacaaggatataggaagtataacacacccattcccaccccaggcttggaagaagaggatattggcaagtatttgaagagataagctgcatcaggaaaatgcaaagctttctgcaaacacatgagagtgaatgacagctgaaacagcaatggctttatataggaggtgatgcataagatactctgagtgactttggggttatgttaggtgttcagttcattcattaatgaaagcatctctttttaaaaatctaagtctccaacaatgatatgtgtttggttcagaaggccagcactcctggcaaatttggaagctgaacaaaatcattcccgtcttactaggattcctgacacgtagtgcaaccacctacatggcagatctatttagaagcctgaaagacatctcaaactcaccacattcaaactgaactcatcttcatcaacatatgtagtccttccctagtgtcttcaatcttggtgaatgattgcaccattcatctaattttgttatctagaaacctgggagttatacttgtttcatatgtctctcatttttaatctcaaattcagaatatatgtcttaataaaatttttaactcataaatatcttttgaatatgtttacttttctctgtctacattgcagcaccatagttcaaatcaacttgccttctcaaatctattatccttaacttgactttcaagtccatgcattatctggccctacgtattcaccagcctcatttatcatattgttcctttgttctgatactctggccatattggccttttttcaggtttttaatattccagatttttttctgcctcaggatcttaacacatgctggttatgatgttggagtgctttcttttctcttttatctggttaaattctatgcagccttcagatctcaatataggtatcaactattcagggaagatatttttgactcttcagaatcactcagaactttgcattgtacctcctcatagtgacctgtattttccctttacagaatttatcaatttatcattatatatgattatgtatttatttgggtggttatttgattagtaacttcttccccaaccagatttggagtttcaacaaaacaggcatgatttttcctcatccatgtggaccagagcctcacaaatagtaattagtcattacattgcattcctgcctcagatcctttgttcttccccttcccactggatggaatgcacttcctctgtattctcttttgattacttcttcaaaccttttgtgtgtttactcaatttttgtgtggtctttcctgaccagtcttgtagtacatttatatctcctcccacttccctaacatctttcttcttatcacttatcactctttgaatacagtttttaaataaataaatttatttatttattgcctccctttgatcattagactgtaaattccatgataacagagatttttatattttttacttcctgatctccgaatgcctaaaacaacacatatttgttgttccataaatatttgttgagtcaatgaataaatgaactgtgaattgtctctccattaattagaacagctctatgcatctcatccaatgaaaaaaatattaatttaccagtcttaacaatttgcatagagatgacaagcttatacctttaaagtgcatgtaggaaattttctttttttttgtagactaagttataatttacaataagaaggccaaaatgactaatttgtctattataccatacttggaaacttaaactttctagtgaaagggttatatttattataaaaataattttcagcttagctattttctgtcatcatccaatcaccttcatcctactgaattttcctcctaactattgctaatttgtttctctaatctcacactaattattgtaagaaaaaaaacaaacctttttccaactggcttttctaccttacagtcctgctttcttccaactcatcttcctcacagtcacctaagtcactgaacacaaatgtgatcagattattcttctgattgacatacacatgcagcttcctcaaaattagaaaacaaaaggaaatgcctctcattcctatatacccattataattgactttgcttggctcgtcacagtacttgtcacccccaaatacttccctcctgtccctctccatgaacaactgctacccttaactacatcaattttatatcgctcccttcacttctaatttattttttaggtctgtttctcaaagaaatttttcccaacccatctctgtagttcaaagcttatgtaatactctcagcatatttccagcattacatttgtcatgttgttttaggattattgttcatagagccacccccttttggttttgaactcgctgggtttaaagattgtgtcttattctttgtattcccatttactggaggaatgtctggcacataacagacattatcgaaccttgttgaataaaaagagaatgagtatatttagccttgatgggggaaaacttctaaaatatgcacagaaatcaggcattttctaactgtgtttgtaaagctaaacttgattatatcactagccatttatgctttggggagagtaagcttcatgcagtctagggaaaccaagtaaccttcgcttggtaattttcctttcaaaagaagaaaagaggagaggagatgaggagaggacagaggaagggaaaagatagaaaaaaaaagaggagataaaagaagaagagtaccagctctctttgagaagctgattctagggctcatctttgacaagagaaatgttaagatgatttttttggcttgctaaacttgactcatccctcaggcatctgcttaaatcagagaggatacttctgatctctcaatgacaattttgtctcccattatatttcccatagcaccctgtattttttttataacatttgcacaatttgcaattatatatttatttattatactattcattaaatgccaggagaagccactaagaacataaaccataagaggtcgggggccatgtatgctctatggaagcagccacaatgccagttacactcaacacctgacacatagtagatgttcaaaaaacgtttgctgaatgaatggggagatgataagatgcataggcgattgactgaactttaaatagatgctttctttatcccctaatctttaaagaagtatgaagttttctgtattggggaggaaacagaaaataatattgtagtctggtatatttgagggaggatgagcaggcttggttaaaatagaaagctgagctttccacagtgattggatccaatctgaatacaaatttaatcactctatgagtgtatctactatcattagacactaaaattgtaaattcagcaatgtaatatggctgactctttaaaaataaatttttattatttatatctgagagtaaatattcagttttttcatattatagtagtatgaataatttgctttccaaaattcctccagaactgccaagaattggcaaactctgcgtggtagagagatttgaacaaataattgcaacaaaatgaaaatatttcggtaaaccctaagtagacattaagtttgaaaatattgaaaacttaaacgattttaaagaagaaatatatttataaattcatatctcataggtgagggtactgatgagactaaatttagttgacagaaatctgaagtgaatgtagagaagtgctttaaatatatattgctaaaattttaaccttgagtttttatccaattgttttgataatctcttttctctgaatcatggcatcatagatttttttttcttgtttgcttcttttctttgtaatgggaacagtctgtgatcttacatcctctgggtgtgaaaactcattttcagaaactacctaaaaaagtgcagtgaaaaataaatcttctagctaaagataaagtagagattgttactgaaatacaaggtcatatgattttttaaaaaaatatcttattacttgattacccagttgagaataactatgtcaaaaaatctctgagattctatgtgtgtatttctgtaatttcttcgaacagtaatacactaaattataatgttataacagtgaacaattgatgtttattgacacaatgcaaaaaataagattgagttaagtcctctatgattgcaggaaccatttctatattgtttgcaattttttccccagtaccgacctagcaatacatggcacatactaagtagtacttaaaaatctttggtggatatcactgaagtatcatccttcttgattttttcattcgtttctcactcacttatatatttcttttgaataagtgtaatactttaatgtgtggttttggtaataagccttcatgaactgatattagatgtagtcaagtcttctcttccaaggtgaaatatgactttctttcttttctcagtctttgtttccctagattaaatcaccaggtagctcactgttaagtttcaaataaaatatggtaatttaaatgctcattttgtcatggacaattaagagtgaagagatgatgtataataatatattccaatttctctttaatgggaccaactaatgttttggattatttgagccaatgttacctatctctgaaacagataatcattcttgactttctcttttccctttcactttctctccaccttttcttctttctctatttttaaccacttcttcagttatattataaatctctatggcatccaaagtgcgaaggggttctgtcactgaaaaagttattccttctgtaaatatattcaatgtatacttaatactatacacatgaaagtgatatttttaagaaaattatgattcatttctagtaaagagaaatattttaaaggaaatattttagcttgttttttaaataaaaataattttctaaataaaaaattattccataaaattatttaaaatactcaatctaataatatataaatggaaaaattagtcttttttcagacactgttttctttcagtcagccactgttaccaatctcttatattctctaacagaaatatttaaagcccctaacagaaatattgcatttgcaaacatcacatttaaaatcaacattccatgatatacacaacggtctatacattttcagttagattattttatttatgttggattagatattactttatacaatctacagtgatttttaaatgtatagttatatattttatatattaggaatagctatatctactgcttttggttaatgcagcattaagtaattgtgtgaaacatgttaatttgaagtgattttttactctaagctaattcagtttgataatttagtttttttctagtaaaatttgtgatgacagtaacaatgaacataaggtgtactaaaggattttatagattgatcatgtctaaagatttttgtaaatgttccacttctttcatactgcaaagtatccttgtgttaacatattttataacatcttgtttgtttaatattttcattaataattgattctctttatcataatcttagaatattttaatgtttgcatttctatatacattcagacattataaataaaattttataattatatttaatatatctttggtttggggctgcaattgttgagtttaagaatattaaagcttttcaaaatgtaaacttgttaagaatgagcttgcacatgttagctacatgtaaaatctttttaaaacaaaaagaaaaaatatggaatctgtctgaagaaatatgaagttttaaaagtgtttataaaatttggcaaatttaataataatagtttatatgtatagagttttcattacataccaggtgctattttaactgtttttgtatattgcttatttaatacttacttcaaaacctctgtgaactattataatgcttattttggaaataagaaaattgaggcacagagaaatgatactatttgcttttaggtcatagctgttaaatgttcggggatttggatttcaatccactagtatctagatgatttattacttcattaattcaaaaatctctgagcattagttcaaaatgtttcagtattaataagttatttaccctcaaataacttacctttcagtgggggcagaaaaataagtggagaaaggaaggaaggcaggaagggaagagtgagaagaaagggggaaggagggaagggaaggaaggagggaaggaaggagagaagaaaggagagagggagggaagaaggaaggagggaaggaagaaaggaaggaaggaacgaaggaaggaaggaagggagggagggaggaagggaaggaagggagagagaaggaggacaggtgctattaataagctttattttcatgattgctatcaaaaaaataaaaataaaaaacaaggaaagagagtagagagtgccaagttgggaatatgaagacagaatacatttttaaataagattgtcactgaaaatcacatttcaccacagatctggaagaggtgaggaattaagctagggttaaagatcaggccatgcctggtgatttcaaagaaagcaaggcgtccacgtgggccaggtgctgcaggctgagggagcactgaaagctttttttctgagagggaacacagggccagatggtgtaaggccctggggtgactatggtttttatttggaatgagaggtgaaaccagtaaaggattttgagcatatgagtaacacatccaactttgatatttttaaggatcattgagaataaaatattcttgctagaatagactgaatagggccaagggtggaaacaagaagggaatttggactttgttggcctatgatggaagcaaaatacatatctattttatgtatttcctagattttgtgacctctaagtacattaagatagcagtggaaagctcagaaatacattcctatccattttttataagaaatggagtttaacttccctcatacttggtagggcttatcataacactaatttttttaacatgttatatgtacttcctcagccactttgccagctaatttattatcctggggcaagtaaataaaagttgggctaacttcaaggcatctaggaaaatagcagaaaaatatctttttatttttttctatgattgaaagactaatgcattcacaaacgtcagagaatgagaagcattaagggttcatgaatatagagtgagtgcaattggttctaaaagctatcctcctcaaaattcctggattggtattgcttttcaagtaagttattttgagacaaaatggttttgcttttcaatatttacatttaatttcattttaaacaaaaacagattgataccaacattcacagggatacctactgtgctgaaggctgattttgacagttgtaagataatacatgcaattctttgaaattaatcatcacctaaatgttgcttattatagacaaatacatagcaacaaatttagaattaaaagatgtttgtaaccatatgcctgtgatgatctatattttaatcagtacatactcctgatgtttttaatacacagtcagcaagtatttacctattgcctgctctgagatgagcattcagccacatttgaataatgttttgaaaggtttgggttgttttcagggagaatataaagtaaacagccaagaaagacccacaaaatgcttttggagaaaagtgtatgatagtgcgttatttattgctcaaataaagacaatggatatttaaataaaagccatgggaaataagctgatacaagctatatggggttaagtcattcaacacattttcatgatctatatttaggcatgagattaaactggaagccccaccagtcagtgtaggatagagtgccagtttatgtatgaagttttagaaggaatatttttctttgagattaaggaaataatggtatcccatgatacttgcactttctaccttttacagtagtcctccttacccacgatttcactttctgtggtttcagttacccatggccaaccatggtctgaaaatattaaatggaaaaattccagaaataaactatttgtatgttttaaaatgcatgttgttttgagtagcatgatgaaatctcacgccatcctactccatcctgcccaggacatgagtcatctctttgtccagtatctcgatgctgtgttatccacccgttagtcacttagtagtcctggcagttgtcacactgactatcggtattacagtgattgtgttcaagtaacccttattttacttaataatggcccaaatgcacatgagtgtggatgctggcaattcggatatgccaaagagaagccataaagtgcttcttctaagtgacaaggtgaaagttcttgacttagtaaggaaagaagaaagaatcatatgctgagatcattaacagcgatagtaagaataaatctattcatgaaactgtgaagaaggaaagagaaatccatgcatggtacacataattattggtactaggcatagtttcaggaatacagtaggggagctggaacatatcccctacggataagggaggatttctgtaacgtaattgcttttgtatattatcttccctattaggacaagagctcctcataagtaaagaggatatctcaatcatctttatatccaaaattatatatcataaagttactattcagtaaatatttattgattgaagtaggtgatgacatactaaaatataatttcaatatctagccctttctttagaagaaattgattattcatacttgttttaaaaacctgattgtatttctcaagtataatattgttaacttattgaagacaggtttacactgttaagatttaaataattaaaaccaactaactgaattttatttctaaagaggactgctcaaattttgtgcccaaaaaactatgatagacaatttaaagtaagagattttcaagttataattagtagtggaactcattacatgagaaaattaagatgtgtcattggtaatagtaataaggaatataattttgtagaatcacagatattataatatttttaaatcctttcttaagaaattgatagtttttttcaaaatctatgattttggaggatgaggtattgtaggtattggctttgtttgtagaagattacacatataattgtataaagttagtgtaaatggattgctcatatttcaattcttagacctcatcttcatttcctctcctggaaatccttgtgtacaattaccctggtaaatggatggacccatttcaatattttatatttaatttcattttaaataaaaatagattgacatcaacatccccaatgataccactctgctgaaggatgattttgaaagttgtaagacattttatgcaatcatttaaaattaatcatcacctaaatgttccttattatagtcaaatgcatagcaacatatttagaattaaaaagatgtttagcaccgtgctggacacttagaaatgtccaataaatatttctatgatagttattatcatcttttctaatcttgttggagttgttcacttttaggagtgcttcaaagatcacttcttctagtcaccttctgaactcctctttactttttatagttcagcataccactacctgctgattggttaatatctttggtagcttctgagtcatggttcatcaggaaaccaagggtgcgatttgcattcaagcaaatcctcctccttcctcctgctcactgtcacttctatttttactttggagcgcaaggttctttaaggcgtctggtattctgaggcttcctgcatttacagatttactacctgcttctctataagaaatgtgaattggtgacaaatctttaccagaaaaaggcaattgtaattagattaatacctaaggccaaagcttttctttgctccgaaacccgtattctttcccctttttagactactatcaatttttatctcagttccttcagagctcctggttaattttttttttaagaaaaaatcaagacttatttgagaaccttatagttaatgcattgacaaacatgtatagaattcctgctttgtctgggaatgtttgttaagaactagttcaggatttcttatcctggcatccatgtttcttcaagggtttcagagaattttctctgaaattttatacaaaatgtggtgtatacatttgcatatgcatttttctggggaatgagcttatagctccaatcacgttaccaaagggttgagactccaaaaaagttaagattcactcactacactggcagaaatacaaaaaacacatttccttggttgaggaacttgtaatataaatgaagctgacaccataaatgacagtataaaaataaaggtgaaatgctctacaataggtaaaaagagaaaaatcacttaataatcattttggagaggaataactgagactttgtctggatttagaaatgttatttatgaaagttttatgggacttctatcctgtgtgggaaagagtgtgagcaaagccttggaattagtattgattagagtgcatgggaacataacgaagagcccatgtcttgaataatattgatttataaagaaagaaaggttattgaacatgtgagatattaataattctcatggtttaaaatgttgactaatacaatgatacattgtagttgatattttagctaattacccttagatttaaacacttttggattttgaaaaccttaaatattcttcaaggatgttttgtaaaatgcctcagtcacaatgatcatcatgatatataattaataaagacactggtccatttcccaaaggggctaaacacagttttccaataacaaatcacattatagcagtttacactgacacagactgccccaaacttatgtatatttgagttttattaagtacattcagtacagtttgcatctgggcctctgttttatttgattaaaagaaaaaagttcaaattttatggctaaagagagcagacatatccatttgaatattccactgtcacctcaaaaataatatttttttcttttcaagcagtgcttttatttcttacaatctgtacaataaggtgacttgccttgaaagcatttcactttttctatccaaaaaagttataaaaatttgcaaagttaacttttataaattgatagtgttgtctctgactcacatcatcatattagagatgaatttccatagtgggagggaaagaaccttagatccaacatacccacaatagtattttagatcaagaaacaacagggtggggaacatcacacactggggcctgtcgtggggtgacgggagcggggaaggatagcattagtagatatacctaatgtaaatgacgagttaatgggtgcagcacaccaacaaggcacttgtatacatatgtaacaaacctgcacgttgtgcacatgtaccctagaacttgaagtataataaaataataataataataataatgtatcttaaactagactgttcaggatgctctcctcccttctacttttatcatcttcctcctcgctcctttttcttccaagcttcacagtttctgtccattgtaaccagtctttcattctccaactccctcatctttcccaaaatggactcattttccccagaaaattactttcttcatctccttacactgtctttcttattttcactcctcgctataactgcatttctgttacctccaatctacaatccggagtctatcttttcctttcaccattttaaatattgctctaaattcaaggcttggctgaagagtaaccatctgctagaaagtttctgaattacaactatgcaataattatgccatagaactatgctcctaacatgcacctctccagattttaggtacatagctcactattttatttagaattaattctactgattcctcatgtatatgtgtattacctatcttctcacccaaactataatattcttgggtcagatataagtctattttattattggtttattgtttgttttattttgttttgttttcatctatcagatcattaggcacaaaatgagctcttgatatgtagttattaagacactggcaagattttaggaggggaatgacacatagttgctagccgccaacatataatttatggtgtacaaagcacttttacatgctttttctcatttactaatcatagcaacactattatatattatcatccacattttgcagataagaaaacagtacatttagagaaagtcatcgatttggttaggaataggaaactagtaaattgctaaactgagcattaaactcaacatttttactccatacccaggtttccatgttaccatagctgtcttccaaggctgcattttgtacaagagagttaaaaatgaaattgtttctaatatctgtttgattaaaggaaaatatctggaacaaatttgtcaagatagttaacagaatttctaggtgttactgaattttaaagtctccacggtgaaatgatggttaactaacatttatttacatatggaagaaggtatttttggcagctttttaaggtgtaaaacttaagacacctcagaacatgtaggataaaaggaaactttgtcagggatgtcttgagaaacctgtggcaatttgaactgtgctcaggaggaaggacacaaatcatggctgtagtgagatctgtgaagtagtcttccctctacagcttctctttaaaagctaagtaatgggtggcaaaataaaccaaactgaaactgagatgcatgtcatctcattagtgtcttcttagatccacagtgctagcactgataagctcaagtgctgagaattgttcaaataaattctatgtgcaatcaatagaagacctaagaaaactgtgaataagttaatcactataattttatatattaacaatttttcattctctttctcctgatataaatatttttgtcttaattcttatgaattgagggtcaagttatgtctggttttccttccatatcatgtatggtctgcctgaactatagatctggcaagtccttgaactatgctaagtggtttaaatgggataatacttaacatactttgataaaaaccaggtggcttcactcattaacctcttggattcactaatatggaaaacatcatcttatcacgtttttaacatgaaaacaacctacctactacctaccactaatttttaaaataataatcttatcattcaaattatagtacattttaggttctgcacataatactactcagaaattagcttagtcacatacacccaggggatcagtcactgctattataaaaatcaaaaaagttataaaccattcttcagtaatataaaatagagaaaatattttagcaataggaaaaatgaccagtatagacctaaacaatcagttgtttccctttccccacctctctaaacacacattttaaaataggagccgccccgatcaaattttaaattttggcaaataaatagaagacttcaatcttccatagaaaataacattcattttattttactggaggtctgatttagaattcaaaaggaagtcaaaatttaaaaggaagtcaaaaggaagtcaagattaatttggaaataatgggacacaaatatatatggatatttaatttagcaatacattaatcacccaaaataatctcaagggaaaaagtttaatgacaaataacggtaaagaggagaattatttttttcagaattacacaatattgttgaaataactagatatgaatcctaatttgagtaaactcactttcacagagaacttaagagaaacataagtcatattcttgaattgaaaaattaggatgtataagtagcattataatattctcataatggtttggactcactcctaactaaattgcccaaataagttgatctactgctggcctttgccatcaaaaatatttaccaatctccactaggattgtgcagataaatgcaatggctgccatcattacaatcagtatgcatgtacttactgaggaggagtctacaaatgaaaaccaattcctgggaatttgtgggcaatttcaatattaagagcaaccatgactaacagtaaatgacaggctacatttttcaatttgctaataatgattcttgctttaatttttttaaaatttccactgctgatttatcaaaatatatggattagcactgactgtaaagttataatctagatggatcattattaattcttagtactaaaatacatatttttgaattaaacttgtcaaaaattcaattctgtctccaaaatttgaatcaatgttaagcataactttcaaagccaactcacctagcaacattcttctacatctgtattaaagaggaggaaagtcttagtgccaataatcactgaatactaaaaaaataaaatgctcacaaacttagatactcatgaagtctgaactataagagaatatcctggaaaagttgaggcaaagatgtcaagtcttctatttgaataaaatttgttatcctataatttctgcttacactaggccagtagatgacaatatgttatgaaaacaaacttctctgaagagaaactaagactttaactaaaaagataggtttaaggctagaatttatctcatgttttatagataagcaaaaaataaaaaccatggtgcagtgttaataaattagaagtgagtttaatgtttattttatacggatgattctgccataaccaaggcaattataaaaaataataataataataaagttgccctctgcatttctcctgaagacctcaactttcagtctctcatgcgcaaagatgcttccaggggcttggaatgaggaggctagcaatggatatgttttatttttggaaaatctgcaaaaataagctgttttaaccaatattggtgagagcactgtgttctttctacctaactttgtattcatattgcttttataatttttctttttttttccaaaaagattctgataattgtacaagtgtcaagaaacttaacacctggaaccactcctacattctttttctctgcttcaatatctctccccatcagtcctgctcactgaaatccttcctagcagtcaaggactaccctaaatacctcctctctaggcagttgttacagtatgtttatagtacttcgattgtatccattttcagttttaattttactcggtcttaatttatgattgtgttttttaatctgtttttttttttttttttttttttttttttttttttgtgatcaccataatgtagtagcaaatgtctacagcctaaaataaggctggcagagacttgtacccaagccttatgactttctagctgtgtaacatacacaaaaaaaagtcacttattcttttactctgattgagcctcagttcccttacattttgatacgcatcaaaataataggattctcttcataaactcctcacgattaaatgaaacaatgcatattaagtgcttatcagagatcttggacaaggatgacaactcattatgagctagttcttacaattacggctatttaaagccaggcacagaaagccaaatatctgacgatctcaccaatatgtggaatctaaaaaagtcaaactcatagaaacagagagtcaaatgctggttaccagagactgggaggtggggatggggagctgttggttaacggacacaaaatttcagttagacaagaagagtaagtttaagagacctattgtacatcatgatgactgtggttaatagcagtatattgtatacttgaaaattgctaaaaagtagattttaagtgttctcaccacaaaaaaataattcagtgaggtaatgcatatgtttattagcttgatttagccattccacaatatatacatatatcaaaacatattatacaatataaacatacacaatttttatttgttaattaaaaattagataagctaaaattaaaaactaaaaaaaattgtgaccaagccactatttttgatgtattctccgttgaggttttccataccatcctgcaaaatacttagaaaataaatatttattgaaatgagtaactcatgagaatattacttttttgagatataaaattattttgaatacaaaatgagcaaagataaaaaagtgttttttcataaaactaatttgtgacatttaggattataggattaagtaatcagcatattaaataaaacaaccaaaaattcttcaactataatgtttattctgtcaaatgcataatgtaaaataatatttgttttggcaattactgaagactaagcatttgtttgcctcccacataataagcagactaaagaaaaacacatttggtagcttgaaaaatggcatcttcatatgaaaaattaaatatttctatagacacattttcatttatttgtgataaagatttaattttaagtatttttaaaagtattccataacacaattccatttgttgttgttgatctatatacttacccatatgtaaaatattttaaataataacatatttgaagccaccgggcacaaaaatgaatgattgtgaaatgtgcaaagtatttgaatagtgagagctaattctatactattaaggacaataaaaagtgcaaaagtaattgtaactgctaaaatattatttcaagttttagtccatattttgatctatggtctaaattgaagtttattgattctgtaactcattggagtttcaacctagagaaaccagtcactgtattatgctgggggccttataaaaagtataattgtgtagaagaaagaaaaatgggtaagagaaacgtaaggacaggagacaagtcagctatttagttaccatgcaatgcagttatttgggagctttttctcaaatgtaaactgagaataattatacctaatttaaagctgggtggtgcatagagcacttggatcaatttctggcatatagtctgtgacagagctatgtaaataaattaatgaatttatatctagaaatccaactctgtataccaccaaatccctttattattttcttttctctaagcatttaatgtaaagtttgaactgtattattctttcctactaatttaaattgctgcttgccctatttgaataaaaaattgcctatttctatggttttgctaaatagtgaataactagtgcccttacaggaatcacaagaaaaacacactgaaaaatgtacttggaagaaagaatatatggaaatatatgataaagaaataactgggaagatgccttaggataaattatgaaagaaaatattttagctacccttttctgttgaacaaatgagaaaatgtggtcaaaaaacaaggataaatctattgggaaaaaaaatttatctcctattacccaaaattttacctgaaacatgtttttaaggaaagagagaacaaacatattctgaaacatagaagaggtgagtttaacttgaaattaagagcaaccaccctccccaaggggaaaaatatctccaaacctctctcctcatgtaaacagagactttagagtattagcagtcaacaatattttcattaattatttataatgtagaaagccatgcccatttaattccattttcatttaaaacactacaaaat

SEQ ID NO: 716 - DNA, 32742 bp, Homo sapiens
  source 1..32742: mol_type = other DNA
aaaggcacttcggagccgagttggggcagcggtggagcggggacttcgcgcccccaggggaacgggcgcccctgcgaaaccgtcgccagccacgcgtccttgccgtccgacgccccctcacattggagaccccggatctctcccgcctccttcgggtcgctctccggtaagtccatacccccgccggtgggggcacggacctccctctccaaagtttctcctttcctgctactgagtcgaggggccacggggtggtctgggtcccgagaggtgagtagggttggggaagtttgaggccaagggggccgggagtctgccccgtcctttgggggagtttggaagcgtccggatggaaggttcgtctcggggagtcggacccgaggggcgaggagccggctcctctgagggactggggctgggctgggggcagatttcctcccgcgggttgctgcagagaggggcgggccacgcgtcccctgcaccggccggctctgcgcccccgtccctctctcctttccctgggacgaacccactcgcgtctagcccagcccccgccagccctagcggtctccaaggaaggttcttttgccccagtctcaagcttcggggacccctggcaccgccgtcgtgggaagtggggcggggggtggggtctgggcgctgggagccggagaccctgggtcagggagaggttggggagacagactgcaggggccatctggaagcaacgggcacgaggagctggggcaggggcccaagaaggggctggaggcgcccctcccctctctccaaatctcatgactcagcacgacctaggacgccccgtccctgcttcagctctgtccccaagggctaggctcgcagcctggcgggtgctgacagcccgactcccttttctggactcttccatgtacctttcccatttggggtgcccccttcccctgcctatgctccttcccccacctctggggcacagggcttttatttttcaactaaaaagtggagctttatcgtttcacatcccactaagccaggccccctcatcctgtctcctcccttttcatccccacattccacaggtgcctccaggacacccccagcccatggctcgtggggtgtctcctggcagggcagtgtcctcccttacccctggctgaggtggcagagtaggtgctctccccgcagcaggagaagggagtgcaaggacagaagaggtgctggcccaggaggggccactgcagtggggagggaagggcagaggccccgtgggcaggtagtacaggttgagttagcttataaggaggaggaagtccttaggatctgggggcgcccaggaagccagaaaggtgaactggggtctgacctggaaagcaaaagggtgcccttctccctcccctactgctgccgccctgcggggcctctcccaggtggaatagattgtcctccatccaatctgtctggatccccataacctggcacttcattagagggggtgacagaagcagggaagcccttaatcctttcaaccatctctccctacttaagactaagtccagctttggggctgctagaaacatctctgtgaccagcagaggtgctgaaaaaagccatgcccagtgccccaaaggcgggcccgagtggcaggtggaagggggcagggtggctctgatgcagtgggacgtgcctggcatcctggtcctgtggaatgagagtggtggtctggcaggcactgcaagctgcagcgtgtgtcagggccctgggggtgagtcagcgtcaggggtccacgccaggcacactgcagcctagggagtccaactccaacccatctcctcccatgcccctggaaaatggccagtgcccactgaaccccgactgaaccacctttccctcagggtggctgcctctgctctgcttggctgccaggcagatccctggcttcaccctctaggactccccccagaggcttggctttttctggagatcttttgggcttaatccttaccttctcccctccttgtcttgccaaaggaggaggagagggaggcagaggaaagtttctaggttatagcctcacatagacctggcccaccattccctggaggaagagagaccagaccactctgctgggagtctgctttgttctgcagtccaggagcttggtccagggaacttgggttttcttttgggggaagggggtgattatgcaggaacatttctttttcagctttggggtctgacatccgcagaacaggaccaggggaagcaaaaagtgttggtgttcgtaaacattgacttttcacctagagaagcttgcaactggcttcaatttaggactgaagctggtttcacctgggcaaagcatgtaccttgctgaagacctcgcagggccgaggagaccctttctggagctgggtctgggctcacctgccctcacattgcagctggagctcgttttattccttctacccttaggcagcttccaggcaggtgtgacagggctgtctatgatactgcagagacctgggggtgggctttggaggtggctggagaagcctcttccttgcccttctcaagccctggggaccaggctaccccagtgttccccagcccctaggcaagcctgacctctagtcattctttctgcctccatctgaacattatcatatctcaatggggtctcctttttcttccccgccaggcctgtgccgccctctcaggggagagtagatagaggggcagtgagtgcactggaagcagggggacagaaggcagtgaggacagagtgggaggaggttgggcttcatttgcctggaagaatgaccatcattcccttccctggacagaagcatcctcgtggaggacttaaggctgcagatgagtagaaacactacttcacttggctttgggatttgctctgtggacttccccagtctaggcaggtcctagctgaagccagagtatccccaccactgaaggtccagggtggtggggatactctttaagaactggaacagcaagtcagagggagtaatgggggggcagggtcactcagtgcagtggttaaatatgaagcaccaaagaatggaggctaggagatagacaggcctgggttcaaatcccagggctgctaagtacaaagtctgacatttgcaacaagtattttattagtgagtacctaccatgtgccactattgtagtctctctgggtggggaggtgagcacagccgcaggccctacacatgttactgagccactcagcatcccttctgcattcgttccactattgcattttgagaatctgtgctaggcaatggagattcaggtgggaacaaaacagacctgtttcctgccctcgtggcatttacaatctagtgaataccacacaattagataattacataaagaattcatcatgactgtgccaagagttatgaaggtatgtaggaagcttcgagagcatgtaacaggatgatctgacaatgtctgcacagttttctctaaagaacagaggtaataatgcttaactctcagggtagtattgtagaactgataactattcgtgttattttagaagtagcccctggaccaccagacagatgcagttctaaattccctacgtgaataatccatccataggcaacaagttgattcttcatcttccactcagtcagagaagccaggccagagaagctgggattcagttatggcttctcctggactccagaagcctgtgataaataatatagtttcattggagaaacatcaagtcagagatttttttctaagtggcagtatagtgactacagccagattgccagggttcatcctggttctgccacttgctgtgattttgggcgagtcaatcacactctgttttttagtcttgccatctgtagaatggagctaaaatttgtaactatgacgtagattgttcttggtgaggatgaaatgggttaattcctgtaaagcgtgtagaacagtgcctggcgcgggaggagtaagtgcttttcatccttgggtggcctgcgtgctccttttcctgcccacacacacaacactgtcttgggttctccagctgcagggagcactgtccacctttgatattcttaaaactcaagggaaggagttgccctcaccgtcttggtggtcagtcctgcatttcatccccctcactcgaagacggtttttatgcctaatgagtcttttcttgccaaagcttgatttctgggaaggatttgtcccagcaatccttcattttcatctctggaactgacagttcaaggaagtagccagagtgatgggtaaatttggatccaggcccagagggacctgagagtcactgtgagcctggagggcaggggaacacctagctgccagccccctcccctagagaggctgggtctaaaattaaacatccagaaggactccccaggccaggtgcagtggctcacacctgtaatcccagcgctttgggaggctgaggtagaaggatcgcttgagcccaggaattccagagcaggctgggcaacatatggagaccctgtctctacaaaaaatttaaaaattagctgggcatggtggcacaccaggttaagcaggaggatcgcctgagcccaggaggtcgagactgcagtgagctatggtcatgccacttcacttcagcctggaaaacagtgagatccggtctcaaaaaaaaaaaaaggactcccaaaatccaagatgagcagtagatattgtagaagcttcctccctggatcattttctgatgaggataaagtccctgctggctgagtgccagggaggaggttagattctgaaagcccctcacacttagggaagtaggatgtgagtagcagggtccattaaaatggccaagcagcctccaaatctgaaagaaaggggggttacctgctgctgtaaagtcaggagaggcccttccttggtcactttagccggggacctcaggatttcagcttttgctgtcagtaacactaagcatcaggcataagaaagggcaaagtcagtgtgggtcccgcacaacagggaacctcagggctcctccctgcgcctcctgctcccctgctcggggatagagcggctcacaagggcggtcaagctctcatcactgcagtcctcggctacgccatcgctgtccccactttacaatgaacgggcaaaggcccagagaagttgtgtggttcaaaatccccagagaagttgtgtggttgttcaaaatccccagatcataggcactttgcagggggccttccaggccacagcagctgagtggtcagaacccttcctcctctcctcgccgcttctcaccagctctacctatggcaaatggagcccgagaatacaggtgcgggtccttgggatgaggccactaacgcgttgagtagaagcaggaggctgggtgatttaaatcaggcagcagcctttacaaaaattaggcagtgattccttggaggaattgaatcagctctccctccctgatgttgggtttccttgggctctccataagggctctggcacctccttcaggaacacctgctctgaagcaaggagggaggccccagggtgggcagtcttgagtgcatgatgggacaccccgctgaatccagagctgctccagcctcagcagccctatctgtgatggcatgctgatgtcatcagcaccaaaagcccttgcaggtttcaactcggcaattaaacggctcctctgaagcccagcagccgtgtgtgtgtgcatatgtgtgtattcagggtcctaggggtgggctggggaggagggccccttgcaaaggcagggagaatgggagttagtgggtgtgtgactgcttctctccttcggagactccagacctgagaagtcagatccctatgggactcacagcccaaaagtcaacccttgcgtgcaggtgtagccagagtctaaactcagcctgagccagagcaccccattccttccttacttcctactttcctcccgccttttcctccacgttccactccaatgcactaagcacctactctgtaaaaggcacctgggatgtaaaggagaactcaaaataaccgtgtctcctctatcagcctgggcgctccccaaggccagggcatgttgtttctcctcctctcctgggtccccctagcccccaaagtggagttctgaagctgggagcattgatggtggctggtgcagagtgacagggctcccagatgctctccaaccccaggatagtcgcctgtcaacacaaggctttcctcaatcacaaagcttgcttcacttcctcccatcccctgcagagaaactagaagcccaagggcctcatcactggacagtctgggaccaggggaggacagcagctgggtggggagtcaggaaagctcccccgaggcatttgtcaggtgcctctcagtaaggcagggagtcctcagaccatggagaactctggcaggacttgccataattgggttgatacagtggctctggaatttagtaattaggaaatattgcaattagagacggaatttacccattactattccatgcatcttaatacagggtgtaagtggttgtaactgtgagcttggcactaggcatatgggaaaatagaagtgaatggagaaatgggatgaaggaaggaggggatgggaggagcttaaccctttccatacccgagtagactgaaggagcagcctgggggtgatgcagggttagggcgagcccagcagcccaccgcatttgtaagaggtgaccgaggcaaaaatcacaggctccctccggaccttctgcttctttagctcaggtaggatcagatgcagggcttggcaggggttaggagagtggtgatggaggccaagagggagaggctgcaggggagaagggctcttctcccagtttcctgctcagctgtggagaaacagaaaagagttgtaaccacctgcagtagtgtgcatgtgagagacaggagagggtaccttgtaccttcatctctccctccccacttgttccttcccccgcccttctttttactcccttcctcactcctactcttagctccattttcctctgaagtcaaatgaggcatttgtggtattgcagggctgagctgggtagggccatgtgtatgggcggcggagggaggggagcggtggccgggggtgggagggtggtagcgtcaaagaggtggtgctcattttttcctttccagaccagaaatgccttccccaaggtcagccagtgctctgagctccaaagaccttcccagagaacctctgctccctaagggctgggtggtttgagagaaatctcttttcctcaccattgattccagtctgaactaatgatccagatgtgttgtgcatgtccttcctcttctacaaagtgactcgggaagcagtttttatgctatttgtagaaaggaagcattttctggagcggggccttctctgcttctgctacaccttaactccctagattagaggagagctgtgaggccgcaaggaggggggcctggagaggggcttgggctgagggtggtagaggtctctgaggactgtccttgtcttctgcctcctgtgtttatttggagaaaagcccatttaacaaatgtacaggtctttacctctatccctcttggggctgtctgccatgtatctttcattgtaccaactcagatggaccaagtgacggcccggtcatagggcctaagatgggatgttaggagacggggtggaggcctgcaagcaggaggagaggggaccacccaggcaaccctctagaagtgcaggaaggatgaacaagaacctattggttaagtgctcttgggtcttggagggaagcagacctaggactgaaatccatcctcaccactaggagctaagaagagttacaggtaaaccccaggaaactcaagggtggctgtggctaggatcagtgttagcgggaagcatggagttaattggctgtgggagggctccctctcccagtttgactctcccacgagtaggaaaaggcatcactttaataaggctgccctgtttccaaatcaatcctggcattgcaggaggcgaagggggaagcacagctgagaaattggattagctctttgatgctgggaactgtgctggttgctgctgctgcagctgcaggaggcagggaagcatcaagaactgagcctgccattggcaagccagccccagacgtctgaggcttcccagggaggcgtgctccacccccattaggtctcctactggtagagggtggcaggggtgccctggggcagacagtaatagaagcccaggtcctcaccactgcaaacctggaggtgtcttcgtgcctcccctggagtagatcgtgagccccaaagacctcaggaggtgaggcaatggggaaggggcagaggagaggcccccacagcatgttctgtagggcataactgaagcagcgtgtgtgtggctgggagtcagatggcctaggtcaaaccaagactgccacttcctgcctgtgtgaccctgggcaagttacttaaactttctgaacttcggggtcctcatctgaaaatggagacagtaacacacagggaacaggcccttgtgaagtttaccttatagcagtaatcaagatgggggccacgggtccctgggagtccctaagaattttcaggggggtccataaggtcaaagcagtttccatgatggcaataaagttatttgccattcccatgcttgacattgatggtgctaaagcagtggtgggtgaagctgctggcaccttaccatgaatcaaggtaatagtatcacactgcacccgtctttgtgttcttccacactacacacccgctaagcaaagtaattggtaaataatgaaatgccattttcagttaagaatgtcttcttttcatgaagcagcaaagattataattatattgaagcttgattctggagtgcacatctttttaatattctctgtgatggaatgagaagtacacataaagcacttctgcttcttacagaaatattacacaataatttctcaagcaactgaacagtgcccatcacctgtgcatctgtttgagttgcaggctgaactagccatttttccatgggataccattttatctgaaagaacaaccaacaaactccagttattcagacttgggtgttgagcaggcatttttgcaaaaatgaacgaagtgagctcgtcacttccagaaaaacaactggcagtatttgtggccaatgataaaatttaagctttcaagcaaaaattagaattttggaaaactcacacatattactatgaaaaggacttttgtgataagatcagtgggaatagtaatagatgtgatttgttaatattgtttaatgaaattcatcaatatttgaaagatcttcacaattcggcaagccaatatcttcgaaatgataaatgaatgatgtcacaaaatcatgcacagaggcaaacaagcattccaagtgcaaggtttcagattccccactgcagccagtctttaagaagctaccacttggggagcagtgatgtcatatcaaagaaaaatatccacaatgatctgaaaaggctttattaaatacccctcccctttccagttacatatctgagtgaggttggattttctttcatctttcaatcaaagtaatgtattgcagacagaccgaacaccgaagttgatataaaactctagctaccttctagtaaaccacacattaaagagatttgcaatgatgtgaaacaaggcctccttcttactagatattttactagagaaaacgtctactatatatttttttggtcttggaaaatatagttacttattaaatatgttgtattaacaggtaatgagttactattgtattttgagctaatttagaaatttctcagttttaattttgaatatggtaactatggatggatctaacttacataagaaaacgctcttggagggtcctcaataaacgggtcttagaaccaaaaggtttgagaactgctgtcctaggtgaagcccagcccagagccgggcacacagtgaatgcttagtaaggacctcatgctcccctagagtgcggggcttcgtgtcacagggcagaacctgggggcattctctgtatctcagaagtccagagtcagcctggcagccttgctgggcaggctgcatggaacagaaaagtccagagctgcacggggtggagggagcccagggagcacctagcccctggcttccaggtggcctctggggatgaggctccctccagggctgcctggagaggggagcttttcttggagttgggagagaggggtgtctagggagagtcccccttgactgtcccaacccctaccttcaccagagcaaccctgcgtttatctgccttgcctattgaggttcttatactggaattctcttaagcttctgtttaaaggaaggggtttgaggcttcccaaagatttcaaaactttgtagtccagctctttattttaaagacaaggcccagagagggaatgtgacttctcaaagaatacatggcaagcaatcaactcaacggtgatcaagggaaaaccgacatacgagaccatgctggatggagcctctcagccggtagagcccagtgcctgtgcagcaggacctcagcaaatgttcatacactggataaaaaagctccctgtatattctgtcattttttctttataacaagcctgagctttattgaagtataatttatagatcataatattcacctggtttaagtgtacagttcagtgatttttagtaaatttacaacattatacagctatcactacaatccagttttagagtacatgatctattacccctatttacagagaaaaatagtcccagaaaggtaaataaatgtcctcaaggtgacactgctattgggtggcagaataacatccagattcaagtttgtctgtcccagtgccacaccctgctcatgctgcacactgcagagaagggagtcaggtggtccactgtttggggaccatggacaaatgccctgccgcaggctggtgtttgtgggactctctctagagctggttgtgccagtccaatttgggcactggaggctgggtgcagtggctcgcacctgtaatcccagcactctgagaggccaatgcaggaggatcacttgagcccaggagttcaagaccagtctgggcaacatagcgagaccccatctctacaaataataaaaaaaattagctggacgtggtggcatgcttgtattcccagctacatgggaggctgaggtaagaggatctcttgagcccaggaagttgaggctgcagtgagccaagatcataccactgcactgcattccagcctgggcaacagagcaagaccctgtgtctcaaaaaaaaaaaaaaaaaaaaaaagacagtttggttactggttctatccacacagctctggatgcagaggaaacctagatcccagccccctcagaactgaaatcctccacaaatgggggacctgaagtgcttcccttggcctgtcttttgtaggggacctaaagctcctcattgagcaggccctctaagagttgtctgctggaaagtacaatctctaggaagtaaaatcagtccttaaccctggtgacccctaagagtgaggaagttctttcttgtgtctagccacattcttcttgctgtactgagtgcctatttcctattcctatccacccttcctgttctgcctggtgagtctgggggtcggtgtacatagttcagaggccacagagaaaagctgagagctggatggagagtctggactgtctgcctagacaactgcctgctgtagttaccatttagcactccaacctccaaggatgactgctcttttcacaggaaggccaggcagtcttcatgtcccttctgtggcttttgtggctctggcactgagagaatgtggtcagttcttcctgggaggatgagtgaagcggagggcggggaggctctgcaggatggtggaggaaccgccttcagacgaggtcagatgtctacccaggcatacctggcataatggggagcacacgtctctctgctcttcagcgggcacagggctgggtaattgattgccctggcacgtggctccttctccagcttggccaaccttgactgtactgctgtccaggtacctctctgtaggggctgcttctagcacccattttagaccaggcatggggaaagacctagacatggtaaaagatgaaagggagagtattccctgtggtgagaggggtcacttgagcagagtgaactttccttgggggggtggtgagaccctggacgctgccctgtggaggtcatccagctaacgcaggaaccggatccctgatccttcaccctccccgcatcccctgctgtgttttctttccctctggctcctcctgtccgtaccaaggagctgtgttgcagacagaccctgggcctggcagctatcagcaaggaagaaatcaatagtgagtgtggaagtgcttggaggcagactggagcagtcttcctagggtagggttttctttttataaatttaacattttattttttccagctctattgaggtgtaattgacaaataaaaatggtatacattcaagatgcacaatgtaatgatctgacatacatataccttatatggtgattattacaatcaaattaatcagcacactcatcagcacacatagttgctgtgtgtgtctgtgtgtgtcagtggtgaggacacctaaagcagatcgagacccctgggaccctgagtcctgggatacaaggctctggctgttttcttctcccaaataaactggacagattcctcaaacagccccttctgggtcttggccattgccctactttcagagagcatttccttcttgcgtgaggttcgcagcaagtcaggacattcggctcagagtagggaagactcacaactttacacaagttcgtgtaccgatgcaaacaggccacacacatggctcttggcaggttgcccatgggcagaggtgcctccctctcacattccttggaaagtggggatgaaattgaacctgaggccttatctccagctggaaggagactgctcaggtgacgctggccccctctcctggtccacacgccacttaccggctgggctcaggactgctccatgtgagatcctgggctgggttctggcttggtgccttgtagttatgtggttttcttgcagactttggacctgtggcttccccaaccattgctgcctttccagaccctgtggcagctgccatctgccgttaggagctaatgctctcagtgaagcttgctcagctgcggccgttagtggaacacttactggaggcagcattgataggggctgttgtcctcagaaatgggggcttggtaggaaggtgaatgagaccatgtgtctgggaccaaagcttgggacttaggtcactgtcctaatgacagaggtggtgggggagaggtgatggggaggaaaggtatggatgaaggcagatagactcattaaatccttgcaccaatgcgaagagctcacctgatccccctgcttcaaatacattccatagtgctaagatgcctttttttgtccaaagttctgtagagaaggaaaattcatgatattacgtctactcactcctcagtgttggggccaggactagaagctgggacccctggccttgcagcttttcatctgtgtgacactggtcaggctcccatgtgcctcaggccacacttccctaggctcccactcagtcattcattcatttatccaaggaacacattcgtggagcaagctctctgtgcaactgtgatgaagacggaacagacagttcctgccctcatgcctcttacaggcagagggaagcaagacattaaaataatcatgcgattgtttatttaattacaattatttaattacaattatgatcattggaatgaagtaaaaagtgcttaatactttgagtgtttataatgggggcttagcagggtggggaacatgatgcgtgcatggccaccatgatgtctgggctctgtaggcagccaccataggcatcctgggtcttttcatggggtgtcagatccactctctggcactgccaggggtgtgtgcacctggtacatatgttacaccacccctggaagggtcaataggaagagttctgagctgggaggcacgatttgggttgtaaaggggactggaatttctggctctgcctctagttccccaggtgaccgtgaacttgtcactttctctcttttctgtgttccatcctttgtaaaatgaggagatttgactagaaaaatccctgaagtcccttcccagagtctcagaaaaacattagacgtttccaaaggcaaactatagtttttccactggagactgagaaaggaatttagaaacagggctgaaaagtccactaactccagagagcaggagggaggagaagaacaagcccagagtcgggaccgtggtatcacaaatggaggagtgcacatggcagatgcacttgcttatagcactgagacaactggcaggtgattaaagaggtgtaagggagagtgtcatataaatgtttcagaaaggcagagaaagagcctttcagtgggagatgttttgcatggaggcaggggcgatagatgaccttacaaggtctcttcctcagacaagtccatgaatctcttctcctcacgttgccactgatgtcagtgctgtctggatgtctgtgagaggaagatgccaggtccccttggaaatgaatttttgaccataaactatccccaattcacatctctcaatgacacttgtggctaactgtgcagttgtcacactcaatcaaatcgagttcaattacacctttgctctcttgtcctgccataatataaatatggctctgagaagtgtattagttgctgacactgcgggagccggggaggctgggtttggagggtaagggaggccagggagtttcatgtttcagacctagaaacaagggctggagatgggttccttgaagttgtgggattgggctgccatgaagccttttcttcaggaggccctgaggcagttatatctctagatcaaggtgatgggtcagatgccctcccaagggttctttgtgtccttagactttttgttgttaccaggggtcacaggtctccctgtgtgtgtgagcaggggtgtattgcattaatgcttgtgtctgtctgcagattacaaaaggtccaatgacaacttgctttccacttctactgaggaaggtgctctacaccttcaaaaaatggttcataaggtcacaaaggcatgggattaacctataacatgaaggattttaggtagatatgaggaggaattttcaaacactaaatatggttagatattgtaacaaaagaccaagcagggggtgagaccttccgcagagaagactggtctgggataggatagatattgagaaaaggtaaattgactatcatgattccttccagccaaaggtttatatgagtgtgggtatagacatgttggagagaagaatgtatgcacagttgtcaaccagtcaacttatataaatatattaaagtgtcggaggggagagaaggaggaggaggagggagaggagaggggtagagggaggaataagaaggggaagaagaggaaaaagaggaacaaagagaagaaggaagaggagaaggaggagggaaaggacgaggaggtggtggtgaataatgctggacataatagggcttagcagggcggaaccccttcctttatcagtgccgtaatgttattgctgtagttagggatggtgtgtggctttgtgtgtgtgtgtgtgtgtgtgtaaattcagcctcaggagacttaagttatgatagtcaagcctgcaatagggcaggcaggtgtccctcaccacgtgggcaggctgcccacttaaattcaggattctgtgcatcgcctactaaaacagcctctttgtatgtggtctgtttacacatgctgaacatttgccctgccagcaagccacagtcatccaccctcaatattgaagggaaaaagaagagtccaagccttgtgaagaatgcagcttctagattctttcagcaggaatgccagtctggggctcaggatagactcagctccttttttctaacacaaatctgataccattacacatgtatcccaggggcatctaaggatttatgctagaaaatgcataaaactctgatatggcttggatgttcatcccctccaaatcacttgttgaaatgtgatccccagtgttggaagtggggccgggtgggaggtgtttgggtaatggggtcagatccctcatgaatggcttggtgtcctcctcgtggtaatgagtgagttcttgctctgagttcatgagagatctggatgtttaaaagtgtgtggcaccaccccccgaccttgctctggctcttgccatgtgatgtgcctgcttgcctttccacctttcaccatgattgtaggctttctgaagtcctcccagaagcagatgctggtgcaatgcttcctatacagcctgaagcaccatgagccaattaaacatcttttaaaaatataacttaccagcctcaggtatttctttgtagcaatgcaaaaatggactaacacaatctcagcaacaagaggaggaatggacagtgcatcttttttttgatactgtcccaaacttgactccagggacccacaggagggtcacagtcatgatcctggactttggaggtatgaccttgaaagatctttattccaaacctccagcctcttggcaggacctatctaaatcgccccaaatcctgttacacatgctccaaatttttcttgcccttccagtggcttccttcttagaaagtttcccctttggctgtttcagtcatcagtataagtcatgctgttttctcatactcagcttctctgaaaggacttgtatctcagtattgtagggtcaggtggtcatgcccagatgcaggcgatgagtagaaatgagaggtttgaactgtgcactgtacccttccccatggtcttgaagggtatctgtcttgaaatatggtctgcctatttatctctttggaattagtctctgccaccttcacttaaatggcctcttggattgtgtcatcaatttgcccctgaatcctccgtagcacccttgcaattctggaaaccccaacagtatttagaaatgcaagccatggcttctccagatggggaggttcagcaccatggacagagctcagtgctgccctcctctgctcacagacagtagggtcaaaagctgagtgctcgggtgatggatgcatcaatatctcagtaatcaccactgaagaacttattcatgtaaccaaacaccatctgttcccccaaaacctattgaaatttttaaaaaattttaagctgagtcctattaacttcctccccctccttctcctgccttattaacctcctctttctttttcaataatatttttaaaacttttttttgtagagataaagtctcactatgttgcccaggctggtcttgaactcctgggctcaagccatcttcccacctcggtctcccaaagtgctgggattacaggtgtgagccactgcccccagccctaactttccaattttggaggtagaagctggctgaggagaaaactagtgttgtataacattgtttctgccctttactgactgtaacatcttagccaagccacctcctctttacgggccccactttttcatctgtaaaatgaggaggatgagctccaagctcaatcacactctgagcctgagtgtccatgattgccttttccagaaagtctttaaaagtaatcttaacatgcaaggcctgagttagagtggggccagtttaacctgtaggtgatagaaagccatgacctcaggtcctgcaatctggcaatgttctcccaaagtcagcgccttgcatctttctccagcttgttgaaatgtttagagcaggggactcttccctgtaatatttattatcccagatacctcattgcctgccccacccataggcaaaatgcagcctttcttggtgggctaggtaggtttttgtggcaggtagtgggcatgtgagcttagctggggatagggcctccaaatgaggctggagttgaataagcacgcctggaggggagcaagctacataggggttagaggggagagccaaggcttctctatgtcaggtcagagcagggtaccagatctgggctctccctccctccctctgtcgcagtgacaccacttcagtaggagagctgggctgcagtgggaacagcctgcagtgggaggaggaagcatggctggatagagtggtgtggagccagatgtgagtggagtgctgggcagagactggcagctctccagagctatgagggctgggggtgctttgatggtgggagagagaatagagtgccagacggtagctgtgtccttgtatgcctgtagcagggctgcaccacatttctggcctcttgattcatctgaatagggtcatcctctgcttccaggctccaggaaacctgcagggaggagggaactctcctctattctccagctccttttcttcccaccctctcccatctctctctctctctctctctctctctctctctctctctctctctctctctccccccctctccctctccctctccctctccctctccctctccctctccccctcgctccctccccctctcgctccctccctttttgagacagggtctttctctattgctcaggctggagtacagtggcatgatttcagctcactgcaacctcgacctcctgggctcaagtgatcctcctgcctcagcctcccaggtagctggaactgcaggtgcacaccactgcatgtggctagttttttaagtgttttatagagacgggctctcactgtgttgcccaggtctggtcttaaactcctgggctcaagcaatcctcctactttggcatcccaaagtgctgggattacaggtgtgagctaccgtgcctggccaatctacatgtcttcaccatgcctctcaccaactgagaattcaagccctccttgttttctggcccagggcacttagcctggagcagaaggtgtaactgtcatccctttggtcatgggaaagctagcccaggctctgtatactgagtgggatcacttggaaccctccacaacctgccgaacacaaaaggggaaatttcaggcaatatttaggttaccgcctatctcccctttcagaaagaagctcctgcttttaagctcccttcagagatgccaagtgaccatttcttagggggcggaggggtctggacgaagtggaggcagactcttgcttagcagagaagactgttgtgtgcatgtgtgagtaggacgagaactggaggcttaaacctcaaataccaggagtatccgtggtcaagtctggacctgaaaagcattgcccagatacgggagcagttccagggcacaagaccctggaacttagtcttactgcagtgagcccaaggctttgggtcttagagaggatcttatcttctaggtcaaggaagcacaagttacacagagactattagaattgttttccttcactcttaggaagacaattctaatagagcaagaacttagtctgttttagttgtaaacccagtgccttattcagtgcctagcacttggaagatactcagtaaatagttgtcgaatgaatattgaagaattagaaccgtccagagacttggtggcttgccgcaggagatgtgaccaccttgtccttgagcatgtctcagcagaggccagggaccattaaactgttagattactggagggactcatgcagcactgatggcttgggcttgaggctcttttccctttggctctgagaatccatgtatctgtaacctcttgtgaagaaaggagacctctagaatggcgctggagcagggctagcagtgggtgtctttctcaggaacatgcagcccagtactttttgcccagccacctctgctacatcaacctgctgccatgcatgcttgtcaaacttgataaagagagcgtgtctatttctcttttcttggaaatcttcattgtgaggttcctatgtcccaggctcagcttggcctgtgacttgctgggcatctgttcagtggggcagtatccatctgatgactgcatacacttttcagaggtgggcgctcagtaggaccgtgggtgggtggggtgtaggagagattgttggttgccttcagggggagtggaggcagagtgggtgtaggtctcagttccagctgttccgttgctgcgtccccagctctggccctgacagagatgaataattgatggtgactaatggatcattgctcctgtatgaaatattcagcagggactgtggcaggtttgtgtaatcagatgtttcatgctgccctcctggtaggtgtaggactcctggatttccctgactcagagctgtggggtgataggggggcacttccgggggaagtactttacaggggagggggaaaggcccttaattccgggacctgacttacctaccttgtgggggtgtctacactgcccaacattcagaatgttggggaactaccaggaggaatcactagtggtaaaggagcagcctgcagccctgggatgtctgagaggatcaggaggatgctgatgctggacagagaatgagttaaaccctgctcccccacagtgttccctgccccctggacactcaaaataactctgtagaacaaccttagtatgcagatgaggaaggggtgctcagagggattaaatgacttgcctgaggtcacacggctagtgagttgtggagccggactcctcccacaaggccactccacagagctgtttgccaagatagtcccttggtctcttctccccactccatgctcacctcatcccctcctcactttccccactgactctgcaggaattatgttattgggatcccaggatagaattacagccaccagcatccatgtgcttgagagagctggctggtccctgatgggggatgggttatgggaatatctgtgtgtgtatgcacacgtgtgcacacgtgtttgtgttgagggaggatctgaggcttatcattgcacatgtgaggtggtgggctcaatatgtatgctcaggggtatgtgctaatctccttcccttccttagggagtagggggctaagagtggtccagccacaccagcccctgcctttcctgatcacagctcagcagggaggagagcgatcccttcccttatagatcagatccagtaattcaggggtctcaggagattcagtctgggggcgggctccacaagggggttgaaagttccctcccttgctgaggctggcccgttggagctgctccgtgagccgttaaccttcctggagctgcaggccacatctagaacaccatgtcctgactccccatttggatctttcccccaccacactgtctttgtgactcccgtcaccatccgaggctgggtgaggaggccacccggggacatctctactttaagaatgaaaactcaactcagaccatgctcaccagttctaaaagaccccgtggatgggccagtgccctcaaccatccctttcagcatttcacaagctccttccaccatcaggaagttcttcctgctctctagtcggagaccttcttgctgcaaacgaatgtgtcctcttgttccttgggctgcagatctctctcttcaaggtctcatgtaaaatcgcaggcgtgggtgatggatgagtaatgcttgcttaacagagaggaaaatgcaattcaggattttgggtttagagccaaatccctctgtagctatctctcatctccaacttgacacatttctccacttgatacctggttgctgtccaggggaccgaatcggagtatccttgcagggggaacagggaggacctgctgctgtcccctgccttatgcagtcccagcctgttccagaccctcgactgtgccgcccacgggggcaggacagagcataacgacagggccatcactgctaaggaatgaataaaaaccttagtgagctttccccatatcctctcatttcacacttctgggctggaggagaaagacggagccactatgggaggtcacattttgcagatgaggaagctgagactcagaaagtaaagggatgtgccagagttcacattgcagagtagagtgttaaagcattttgggtcctgtcctgaaagctagcccctgggtatgggggggtgtcagtgaccagagagccaggcttttgctcacaaatggggtctctgctctcttcctatgctacaggaggggctgcgctgaccagatgggctgcagcatgacacaggcccatgctgtcatccagggcaccgcctccatcccgttaatgtgtcctcagagttgtgatgacattgtgaaaagacattttttttcccttgcttatttcagcttcagttcagtgttaggtacaaagaacttggcagataggaagagacaggaggagaaaaagggtggcttttatgtcacagattcccaaagggaaaaattaacagaggatctattcttaaacaaaagcaaggcttttttttgcagaatccttgatccccccggtctgagccgcatatgctgttggctgcaccatttataaagctctttctttttctttcttttcttttttttttttttttttgagatggagtttcactcttgttgcccaggctggagtacaatggcgcaacctcagctcattgtaacttctgtataaggctctttctccctggcgtctggtcaaggggaggccctcttccgcagaggtgcctcttctgtctgacagacacgcagttgtcacgctcagctgaaggtcgatcacacaccccacccagagctaggttctgcggggaggaagagagtggccccgtggagtcaaggctctgctctgtctctgagcaacatgatagagagtgagagtaactcacgtagagatgaagacaatgtcaggagagagcagcacaaacctgtcacagggatggagcacttagggccaggtggggccagcttacccaagacgggcttttggagttcaagggtgataagaaaaccaggggctgggtcgtagggggaggggactcagaggggagggcacttgaactggacacacacctcagtggcgcctgtgagaattcagccattcatttagcaaacatttggtggagtacacactgggagggcaggtgctttgctaagccgtggtgatataaagatgcttaagacacagccctttcccttcacaaactcacagtccaagcacgtcaacaggtcatttgaatacagaagggtaagtgaatatagattgtcaggctgcagctcagcatggggagctgtcaggtccgcccaagggaatcagagaagacttcacagagcaggagcttgagttggtgcttgaagaaagagtaggcattttccagatgcacaaagggaagaacatgtttcaagcagaaggaatcacaagaatgaggactcagaagtgtgaagccctttggtgggctttgaagagctagagaggaaagcaaacactggcagaggggcgtgcctttggcagggtatgaaaaatgatttggaagaggcagagagctagcatcaggggcctgtttgggacaatgacgtaggaatgacagagggtgggaactggtcagagcagtagctgttgtctgtccaggcctagaggtgcagggaatgggtttcaggatgaccaggaggacttgtccttggcccctcaggaggacctgagagtgggaagctcccccaccccccattatcatgccacttctttctcaggccagtgggacataggcattagggatccaccttcaagaaggaaagagagaagctgtgagctgaatgctttccttgagaccttatctgtctgtctgtctgaggttaagacaagatagagatgacatgaaggcagactgaggcaagaaggtgacagcaaggactcctggaccaaagtgttaacagggttgtgttaggccattcttatgttgttataaggaaatatctgcggctgggtaatttataagaaaagaggtttccttggttcacggttctgcaggctgtacagaaagcatggggacagcatcagtttctggcgagggcctcagaaagcttccaatcatggcagaaggcgaagggggacccccacagggtaacccaaacaacccaaacacctcccgccaggccacatctccaacattgggggttacatttcaacattaaatttgagtgggacagatatccaaaccatattaggggcccagggtcatgtcctcccgggcggaccctctctctggtggatgtgcttgcccctaccctgggggtttcctggcaggagcactcctccccaggagtgtagagggtgagagctcctgcatctgcacacccccatgccccagagcctctgagactgtgtccggatgatctcattccctcgccttgcttgcaggaaacatgccttctagcaatgtgagcctgtttccctagttaatggagctggggaaatgtgcattcatttttcccctgagctgtgacaggcaataggaaatttgccctgaaatatgcttcagtgtggattgaaataaaacactcggtgtagtttgcaacccagcattaaaaaggaataatgcaggcatctcacccagacaccggcttccaagggtagcatttccctcaaactttcttttccaccccgcccaagcatcccttcatgtggtgaggtggggtgatgcggtgaattacctgggaaagaagctgggtcaacgaagggctgatgccagtgtgtccactgacaagagagaccaggagatctgagaccttttatttttaaaatattggtgactttagaattctggaagaaagaatgggttcatttaaaagcccctgatgcctggatttgaataattaaactcaactgattctccacattgctaatggaattctgttggtgtgagcaatggaggtgttaggatgggggcctggaatagcaggtggtggtggggggcactggtgcagatctggttcttctaaacagccccctcttctatttctcttaacctataactgaactgtaccaagagaatgatgaataccagccaggtgagtgggaaatggctctattttagtttattttactccttaggaggaaatgcactgtttgttcaggtggccacttcatcgacaggtttgccaggacagggctgaactctcagacttcccctcacaggcgaccactgggtctaacctctctcttcccggcttccatgtcctcctctgcatgccactgcccttgtcctagtttaggctggtcactcccccaaccctgtccacagcccactgctgcacagatattcctggaataccttttgagcatgtcatcccccctgctgtgtcctggagggcatcaggtgccagagaggggggttgggtgtcagtgctagaagtcagtgagttagagatggatcagtcaggatggggcatttcatcagaacatcatggcctgtggggacagaaggtaggcttcacaacatgctgagtgacatggtaagtcagaataaaggggccaaaggaagtaactcactaaccaactgaaaccaaatacatcacgggtgaggggcacattggagcagagacacccagagacaaattcccgtggacacagttctacacatgctcccttttcagctagtggagacacctgcacccccatgttcatggcagcgctattcacaatagccaagatatgggaacaacttaaagttcactgatgaatggataaagaaaatatggcgcatatacacgatggaatgttatttagccatttaaaaaagaaggagatgctgtttttttgtgacagcatggatgaacctggaggacattatgttaactgaaataagccagacacagaataacaaatactgtataatctcacttatatgtggaattgaaaaaaaaaaagctgaataaatagaaacggagagtagatcaatggttaccagggatggggagaaggaggtcaaaggtacaacttgcagtcatgtaggatgagcaggactagtagctcatctacaggaggaagactacagttaatcataccgaatcatgtgctgaacatttgcgaagagcaaagataactatggaaggggacaggtaggctaatctgcttacctgtagtaatgatttcactatatatatgtatattaaaatgtcacattgtacacctaaatatatacaaaaatacattaaaattttttactgtaatatatttcagtaaaatatgtattataatatataacataaatagttaatatgatatgtacacagaagagtgaacaaatcctaagtgttgatagttggatgaatatacacaaaccgagcacacctgggtaaccttcagccagaccaagaaatagaacatcaccagcactctagaggttggaaatgatccttagtgaatgggaaatgcctcaatttcccccaagcatggcttctagcactatagaaaaggtttgcttgtttttgaactggaataatatagtatacactctttttttttttttttttaaacagggtctcactctgtcatccatgctggagtgcagtggcaccatcgtggctcactgaagtcttgacctccttcagcttaagcagtcctcccacctcagcctcccaagtagctgggaccacaggcatgcaccaccacgttcagctatttttaaaatattttttgtagagatggggtcttgctatattgcccaggctagtctcaaattcctaggttcaagcaatccttctgcctccacctccccaaaatgctgggattacaggcgagagccaccacattcgccagtatacactcttttgtgactggcttcttcccctgtgtgatgtttgtgaaatgcaccctgttgttgcatgtagttatggtttatccacattgatgtgttgtatttccttgtgtcattgtgcttcaactgatttgtccattccactgttaatgacatttgtgttgtttccagtctggggttgttatgactagtgctgctgcgaacatacttgtcatgccttttgggaagcacatttctctagctaggtcacggggtatgtatgttttgcttggtcattgtagggtatgcattttccaaaatgcttttgccaacttacactcccaccagtagtgatggcgaattcctgctcctccatgttttggtattctctgtctttttactttagccattctggtgggcgtacatggcatctctcttccatttcaacatgcacttccctgatgactaaaataattgagcccctttccaaatgcttattggccgtttggatatcctttattgaagctactatttaggtcttctgctcatgtttctactaggtcatcttcttcttattgatttgtgggcatgattgccacctctgttgaaggcccaggcatggacccttcacttgtgagtttcctcttaaagcagaagggctgggtttgtagctaattggatccctgttgccaccatcacctacctattggatcaagtccaccccgcatctagggtataggctagtccatgatcagctccacgctagctccgtggccttgactctcggttgtccccaccctcagagagcccgtgcctcagttgtttaggagttcacccaggcccgaatccgctccgtgctttgccactccacgcctatgtccaggtgtgttcttcacctggaaatctctctagcagcctttttgctgattcaagccaccccctttaaggttcagattaaatcacacttcttcttgaagctttcctaacttagaccatggtcatctcctccctgacctgtgcccttcttgtccatctgcctcctttcacaatgagctgtattctgccttgtgacacctttctgttgctggcttagcttgttatttaactttttgtgtttatgcccacgtagatggtacctctgtgtttcccactgtgggggcgtgtttgagccaggcaggggaggggcagtcagaagtcatgcacaagccaacccatcatgctctgccaaccctgtcgtcagattgctcagtcagccaacgtgctcccttgaatacccccgtgtgcctggctcccagccggcagctggggagaaatacggcagggaatgctacctaacctccaagaggtcagtctcactggcaaggcaagacagggacccagggagctacagaggtggctgggctgggctggctctgggcagagtggtctgggaggctggatttcagaggagtaggaaggctgtggctcaccagccaccgtggccctggcctcatcaggtggagctgtcagcagctccatggttggctttttgaaggggtagctgatgaggtcacggtcttggatctgatccccacggaggctcataattgctctcaagcaagcagcattgcttatatctgctccaggcaccctgagtcctgcctcactggccaggcggtgctgggagacatgaatccttccatcccctgactgctcagctgatttattggtgctactagcccagactggcaggggagtggggatgcttggtgccacacatgtctatggctggggagtcatccaagcagccatctgaggacctgccgtccccttacccagaggacaacatccctgcccaccgatcattaggctggtcctgctctctgttcctttttgaatctgggccaagctcatgcctttgccctcagggctcaagatcatacactctggtctgaagctttttatccgcctaaggatgaagggctttcagcggggagcctcttagatattttacttaacatttcctgagtgctccctgctgccagcggggccatggcaggagaagttaaggaccctgctctggggatttctccagttaaataagacgagacaccagtggcggtggaggattctccgcagctgctggctctcacttttaatttcctgggctctgaccccaggactcttccctttaactctccctctcacctctggggcagtttggatggagggaggatcccttatgcagctttcagggatggcagtgggaggggcggctcctaggagggtgagagggttgtgggcagcaagggaaagtgagcttcttatggcttggctgtggctgggggcaggaggaggggtgtggcttgatctaggtgagaccaggagccagggtgggaccaggggtggggaggatctggccatttggagtgatctaacacctcactgaggcattagctggactgcatttgagggagggcttgaacagagacccatgtcagaggcatcatggtggcttcaggtagaagcagtgatggggaaacagtgtttttgtcaagggttcttctcttgctcctcaaatcacctgccagcttagcccagccctattttcccagggcctacaataggcagtggagtttacggaaatccacatgcaagctctagaatgatgggatcacaccaccactctgcatgcccctttgtcttcaggaatttgcttgttggacagcaccacaggtgttggataggggcaagggcttcaactctctgggaatgtttttagatggagaaaagcagagaggggcaaggaagaagctgggaatgagtgggaataatgccaattgtgtggttaagtaggatttggggtaactctctctttctccccttgggcaccttctcattcccttcccatcttcttgccccattggttataacagtgataatgttgtgggtttttttgagacagggtctcactttgtttcccaggctggagggcagcggcatgatcatagctcacttcagcctcatcctcttgggctcaagtgatctcctgccttggcctcccagagtgttggcattacaggcatgagcctccatacctggccaacagtggcaaatttaatcatcaaaaggttctatgtatgagagaaagaatcattcacaaagattccataggtaggtccaattttctatggctcctaggggcagaaactggtatgttctagttccccatttcagcaccaattacataatggcctatattaatttgaatcctctgaattttcaggtttgattttaggaagctctatatttaggcaaaatgtatggaggcccaactaagtgcaggcctgtgctgggctctgggatatagaaacaaatagccatggcccctcctttcagagagtgcatatcctggggaaactgacatgcaaactattagttcagtacagcgatatgggattcagaaggagggaacactggtcatgctaagaactggtcttccagaggaggtgacatttgatagatgttttgagggaggagtagaggtcgtttgatgaataggggcattctcggcagagaaagcaacatggatgacagtagaaaagtgtggcacagcattgagggctgaaggaagcctggaatctgagtgagggcctgggaggggttgaagctagaaagaagggaggaggctggatcatgaagggccttgaatgctgggctaaggagtttggagttttttccattgaaggatattaagcagggacatgatatgaccagatgtgccttttagaaagttcactctggcagacatgtgactcctggtttgaaggggagtggtgcagactgcagggaaagtagttaggaggtaattgtggaatctaggtgagaaatgatgagggcctgggcctctgggagacagagtctgcatttgagagctaattaggaagagtaatgcaccaaacttgctaaccaattataagtgggagataaagcaaaaggaagctctgtgatgatttctaagcctccgaaccagacaactgagtcaatgatggtgcctggagctgagaagggaaatataggagcaagactgggcctgatttgagggaaagaattagtttagtttggatatggggagtttgagttacctttgggtaattaccaataaacagctgcaattggtggggggagggctggtgttcaggggaggcccaagccctaggagaagagagggagtcttcaccatcaaggcagctgtaggaagggaacaggagggagacagagaagggagtcggcagagacctctgggggatgctgacaccagtgggaccagcttctcctcctgctcagcagctaaggagaagaagctgagcggagggaaggagcagtaggaggggagtgagagatgggcgtcgccccagagcaagggagagagggcagaaggggtgtggcccttggcaaatgcttgcatggccaaggcagatggggcagaagtgtccttgagaaccggcatttcagaggccactggggacctctgaaagctgtttcattggttaagaagggttcagaatgtagggcgatgtgtgtcagaatgtagggcgttgggtcagtagttgggtggggggtggagactctgaacgtggcagcagggaacagccacacgtctgtattgggaagaagagatgcatgtgggtagctggaggtcatctgtgttttaatttataaatggtacaaacttgagcttatctgtagatgggagaggcaaagtgagttgaaggtagaaggaagtttggggacagttggcgagcaggatcctatcagaggcaggaggggttaagtgaagggactgaccttgtaaaggactaaggacagtacctctcgaggcctatagggaggggggaagccccagagaaagagactgaatacagatttcagggagggacatgaacattaagggagccgtatgaaaacaggatctcagagagggaggggcactgggtgagccttggaatgaaaagatgaaagaagagaagaggtggagagttggagagatggtgaaagaaacagatgcagtctccaaatcacagacgctaaatctgatcttacctcagtcatagaatctttgcagtgccatatttaaaaaaaaatttagaaaggttaacagagcagaaaagtacaagcatccattttattttattagttttttttttttttttttttttttttttgagacagagtctcgctctgtcactcaggctggagtgcagtggcacgatctcggctcactgcaacctctgccttccaggttcaaatgattcttgtgcctcagcctcccaagtagctgggatcacagatgcctgccaccacgcctggctaattattgtatttttagtccagacaaggtttcgccacattggccaggctggtcttgaactcctgacctcaagtgatccacccgccttggcctctcaaagtgctgggattacaggcatgagccattgtgcctggccccaatcatccattttcacagaaataacaaatgttaatgtttggtcagtctttttccctgtatagttaagaacaacacaaataatatatgtacacattcttctttataaaaatgtaggtatgtatgtaagccatcacaggtaaagctaaaatcccttttggagattttactccttatccacttcctcaaaagcacccatgatgattttgctgttcatatttcataaatcatatagtgtcgggtttacctgacaatatgaaacaccttataataaaccacctcaaattagtggcctaaaacaaaaacaatca

SEQ ID NO: 717 - DNA, 9545 bp, Homo sapiens
  source 1..9545: mol_type = other DNA
cccgcgtcacgggggcgggagtcagctgagctgccggggcgaggttgggatcacctggcaccggctgaagggagcctgtgatttttttgtagcgggggcggggagtaaggtgcaagactgcgccagattcaaggacgagggctgcccgattatctcgctgcataaggcaagagcaagaggatcctcaggattttaaagaggaggcgacggctgcaggttcccaggatctgtcagaggctggggagttacagcttccattctggggcgacggggaccccgggggggtagcccttttgtaatccccaggccccggacaaagagcccagaggccgggcaccatggcgtccatcctggatgagtacgagaactcgctgtcccgctcggccgtcttgcagcccggctgccctagcgtgggcatcccccactcgggtaaggaagaggagggtgccgctgcccctttcggctctcctagcatttgcgtgggagcagcgaggagggcagctccaagagctcggggtcatcccctgggccgtgccttccgggtctaggcccctgattctcctcaggctctcttggcccccagctggtggatagtcgaagtttgaaagagcaacgggagctgccgcgtgatctaggctctaccgctagggtccttttgagagggaattggggcccagataaggaattactcacctacagggcgcagttgggctgttgggagaacttagaatgggctcccggcttctgctgatgcttttcccaccaggccccttctggaggtgggagggaaggaatggacaaagaaagtggtgaaggcggagtattgcagaggaagaagggagggtcccagagggaattttgtcgctgaacggggaaaatggagatgaaatctttttggccttggctatagctgggtgcagcctggagtttggggacgtttttgtagaaagtagtgagtctccaggagaatgagggcatagggagccctggggaactgttccagtgagtggagttaacgaattggagctgctttcactctagtctttaccttcattcaatgctcaaaatatcccagcacttgccaactctacactgaggctcattaccgcatgggcagggaggggggcagagaatggggctatactacttcagttaagctgggattgctgggccaaagacctgataagggagaatacccagaccaccagtcccgtcccacctccacgcagccccattaccagtgggagcaggtatatcatgctgtgacagcatcttaagggttcaaagaatcaacccctcactgctgtcagagtgtggaaagagctccagacctctattgtaaaggtgaccagcaaacgacttgatatcaaactatttgttaaccaaggtcctggggataggaatatgtcaggaaagtggcgaggagcactgtggtgttttttctgcctctccttgcccttcacctgtctcttccacagctaatcttcttgtcattccttacctgtagggtatgtgaatgcccagctggagaaggaagtgcccatcttcacaaagcagcgcattgacttcaccccttccgagcgcattaccagtcttgtcgtctccagcaatcagctgtgcatgagcctgggcaaggatacactgctccggtaatcaagagctcacagagcttaggagtagggactagagaggtgtttggggactgttaactcactgggcctttcttctattccaggcaagtaaagcagtgaatttggagttttcaggaaatatcctatccctttccaaagagaaccaatacagggtagtggttaagtatctggcctggcagggcatggtggctcacacctatcatctcagcacttcgggaggccaagacaagaggatcacatgaaatcagcagtttgagaccagcctgggcaatatagtgagacccccgtctctaccaaaacaaatttttaaaaattagctaggtgtgatggtgcagtcccaactactggggaggccgaggcaagaggatcacttgagcccaggagttcaaggctgcagtgagctgtgtttgcaccactgtactcctgtctctttaaaaaaaaaaaaaagtcaggtgcagtggctcacacctgttatcccagcactttgggaggctgaggagggtggatcacctgaggtcaggagttcgacaccagcctggccaacatggtgaaacgctgtttctactaaaaatacaaaagttagccgggcgtggtggcaggcgcctgtaatctcagctactggggaggctgaggcaggagaattgctggaacctgggagccggaagttgcagtgagctgagattgcaccattgaactccagcccaggcgacaacagtgagactccatctcaaaaaaaaaaaaaggaaaaggaaaaaaaaaaaaactgtttaggagtgtagacttaagagtattagagtattgattagagcattcttgtggtgggaaaaactggatccatgctgaatgctcatcaataggaaaatggtgattaaactgcaattcagccacaaaatagaatataatgcagttgtttaaaaaaatgaattatcctggctgggcgaggtggctcacgcctgtaatcccagcactttgggaggctgaggcaggcagatcacctgaggtcgggagttcaagaccagcctggccaacatggagaaaccccttctctactaaaaatataaaattagcagggtgtggtggcaggtgcctgtaatcccagctatttgggaggctgaggcaggagaatggcttgaacccgggaggcagaggttgcagtgagccgagatcatgctcactgcactccagcctggatgacaagagcaagactttgtctgaaaaaaaaaaaaagagttatcctggaaagctgggtttgggggtaaaaacaaaaaaagttagagctatatcgattgactagtggaatgttcatgaaatatcattaatttagaaaatttacaaattaagacacatacacatatgtgcaatatgaaggcatttttataatgacagcaacaaaaccaccctatttatgttatgagtatgaaaaaagatgttaacatgaattttctcagttgggaataacaggagtttgagaagaaaattaagtcattctttatacatctttgcatcgattctttagttagaacaagcatataatttggaaagaatttcataaggaaaatataaacaggagtacttctcaaggtttttgtcaagattaattgagataatactagattgatgaagctcttggcatggtgcttggtatataaaagtgcccagtaactatgagctactctttgttgttcccttcttacctcagcaatctgggatatctctgcctatcttcccagatgcactggagatctttttgttttcttccttcaagtctgattcttttttgagcagaggggaaaaacttctccttagtgatttctcaaaataaggtgagggagcttgcagagctgagagggtttttgttgttgttgtttgtcttttttcttttctttttctttttatttttttgagacagagtcttgctctgtcacccaggctggagtgcagtgcctcgatctcggcttactgcaagctccgcctcccgggttcacgccattctcctgcctcagcctccccagtagctgggactacaggcgcctgccaccgcgcccggctaattttttgtatttttagtagagatgtgatttcaccgtggtctcaatctcctgaccttgtgatctgcccgccttggcctcccaaagtgctgggattacaggcgtgagccaccgcgcccggccttttttttttttttcccccctttttgtggagaacacggtcttgctatattgcccaggcaggcctcaaactcctgggctcaagctatcctctcgcctctgtgcccctaaaagctgagatgacaggtgtgagccactgcacctggcaagagagttcttaagtagggccctgtatatttttcagggctactccataggcagagctgctgtattcagcaatttcttttttttttttttttgagatgaggtctcactctgttgcccaggttggaatacagtggtgtagtctcagctcactgcaacctctgcctcccgggctcaggtgatctcccacctcagcctcccaaatagctgggaccacaggtgtgtaccaccacaccttgctaattttcttgtattttttgtagagatgggatttcgccatgttgcccagtctggtctcaaactcctgagctcaagcaatctacccacctcggactcccaaagtgctgggattacaggctgagccagtgcacctggcctgtattcagcattttatgcatagatgtatatttcagggaagtaagtctatggcttttatcagattattaaagaagatcatgatccaaaaaaggatcttcccttctctaaagtgatggtgacgcttgtccccacagcattgacttgggcaaggcaaatgagcccaaccacgtggagctgggacgtaaggatgacgcaaaagttcacaagatgttccttgaccatactggtaagtaacagtggagatctgaggagggggtctctggtcagtcactgcctgggtgggtgggctctgagggtggtgtgggggccaggaggaggctgaggatgggaacggcagcatccactggggcgccatgctctccccactccaggctctcacctgctgattgccctgagcagcacggaggtcctctacgtgaaccgaaatggacagaaggtacggccactagcacgctggaaggggcagctggtggagagtgtgggttggaacaaggcactgggcacggagagcagcacaggccccatcctggtcgggactgcccaaggccacatctttgaagcagagctctcagccagcgaaggtgggcttttcggccctgctccggatctctacttccgcccattgtacgtgctaaatgaagaagggggtccagcacctgtgtgctcccttgaggccgagcggggccctgatgggcgtagctttgttattgccaccactcggcagcgcctcttccagttcataggccgagcagcagagggggctgaggcccagggtttctcagggctctttgcagcttacacggaccacccacccccattccgtgagtttcccagcaacctgggctacagtgagttggccttctacacccccaagctgcgctccgcaccccgggccttcgcctggatgatgggggatggtgtgttgtatggggcattggactgtgggcgccctgactctctgctgagcgaggagcgagtctgggagtacccagagggggtagggcctggggccagcccacccctagccatcgtcttgacccagttccacttcctgctgctactggcagaccgggtggaggcagtgtgcacactgaccgggcaggtggtgctgcgggatcacttcctggagaaatttgggccgctgaagcacatggtgaaggactcctccacaggccagctgtgggcctacactgagcgggctgtcttccgctaccacgtgcaacgggaggcccgagatgtctggcgcacctatctggacatgaaccgcttcgatctggccaaagagtattgtcgagagcggcccgactgcctggacacggtcctggcccgggaggccgatttctgctttcgccagcgtcgctacctggagagcgcacgctgctatgccctgacccagagctactttgaggagattgccctcaagttcctggaggcccgacaggaggaggctctggctgagttcctgcagcgaaaactggccagtttgaagccagccgaacgtacccaggccacactgctgaccacctggctgacagagctctacctgagccggcttggggctctgcagggcgacccagaggccctgactctctaccgagaaaccaaggaatgctttcgaaccttcctcagcagcccccgccacaaagagtggctctttgccagccgggcctctatccatgagctgctcgccagtcatggggacacagaacacatggtgtactttgcagtgatcatgcaggactatgagcgggtggtggcttaccactgtcagcacgaggcctacgaggaggccctggccgtgctcgcccgccaccgtgacccccagctcttctacaagttctcacccatcctcatccgtcacatcccccgccagcttgtagatgcctggattgagatgggcagccggctggatgctcgtcagctcattcctgccctggtgaactacagccagggtggtgaggtccagcaggtgagccaggccatccgctacatggagttctgcgtgaacgtgctgggggagactgagcaggccatccacaactacctgctgtcactgtatgcccgtggccggccggactcactactggcctatctggagcaggctggggccagcccccaccgggtgcattacgacctcaagtatgcgctgcggctctgcgccgagcatggccaccaccgcgcttgtgtccatgtctacaaggtcctagagctgtatgaggaggccgtggacctggccctgcaggtaagccagtacgtcttgaccccagctgggagagggacccaaagagcagtagctttagatgtggaagggcttggggggccatggctagagggtgctggcttcccttgcagagagggaaggttaagagcatggactgttaagtcagatttgaattctggctatgccacttactaagctgtgtgaccttgggttagtttctgaacctctctgtgctcagattatttggccacaaaagggggtcagtgttatagtacatttacctcatagggttgataaagttctgtgtatgaaaagtacgcagggctgggtgtggtggcttgcgccagcactttgggaggccgaggtgggcggatcacaaggtcaggagttcgagaccagcctgaccaacatggtgaaaccccatctctactaaaaatgtaaaaattagccggacattgtggtgcatgcctgtaatcccagctactcaggaggctgaggcaggagaatcgcttgaacctgggaggtagaggttgcattgagctgagatcacgccattgtactccagcctgggtgacagagcaagactccgtctcaaaaaaaaaaaaagaaaaagaaaagaaaaatactcggggccgggcgcggtggctcatgcctataatcccagcactttgggaggccaaggtgggtggatcacctgaggtcaggagttcgagaccagcctggccaacatgtcgaaaccctgtctctactgaaaatacaaaagttagctgggcgtggtggcacgcacctgtaattccagctactcaggaggctgaggtaggagaatcacttgaacctgggaggaggaggtttcagtgaaccaaaatcgcaccactgcactccagcccgggcaacagagtgagattttgtttcaaaaagaaaaaaagaaaagtacttagaacactgcctggtacatgcacgttagcagaagaggagggtgctgcatcgcatgaagtgctatttaacatgcagttcctaggcctgaactcaggacttactgaatcagaatgtctgggggcagggctcaaaaatttgtattttgaatatgtttcccaggtgatttctttctttctttctttctttcttttttttttttttgagacggagtcttgctctgtttcccaggcaggagtgcagtggcccaatctcggctcactgcaagctcagcctcccaggttcacgccattctcctggctcagcctcccgggtagctgggactacaggcgcccgccaccacacccggctaatttttttgtatttttagtagagacggggtttcactgtgttagccaggatggtctcgatctcctgacctcgtgatctgcctgccttggcctcccaaaatgctgggattataggcctgagccactgcgcccagcctccccggtgatttctaacttcactaaaattggagccctactactctaagtagcttttacatagctgtggcagcggcaggcccccttgcttccaggagtgctgggaatcctgcctcggggcctctcctcggccatctctctctcccatagtctccatgttgggcagggaggggcttggccctaaagcccatgctctccccacaggtggatgtggacctggccaagcagtgtgcagacctgcctgaggaggatgaggaattgcgcaagaagctgtggctgaagatcgcacggcacgtggtgcaggaagaggaagatgtacagacagccatggcttgcctggctagctgccccttgctcaagattgaggatgtgctgcccttctttcctgatttcgtcaccatcgaccacttcaaggaggcgatctgcagctcacttaaggcctacaaccaccacatccaggagctgcagcgggagatggaagaggctacagccagtgcccagcgcatccggcgagacctgcaggagctgcggggccgctacggcactgtggagccccaggacaaatgtgccacctgcgacttccccctgctcaaccgccctttttacctcttcctctgtggccatatgttccatgctgactgcctgctgcaggctgtgcgacctggcctgccagcctacaagcaggcccggctggaggagctgcagaggaagctgggggctgctccacccccagccaagggctctgcccgggccaaggaggccgagggtggggctgccacggcagggcccagccgggaacagctcaaggctgacctggatgagttggtggccgctgagtgtgtgtactgtggggagctgatgatccgctctatcgaccggccgttcatcgacccccagcgctacgaggaggagcagctcagttggctgtaggagggtgtcacctttgatggggggtgggcaatggggagcagtggcttgaacccacttgagaaggctgcctcctaggctctgctcagtcatcttgcaattgccacactgtgaccacgttgacgggagtagagtagcgctgttggccaggaggtgtcaggtgtgagtgtattctgccagcttttcatgctgttcttcagagctgcagttatgccagaccatcagcctgcctcccagtagaggcccttcacctggagaagtcagaaatctgacccaattccaccccctgcctctagcacctcttctgtccctgtcattccccacacacgtcctgttcacctcgagagagagagagagagagcacctttcttccgtctgttcactctgcggcctctggaatcccagctcttctctctcagaagaagccttctcttcctcctgcctgtaggtgtcccagaagtgagaaggcagccttcgaagtcctgggcattgggtgagaaagtgatgctagttggggcatgcttttgtgcacactctctggggctccagtgtgaagggtgccctggggctgagggccttgtggaggatggtcggtggtggtgatggaggtggagagcattaaactgtctgcactgca

SEQ ID NO: 718 - DNA, 32742 bp, Homo sapiens
  source 1..32742: mol_type = other DNA
tggggccgtcgtgccccgccccagtgcggccggggcgcgggttcgagctgctgctcggcaagcctgggtgtctagggcatgagcggagtgtggggggccggcgggcctcggtgccaggaggcgctcgcggtcctcgcctcgctgtgccgggcccggccgccccctctcgggctggacgtggagacttgtcggagcttcgagctgcagcccccagagcggagtcccagcgcggcaggcgcaggtaacgggagacccagggccccctcccttcctggatatccgtcctgcgatctcccttccccaaagccccggtcccaggagccccagaacctagagagaactccccagctcgggattctggattgggagccagcctcgtccagccctctggcccatcgcttgcacagccaggagagacccgaaggggagcggaggttggggtagaagcccccggccctcctgtattactactgcggaatgcgggggaccccgcagacagccaggctcccaggacggggcacccttggggcttcagtttccctcgcatctccaagctcgctctgcgggcgatttgccaggagaggggtccatggagagagcgggagacgaggggcgcccggctgaggaatagggcttgcctcctagcgagtgtcgaggtccccgggtccgtgcgtcggtctgtccgtccgtttgtgtgttctcgcggtgaacgcgggcggacccccagtctctccgggagaaacttgggtctgcggctggcacgaggtctttgtgtccgggtgtctctccggctgcgagtggttttccgcgtctccgctggggggcgggggacagggggcggggtgggggagggtatgagggtgttgcggcgtccttcccccaccccctctcgcccctataactcgctccctccgtccctctcggactcggactcggggccggtgcgcgactgagctggcgcctctagccgactttgccaagagggcgcctcctgcccgatccgcgctgaccctgcgcgggacgcagccccaggcggctgcctagccgaggcgggagcccgagctgagtcgagctcgccggagcgggtgagtcccgagcccgatccccgccgggctggaccctggcgcgcagctgcggcgtctccggggagtcgcggcagggggaatggcgtgtcgcgccctggcggcgggagctgcgggagggtcggcgacgtggcggccggcccagggtatttacctgctgcaccagtgcccggcagccacgctcgccggctgccgcggggcttctttgtcccgatatctggagggtccggggcgggagggagtactgggtcgcgtcccctccatgggggaggggctgggggagtgagaggcctggagataatgcggagtgggggtggggagatcctgcaaggaccaggacgccggggttccaggagactctgcaggctccatccctccttattcccccaccccgaccccagtagcgctgggcctaggagcactcgggagttgctcagtggctctgcaccgctggcgcgggaaggggagaaaggggctgccagaggcgggaatttggtccccacgcgctgctccagggacgagaagccagggaccggcggttctgggagcaggtacaggtggggtaaactccccagcggctgcaggtcccagggtcctgttttctttcacttgaggttaaaggtcgtatatagaggtagatacccgtgaggagcagttcgggggagggggcggtgggccaaggggaggcttgtgtgtgtgagggggctgtatccagccttggggtgagcggagcccacctgagccctgtgagggtcgtaggaggcgctgctgtccctagttgtggcaatgtttagtcaatggtttgatcactgcagcagaagggactgaggttagacataaagaacttttagagggtggtacagagatggaggttggggaagttgattccctgccttggagattcgcagaacacattaggcctaacaagttattattataagactctggttctctggtgccatcccctcctacaccacgcatacacaccagacacagaattttccctatcagggagcctcttcctgcctctccctactccccagctcccttccgtcttttccaccaatgatccatctccagtggagccttaatgctggtcctgaccctcagagcctagagggtgagaacatacctgtggagttccatctgggatggaagctgactctcctgtctgttcagggcagaaatgctgggggtgacggtggaagttgctggaagtggggcagggctgtatgtgtgcagcacatcttggtagggggaggcacaggtgttctgactccacagagatacccataatctggaatgacaggtgcctggatggccaggttgagggtgagaaaagcctgaggggtgagagtcggcaggcccagatgaattactatgccttccctgcaggctgcatcagaagatgagttctagttgttagctcaggaaaactttaactttggctgctgagtcacaagtcccaggaagcccagggtccaagctgagaggctgaaagggatatggggaggcaggagcagaccctttgatcatagcaagagaaagatagtggttgagagtggccttgggattttgagaatttaggtgaccagagggtctggggagatgccatggagttcaggaccaggccccagctgttccgcctcccagcctgctctctgggtccagattctccaaccagcacaatgctagagcttttcatttgttgcagttttatgaaaaatgcaagtggctagagcaggcccagctctgtttaccattttatgttttcccttgacttcttcctgttctaagtctctagcttacagatttctagtaacaccctgagactgagattcagactccactgtcatttgctgagactcctctataggctagagtctgtgctaggaattgcacaggaagtctcagttaatcagaccctgacttggaaacacctgtacacaaactgtccaaactaaaagcaagtttcccctttttctttaaaaactctgaagccataggcctgctattctccttaatacaccccaagtgaacactaataagcagttctccacctttcattgtgtcatttgccttgtagaaatgaatgaactttttccataagccaagctgcagaggtttaggtatggtcagcatgggttctggacttaaggtagcaagcagaggtccagaagtgctccagcaaatgcagaaacctgacaggagacctcaagcttccctgtttttcttaggctggcagccgggagtggttaactccagtttacttgtggccatgaaatttatgtgatgtttgtccttctcactggaaggatggaattctgcagattttgccctttttgaggaaaggtacaatgcacaatcctttagaacccaaggagatgatattctgactagtgtgttttgagctttagagttctagaagcagggtccagtatctaagagttgtagagcccttagatttatagttctagaagttttcttctccctctgactttgatgagaacgtcaagtagggatggtggtttcagtatgtgtcatccctctaagctctgtacaaaagacatgttctcttctaactgtctgaagtttatcttccctgtccacagagttaggggtataacatgtggctgcaaatagtgaggagtggcattgaggcatctggatcaaaccaggtttctttatggtctgtatagggttgtctggagtggggaaagcatgctaagacaaagttccgactaaactgggtggcaccctttctattcttgcttaggaaaagaagcctctaaggactgagtcacacttaggaactgaaatcagaggagtctctgaaagtagaaataaacaggggcatccagatctggaccctccaagtataatgacacaacctcatccctcccttctttcttctaggagcactgaactctttcttgctccccgaggacccaggcagacccctcctctcactagttgcaggtacaaacagggagagaagcatagagggaaaagaatttctggctgtctgccctccacctccatcactccagccttgatcccacattcagaagggccacatgccctgacccctcaagcagaaaggtacagttaccatccaccaaactaataatattaataattgttaaattagtgccaatgttctgttagctgtaacactccacattagtctccgatttagctctgaatcccctaatgatggtggaagtgagcgcccagtcataaagcttggtgcggccgtaattagcttggcattgtctctcctcatcacagctttttcaggagcattaattccttctctgtttggactctgctaattatccccattggtagctcagtctggatctctgaaagaagcaaaggaagcaaaagccctctgctcccctccccccagccctgaattttaattacaccggttctcctaataaacttacaagccctggcagagcttattattaattattaatgggccacgtctgagcctcagtacagaatagctctgttctcccaacacacacacacacacacacacaatctctctctctctctctctctcagatattcctcaggtacaccttttccagaggccactggttacttgcctggtggctggtgggcaacctgaagtgtcagctttccagggaagaagatggggcaggtggtcaccaggctggtcataatctgagtctctggggctctgtccaggttcatagggtcaggccaaaaagtgggagtatccctcccatcctctcctgagtacaactaagaaatgcctgcccccactccaacttctctgtccagcctgggactccacagctcaatctgtagtcctcccagatacgtgattcaagagcccagatttgggcatcagcaagtcctaggttcaaatcccagctcttctccttaatgcactgtacccttgaacaagttacctggttaacatctctatgcttagtttctttatctttaagggtgtataccaatttcttagggaggctagaaaggttaaattagataatgtaaagggcataatgctcactatgtattaataaataaataaataaataaataaataaataaatgatattattagtattttatgagtggttctgcccagaatctcttctcttcccaggctaaacgctcttcttccaagctcctgggcctctgcgtcacttgctccctggcctctgggctgtgctttgtctatgtctctgtctgtgtctgcacgagagctccttggccgaggcagctcctgctctccccagcctgagcactgaccgtttctgagggtccaccaccaattccaggccctgaagccagccttctctggctttggggtgagtagggaaaatggttctttctttttgcttcctcttcccagtttatctcttcaattacaatctgttagcaagaacgcctgttactgttacaaaatggatttttctgatgtgggagcccattagaaaaatgggaacaatagcaagcaataagaattgctgatgaattctaacactatgggtggagaagaggggagggggcactagggctgtctttggagaaagaagtgtcagtgggggaagataagaaagccctgagctgctatttaataacccagcattttctggaagaggagggagaccatgggccatcaccccaaccagacagtctcatttaaggtgacaagcagatcctatcctgatggccttgaaggggatctcaacttcccaggagagaagaggggcctgacgtccctcagattctttgtcctctgatctggagtctcccttccctgcctcaaagacttagcttagctttgtgtctgttctgtatacacagtcaactgttatcctccaccaaaaaacaaaacatgaagaataacagcagcttacattttggggacattcactgtgtaccagggcctgtgctcaaagtcttagcttatttaatattcacaatgattctgcaaagtaggaataattcgaatcctgactaaataaaagagaaaactaagatttggacaggttaaataacttgctcaaggtcacgcaattagaaagcaatgaagatgatacatgctgtgctgtcggtcattctggcactgccgcccacctgagatgtccatcctgtgtctgagcacctgtgagttcagtttcacagccagggctagaagccatgtgcccctgtacaaggctatgtcactggggtgtgatcccaaagcctagttccatagctgttttctctcccatgagactgctggagagttggctactatggtttaccaaatcaggtgcccatgaaatactagagctcctctgatgcctgaatgaaaacattttacaatgaatattgagcaataggcttcttttccccaaatttcaagaaatttttcaagaacataggatgttctcaattataggtttttcttccatgatcttcttcttacttctttggaattcattcctgttcaccagctggctggtgatggtaacaacaaaacaactgaggaggcagcaagcaaatgagtattagcaggaaaagcctggagatgtgtgatctgaaccatagtttgtgttacgtctcaagatacagacggacctggctatgtccaaaaccattatattatttctgctagtaagattgttcttggtttgtaaagacaaggttaaagctatctctgttgattaatgttcaatggttttcaggtgttctgcccattaaacaaatttcaaaactaaggactgtttcaaattgggctgggcataactaattctaataaaaataggtgatatttattatattgcttattacatcttaggcactatcctcaacagttttggtctcatttaaacctcacaatgaccctaaaggtagatactattattacccccaatttatagatgaggaaactgaggctgagaagtgttacatagtttgccaaggtcacagtttaaaactagtagaggtagactgttagtgaggccagtctgacttcagggcaatgcttccttctctctaagctgaagaagaagtaaagaagaagacagggaagaagcatccaaatacctaggaggtactttctctttttcagtgctgggctgagccctctctcccttactggaggcttacttctagcttttcctgaagtgaacgtgtggtgtaaattggaagagcactggatcaggactcagaaactggcagagttgcccatcaaagttctagctgcctcaaggggtcaaagttcaaacaagatgtgaatgggaaaagggttttgaaggctatttgtgcacctgtgatttcctaggggacatgtcccagtgggttggccccagcaagcccagagtgggaaggcatacagcttaggttatctgggcctttatgcagcccttaggctgtacagaagcctacagccctttctaatctcaatgtaacttaaactaggagatgagggatgtctgagttcaaggccacatacagtgattttaaatgagctgaatcttctacagtcacctcctccctgctgcctgcttctggtcttactagccttgctcaccaaccttgcatctcctgtgaagacaaacccactcagtgtttgagacctaattctccttgcactgcctgccagtgagatgtcaaaagcccaggctcctctagtcctgcaataagattcttcaggcataggacgggcctcctggtctcatataaccagtattgagtgctgggtgctgattccaaaaaaccatgccctctgcctcccctaatcacagctctgagggaacagcagctgggggtcacatggagaggcaatctaaatagcaaccacaccaaggaaaacctcattgtcctgccccacccccttctcctacctctcttttcatttacgaattcaattatttgtcaggctgaacatttaaatgcactctatgctctctagattccccctactccccttctcattaaaattctaattattaccagaacaagtaagatgtatgatcaaaggaaagcaaagccctagaaacaccttttgttttgaggtgactcatattgcagagaatgcatccagaacagctgtaacagagaacagatgtgaagggctagagatggccagatatgtagaataaggacacatatagctgtggtgacttccctggtgagcccactaggataaagacctgaagaaagagtctccaaattatttagatcatgaactcataacaggttaaaaaaaaaaaaaaaaaaaaaaaacttaatacctccaatatatgtttttttgttcccaagttacatacatgttccacagaggtgatacttcagaaccagactggctgggttgtagcccagtttcaccacccactagttgtgtgacctgggaaatctatttaaccttctgtgcctcagtttccacatctgcaaaatgaggataataatcatacctttttcattggagaggattaaatgagtgaatagatataaagctctttgaaccttagacatagtaatgttgaataaattgcctaaatctaataacatgctattattcctatcaacctgtatattaaaaatttgatttcttttaaagattataaatattaaaatggcttggtttttttctcttgtgtccacctgccccgagcttcaccccattggagacaccaccacattggagacctttagtatagaagttgacttagaatgagctttcccggtgtctggcagtctccaggtgaaggactacctccagctcctttggccagggaaaggctctaatgtccctgtgcagggagccaggtgttgggaaggcttgggaagggggtggtggtaggtggctcaggacttgaggattctctgctattattacctattctcggaggtgataactgatctaggcaagtaacttgcagcaaaggaatcaaaaggcagtgctggcttcccagagagagtggctgatatcctcaactccttcttggcccctgatgtgggatctctttccctggagcctatgtgctgtgggagtacctggatccccttagcaggggactgggcattcaagccttgctcagaacttggcacatggcaagtactcagtaaatgttgcttgaccttaattgaaatgagagctaattacagccttctcatacatcattctttcagtcactcattcattccatgtgccagtttctatgtgaggccctgaatcagacaaagaggaaaaacacgtgtcatagtagcctacagtttaaccagagacagacaggtcagggcagaggaaagagtgccagcctgggtggtggacatctggaccctagtccaggttctgtgtctgaccaacctgtgactccaagcaagtcccttctgtgaaccactgctgccatctttaaaggcacagcctggcctcactacttgtggggtcatttcttaccttaaatagtaagatttttaaggcatttggacaggctaatacagaggcttcaaacttacaagctttcaggggccagacagggaacaggaagtggagggttgagctggtgaggacatatccttacaaagagagtcaccagttcccaccatgtgggagcccatgttcaattaccaagtcattggtcttttccagtgaattcagaagtctggggtgacgatgatgatggaatttcttaacgtttcaatcattaagcaagccaaacaaaactcttctgctagtttgtccacagtaacctttttgcaaaccctgcaaagtatgcccttggttcagagccttctaacttctctactccgagcaagaagaggccttgggctcaaaggttcattcccaaatttggagagggaagtgggatgggaggtctgcttaataatttctcacaaagaggggcatccctcataggggcatacccctttcttgggataatgggcatccctggggtcaggggtgggctgggggtgggggagtgagagcccacctccaaaccaatcacaacatttaaaataccagttttacagcaaagctcttgaatagccacaggaatggaggaggacagctctaggaatcatttgtacacaaataccttggagatattgtaggttcagttacagactactgcaataaagcacatatcaaaataaagcaagtcacacaaattttttggtttcccagtgcatataaaagttatatatatatacacacacacacacacatgcacataagttatatataacttatatgtatatatacacatataagttatatataacttatacatatatacatatgtatgtatgtatatatagatatatataacttttaaactgtgctacttttatactatatatgtatatatacacacataacttttatactatactacttttatactatatatacatatatgtatctaaaacttttatacatataagtatatgtaatttatatatgtacacatgtaaacatatatataactttgtgtaattctattgtacacttaatagactaaagtatattttataaaaagaaatagaattattagaatagcacaatagaattaaataaaatatatatagtataaaatatactgtagtctattaagtgtatacagtatatacatatatgtatatatacatatatgtgaatatatacatatacacacagtataaaatatactgtaatatactgtaaatataatggcatcaagaatggtgaatcctattcatatggttttcaatttactttgcccagatccatcagaggaatcactatccatggcagctaaagccttacaaaaagtatacattgtaatatatttacctatatatatacacatatacagtgtaaaatatactgtagcctattaagtgtgcaataaaattacacccaaaaacaatatatacaccttaattttaaaagcttgattgctaaaaaatgctaaattgctaaaaatgagccttcagtgagtcttaatctctttttgctggtggagggtcttgcttcgatgttgatggctgctgactgaccagtttggtggttgctggtggctggagtggctgtggcaatttcttaaaataagacaacggtgagtttgctgcgtcaatggacttttcctttcactaaagatatctctgtagcatgcaccgctgtctgatagcattttatccatagtagaacttctttcaaaattggagtcaatcctctcaacccctgccactgctttatcaactaaggttatgtaatattctaagtcctttgtggtcatttcagcaatgttcacagcatctttacctggagtatattttatctcaagaagataaaatatttactcatccacaatttatttactcatccacaagaagcaactcctcatccattcttcaggctccacttctaattctggttctcttgctatttccaccacatctgcagttatttccttcactgaggtcttgaacccctcaaagccattcacgatgtttggaatcaacttcttttaaatttcagttaatgttgatattttgaccttttcccctgaattatgaatgttcttaatggcatcaagaatggtgaatcctattcagacagttttcaatttactttgcccagatccatcagaggaatcactgtctatgacagctaaagcctaagatttgaaagttgaaattactccttgatccatgggctgcagaatggacgttgttttagctggcatgaaaacaacatttatctccttgtacatctgcatcagagcctttgggtgactaggtgcatagtcaatgagcagtaatattttgaaaggaatcatttcttctgagcagtaagtctcaacagtgggcttaaaatattcagtaaaccattcttaaacagatatgctattatccaggttttgtttttccatttttagagcataggcagagtagattgagcataattcttaagggccgtaggatttttggaatggtaaataagcactgggttcatcttaaagtcatcagctgtgttagcccctaaaaagagagtcagcctgtcctttgaaattttgaagccaggcattgacttcccctttctagctatgaaagccctaggtggcatcttcttccaatataaggctatttcttctactctgaaaatgtgttgtttagtgtagtcaccttcatcaattatcttagttagatcttctgaatcacttactgcagtttctacatcagcacttgctgcttcatctttgaacttttgcattatggagaggacttctttccttaaacctcaagaaccaacctctgctagattcaaacgtttcttctgcagcttcctctcctttttcagtcttcatagaatgaaagaaaggtactgtcttgctctggattaggctttggcttaagagaatgttggggctggtttgatcttctgtccagaccactaaagctctcttcacatcagcaataagactgttttgctttcttatcatttgtgtgtttgctggagtaacacttctgatttcctttaagatctttttctttgcattcacaacttggctgtgaggcacaaaatgcctcgcttttggcctgtcttggcttttgatatgccatcctcactaagcttcattatttctagcttttgatttaaaatgagagtcatgtgacactttctttgacctgaacacttagaagtcaaagtaaggttatcaattggcctaatttcaatattgttgtgcctcagcaaatagagaggcctaaggagaggaatggccagccaggggagcagccagaacacacacaacatttatcaattaggttggccatcttacatggatgcagctcaggacgcctcaaaacaatgacgataggaatatccaagatcactgatcacagatcatagatcaccataacaaccataatagtaatttaaaagtttgaaataatgtgagaattaacaaaacgtgacagacacaaaatgtgcacatgctgttggaaaactggcacagaaagacttgttcaaggcagggtggccacaaatcttcaatttgtaaaaaatacaggatctgtgaagcacaataaagtgaagcatagcaaaatgaagtgtgcctctatttagctttgaagtgcactgtgtagatcagattccaacttaatagaagtatttattgagcctactatgcacagagttctgggagtacagaagaacataatccttgcccttaaagagattatgctcaatctcattcacttgaagtcaactcaatgtttattgagttcctgtcttgggctcagtggggatgggataaagaagaaaagaggatgagttagccagcctctgccccccaaggtatcacaccctgttaaggaagtgggctgtagacaaaaatgactctaagtctggccatagtagcagctttaatagaaattcaaacagcatctcaacatgaatccttcacaaatttgcacatttgcttaggctgctatttaaattattttcatttccctgtgcacgtgccaatagccagtagagaggacagcccaggtgctccccaagctggctggggggataggggtgggggcgggagagaggatgatgctggaagaatcagattgaggtgaacacaaggctgtacatactccaccaagtggacaatcaagagtcaaccctgaaaccacctctccctctgacctggcagctttctcatgaccattcttctctcttcttccgtctttgtcccttccgtgtgccccctcctccaacaccctcacccgcttctccccgcctctgtctgtctgtccctccctgcctggctcatgccgagggcaggcacctctgtcagcctcctcgcagttgtagttattgtgtgtggcgtggccctggtggcagtttttctctttctcttttggaagctgtgctggatgccctggaggaacaaggaggcctccagtccctcttctgctaatccccccttggaagccctccagagccccagcttcagaggcaacatggcggacaagctgaaggaccccagcaccctgggcttcctggaggcggccgtgaagatcagccacacgtccccagatatcccagctgaggtgcagatgtcggtcaaggagcacatcatgcgtcacacccggctgcagcggcaaactacagagccagcgtcatccaccaggtgaggagtggaccactcccttccctgacccccacacctccacactcccttaatacatctatgggattccagcctgtggggatcacagaccagaaataataacacatatcctttgattgacaaatatgtcagatgatgtgagccatgatgggtgatcaatgaggaggtgggcaccaggaaagacttcatgaaagggaaacctttgaggcgggttgctgtatatgtggtttgcacttggggtgtgtgtgggtgtgaggggaatggaatagtggaataggggagtgttggatgtttggaaggaaagacttcaggcagaaggaagagaacagtaaaggcctagagatgtaagagttcatggtgtgtttagggatatgtcagtaaagcctgatagctacagtctgcagtacatggcagataaggcaagggaatcttaatagtttgagaatcaggattcctttaaagcctttcagagttccctgcatgacaacaactgtaaatacatacagcatcctttaactgaaaatagcaacaagaaaaacataacgacaaaaacctaccctaaattcagaagcacttttaaaagatgtggtgcaagcatgcgtaaggcattgtatttactcaaaacttagggctctgatggactcctaggtccctgcaacggctctccaggccctcaggggaccaacaaaagagaacgaggcctggtcttcagactggaggccaggaatgaacatgctgggaggtcacactgacagtctgtcatatggccttgggcaagttcctcaccttcccttagactcactttttccaactgtaaaataaggctgatgacttttatatggcagttgtgaggagccaatggaagaatcaatgtgattgataaggagagctaacacatatattgcttatgattatgcttggctctattctaagcacttcatatgtaatcaattcatttcacagcaatcctatgcagctgttacttttattatcctcgtttttatggcacagagaggttaaataactttcccaagatctcagctagaaagtgacagagccaaaattaacctatgcaggctaactccaaagcccatgcttttaccactctgctgcctgccgtatagcaaatgcttaacaaatggtgatggtgatgatggtgatgaagtgggtgccacattgaggataagaagggatggtccttctcttaaggaatctcatgatttaataaggaaaccagagtcatgtctactaggaagtaaacctagaaagcaggtaacagaaaagcaggaaaaagtgattatgataacaatggctaaagtttattgagcttactatatatcaggcaccattccaactactttacatatattaagacatgtaatgctcaccacaaccttgcacacaaagtgtatgcagagcaaaagtggggtcaagaagaggaaggaaaagggggctcaacaagggataagatgagccagggcctccaggctcgtgtttgccttcatcccccttcccctgagccctgaccacactccctctgccccctcctgccctctaccaggcacacgtccttcaagcgccacctgccaaggcagatgcatgtctccagtgtagactatggcaatgagcttccaccagcagcagagcagcccaccagcattggccgcatcaagcctgagctctacaagcagaagtcggtggatggggaggatgccaagtctgaggccaccaagagctgcgggaagatcaacttcagcctacgctacgattacgagaccgagaccctgattgtgcgtatcctgaaggcttttgacctccctgccaaggacttttgtggaagctctgacccttatgtcaagatctacctcctgcctgaccgcaaatgcaagctgcagacccgggtgcaccgcaagaccctgaaccccacctttgatgagaacttccacttccctgtgccctatgaggagctggctgaccgcaagctgcatctcagtgtcttcgactttgaccgcttctcccgccatgacatgattggcgaggtcatcctggacaacctctttgaggcctctgacctgtctcgggaaacctccatctggaaggatatccaatatgccacaagtgtaagtacagccctgttccttggcttcttgaggatttgtggttctgggttgggtgggacatgtccccaaaccctcacttcctagagacaaatgggcctttgccatttgggatgtgaagagggactctggaaactgcccagtggcccagtctacccttgcactctgccccaggttgggatggcagagagcagagtccccatgtagctaggaagggaagggaatttttatctgtggcttctggttgcatgttctggggtggttctttctactgagagtactgatgtgcattagaaacttggcataggcaattgaaacaggccatatcaatcagactgaactaggctatgctgcagcagcaaacagtccgaggattttgtggctttagacaaccaaagtttatgccttgttcatgtttcatgtgctttgcagctggactggggactctgctccaccttgttacctggggacccaagccaacagaggctgcatttagacacgggcccccacagttaaacatcaggaggaagaggaagtggcaaatcacgcactgtttattaaaacttccacgcagaagtgacacatgtcacttccactcccattagaacaagacacgcggtaactcctaatatcaagggagaaggggcaaagtaatcctaccgagtgcccagaaggagagctggacatatgtaatgaacagcacgaatgacgacacacagcagagtccctttgcttgggcattgttttcccagtcaggtatgggagatgggggaggccagcccaaaaggagacctgactaacacctacacaggaggtgggtgctgggctgtttgcaaccagctggaattaatcagggaaggtttcaaggagctggggctcaagttggcttttaagagaagggagcacaggtttggcacagagaactggagaggacacatctggagcccttcggtctggcatagcccttcgctccagtcccctgggttgaggaagctgtgtagctgcatcctgcaggtatagctagtgtcctctctctaagcacccccaggcagctgagagctcagtgggggcattccctccaagctccagtggccttgcatctgctctcttgagtgctaacaggttgaggggcaacctggatatttcctccactatatctctgaggaggggcaaccccactctgtctgcagactcccgcttggatagtcaatactcaatatctctgtgttgagcctgtgaagagaggggctgggaaaatcagccctgctctggtgtgcaaagggcataaatcttgttttgttcaaagagagaaagcttagtgggctctgcttacaccccaggaagggtctgggggacacgccattctcatagcttgtgctgactttgaccagtccagcccaatggctcagtacctcccccacctttgctttcctgaaatgtcatccctaagaagaacataagtagccggctggccagcaggcagacggggcgagcagacagggcggattggaacagcagctctgtggcagccccaggcccgagcgctccactccataaatcactctgaagtttacatttggtgcagctcttccctgtggtctccttaggctgtggcttcattatggtaactggacaggtagagaaaagcagctcagtcctcctcacagtgaggttgccacccagggagaggggtgagggccaggggctgcaggaagcagagctcagcccagcccttctaggagcctcctttgctccttgccagagcccaccatctggtgtctttggctccaggcatgaatggaagcctcatgcctggggcaggcagtctgtgcccaagcacactcctcacctggatgcacctttccatatccaagaaccccgtggctgtcctgcccttgtcccatccccacttcccccacctggcttctgaaaagggcagatcaaccaaagagcataggacaaatcaccatcatcctcatcatcctcaactagtatcattatagccctcctccatctcctcctcctaagaacactgtgccaggcatggggttgagggtggggctggggtagaaaacagcttctttgacccacagaaacttgtcatgtaattacagagacaggaaaagtccatgcagtagctggtagtgcaaagcagcaaatacgatcctctgggtatggttgcaggatccttagagttaggacagctggtgaaggtctccttgatgaggagaactaaatcaggtggggaaggacagttataaataactcgacaggacaagaggaagggggagcattccagccagttgcagagggagtccaggtgcaggagtttcccaagctgcagagccccacccatgctcagacagcctgtcttaccgtctgtctgagctggatgttccttctcaagtgagtcccctgccaccctccaacccacagccccaccagcaggtagagttctcaggagcaggctcatcaccctgccaggtaaggactcaagcaaaagagggggaagaggtgcgagaaggctgatgcttgtacctatatgtggtgctgtcaaattttaattatttgggggccaaggagacccaagtcatcacagtcaccaggaatgacagagcactaagcatatatgaattcccataccagcacaatgggggacagtactgatgagatgagcgcagccaacagccagctcccatctctcccatgtgtctgattccattcccagagctgccctttggacctgagctcaggaatctggcagcttctgaaaaacacctgacatttctgcctcttgcctttgccaacaaggttctccatgtcaggcagatctgttcccacctctctgcctggtgcaaaccaatccacctttcagagcctacctgccgtcatcctccatgtggcctcctggtctcacagcagctgcctctcccgtgtgttctctgtatccccgagttatatcctgagtcatattctatcttgtaaagtcctcccaatggctcaggaatggcttgtgacccacatttgactttctcttgtattttccctcagggctgagtgtaagaacccagtactttcttgttaaatgaccagtggcttacttaattcaattaaaactatatatgggtacccaaggaaaagactattaaagaagcagttggaattgaatggggttaacctgggaaggcttcttggaggagaagcagctcaagtagtatttagaaaatggcttagagccaggcttggtggggagagacccagcctgtgcatgtgttcagaggtgaatgggatggtttgtgtctggggtaaccagcccgatcaggtagtctggaccaaagcagagagcctgtgacccgcatgctgagcagaaggaaaggcaccgtgagaaaggggacttggaggttgctctgtgctcaccaaagtgatgtgaatgctgcctgtgttgctccttgagtttgtgcaggagagtcggattcggccctggcaggtggcaccaggcaggtcccttgttcccacccccaccctggtgcttgacttgaagtaccaaagcctgaaacatttgcattgttttctcacagccacagaaccctgagctcaaggctagtggaggggaggtacacatccgaggagtctagctctttgttaattgcaaatcttaagcctcaagggacactcacctccccagcccagattgttccagagggaagtctgggcagcacagcagctaacatgccccactggctggagagccagagcaaaccgggcctgcagggcagtcggaggcctcgtgcattgcatggaattaagaaactcaggcctaggatggaaattttgggagttcactgcacccattccagccctgggaagcactgccctgctgtttcccccatctctccttctgcctggcttgcccaagggcccctgatagtctcctgggcattcccagaggtttgccactgtctctccaaccagagcttcaattggctaagatcaccatgctcttccctcctagcatcttctgcccccagtctcattatttctaaataaagctgtagatttatcattataatagagctgccgtcacccgggtttgctaacatctctaatcttgtagttattgctacagaggactcagaccccaccgcacacaactattcctgtcgctattccctctccttcactgtggcaggagacaaaggctgtaactggggccataaatatgtgctgtgcttggtaatgctaatggattcggccatcttcctgccttaccaggtccctactagtttagagtatgcgtgtgtgtgtgtgcatgtgtgttgtttttggactaggatagagtgtgtgtgtgcatgcatgtgtatgtgcgtgggcatgcatttgtgtgtgtgtgtgttttaggggtgatgaagtgttccatatacttccagagagcctggactgagggtatgcagggaggaagggaggccttaaatggtagaatagcctctggcttggaaatgagcagagttgtgcagaaggagtgcaggctttattgtcaacccaacctgaattgcattctagcttccttactttctagctttaaaaccttgggacattatctaaactgtgcctcaggtttgacatcagcaagatggggattaataatggcttctagtcctattgttattatatgtagtaaatgaaacagagtacacagccacccaggacagcactgtcacagagcagcttgctgagccctattcctctggtgcccttcctgctggcttagcccatgtgtcacttctgtaccactcccaggcctgaccttccccttcagtccaggtcatctgttctgactggttgttggacattattattcattttttatttcttgtcttggctatgccatgtgttttctgtgtgaccttgaaaaagtgactttccatctctgggctgcattttcctcagtattaaaccatctctagaatcctgtaattctcagcttctcccatggagaagttcttggctctcatgctttcacagaacagagctacccattctccgggagtgtggtctccacagcagaggccgaaaccccacagtgataagccactgggcagaatttccagacatccccactctttccttaaatatcaaagagtcaggcctctcttcaagcccgtggggaatgtcctctaggaggtttctgccacaggggaggccccatcaacaacccttcctcctctttttcccatgagccacattcctatgctggcactcagctccctcccttccatctcctttctgatccccatttactgggatgcgctggtcattacttattgagctcctgctagctgccaagggcacaacctgctttgccatgtttcatcctcaccacaacacttatggtcatcccccatatgtaaataaacaaacgaaggtttgaggttaggtgacttacccattgtcacccaaacagaaataataaagccaagatttgaactcatgatccttgcaccgccagagggaagcatggttacattgtttcttgggacagaaaataaacactgaaattgtgcagctcatcaggggatccagaagagtgttttgttctgttttttctttgtggacttgttaggttctctcactcatctcaaaatctggtcatttctgggagtgggtttggtgctgacattggattcctttaccctttcccccatttcctttctgtgagcagtgggtttgacattgtttctttttagtttaatagctattcattgaatgctgactatgtgccggtcagtgcatcattgggcacttgttgaatgcagagccatgggctgggctatggaaaggaaggtaaagcaagagccctccatatcagggtgcccaggctgacaaggactgtaggggatgccctgtgcccccaagtccccaagcccctcatacacaaggcacacacctggggacagaccagttcaggatgcttacaacacaattatgcaagctgctgcactgcaagagatgtgcagaagtgttaggagacatgaagaaaagaaatcagagtcagatgagattgctctagaaaagctgcttctagaaaagaaaagttttaggccaggctatgttgatgacagtgaaggacagagcatgataaaagaggaagtcagaggagggcgagtatgttcctctgttctctttggacttggggaaggatctagagagattttctctcacataagattgggtttcttttctttgtataataactacttgcagagtaattactatgtaccaggcaccaggctgggaatatgacttcaactccagtcctgccctcaagacctcgcagtctgatgggggaggcaggaaaccagttctgctgtcttggggacatgcaggtccctcactggcccagcatgttgggggaaggcaggcctcctgaaatgaaattgcttgcttgcttgaaaaaaatttcagttgcatcctcttctcacgcccacacactcaagtcgaatgagatcccagagtggccacaaaaggctttttcaagtagagccaaagaatcagctaattgatccactgtgactcattaaatcacccgggggtgaagcctcccaaagcctcattgactagcagtttgagacaacgccttcgaagtgtccatcttggatctcaggtttctaggtctgtcctgggcaggagtaagaggtaagcatattgaatcttcatccactaagcaggtcttcaacgagccctcaaagaacatacttgggtcctagaacaactaactgggtattgaaggggcaaacatagtccttgctttcaaggaactcacagttgaacagaggtttcagagcaagtaaaaagctaatgaaaggaacacaattatttacattacattaaaaggaaaaaggggagatggaggtgagtattgaagcgaggagagtgagtgagtgggatgagggatacagatggcagaaggagaattcaggaacaagaaccgagctttggggaacgcccacagccaggatgaaggagaaagagggtcaggcagcaaagagcacctagcaggaggagatcaagagaaaggaaaaagaggaagtcaaaggaggaatcactcgggaattattcattcagcaatgacctgtttgagcatctgctaagtgccaagcatggtcctagatgctgaggatgcagcagtcaacaaagtccctgctcttgtggagcttatgctctagtggaagaaggcaaatgactaagataaatagtatgtctgagagtcataaatggcatggagaagatgaagcagggaaatgtgataggaaagttgggttggggagggtgggttgaagggaggacagcagggcaaaacagggtgggcaggggagacctccctgagagggtgccctttgagtagacctgaaatatgggagagaaccctgcagatatttgcaggaagagaggtccaggcagagagaaaagaccctgcagtgggatggcatctggcatgatcaaagaacaggaaagaggccaggcacagtggctcactcctgtactcctagcacttcgggaggccgaggcaggaggattatgtgaggccaggattttgagaccagcccctggcaaaacaaggagacctcgtctctacaaaaaattaaaaaaaaaaaaaaaaaacaggtgtggtggtgcatgcctgtaatcccagcaactcagaggctgaggtgggacaatcgcttgagcctgggagatcaaggctgcagtgagccatgattacaccactgcactgtgatccatcagactggccaacagagcaagactctgtcaagaaagaaagaaaaagaaagaaagaaagaaagaaaaagaaagaaagagaaagaaagaaagaaagaaagaaaggaaagaaagaaagaaagaaagaaagaaagaaagaaagaaagaaagaaagaaaagaaagaaaaaaagacagaaaaaaaagaaagaaagaaagagaaaaacaaagaacagcaagaggaccagtgagtgtggcagaagcagaaacagggctggggaggggaaagagtgaaagatgaagtgggagaggtaagaggcgggagaggtaagaggcgggagaggttaatatggttccacaaccaaaagtttaaaaggatcactgcagctgatgggcggggactagactactgtacacagtcagaggaaaggcaggaagtcagtggggatgtgattgtcttaaaaaagagatgaaaataggttgaacaaatatggtggtagatatgtaagatgtggctagtctctgaatatattttgaaagcacagccagcagtatttgatgacagactgggtggagggtctaaggtgtagagaaagagaagaatcaagattttcagtccgagcaacttgggatgctgagttgggaaatcttggaggaagaacccatatggggaggaagattaggagctcagatttggacatgtcatatttgagataccttttggacatccaagtggcgatgctacataggaagctggatataaagtctggagtccaggagtgaggtcttggctaaagaaacagattttggagatgtcggcatataaatggtgtcaagaggcatgaaactaattgagatcccagtggaataagtttagatagaaaagaggaaaggaacaggatttaaccatgaggtactctaacaatttatgtggggctatgaagaaaacccagcaaaggagactaacagcagggaaaagaggaaagccaggagggtacagtgtctcaggaaacaaaggaagtgtttccagaggatgggggtaaggctcagctgtattagatgctatgaccaatcaagtaagatgcagactgagaactggccagtttgttcagcatcaaggagcttatcatcggccttgacaagggccgctttggtggaacccgagtggggaagatcaactgtggaacggggacacgggccgtgttattctgggggaattttctggagggtgcaactcttgaaatgggtttttaaaggtctaggagggttggtttggcagtatgccaagaggctggttccatatatgggccatagcttagggaaaagttggggctgggacagggaggtagagtgagcagccctgactgagagcaactcagagcaattcaggccaagactaccctttccatcagaaatttgcagaaaggctcagtatccctagtattctgccttaaattcccaagtgtctggactcccgcatgcaggtccaagccaggatggaagcagagagggagagttttctgaaagaggccagcagggcaaatcagggttacacggaagccccagtgggtgtaaaggtgtgcctgagtctgggggcctgggtggcctgcccaaacccatgaagactgctccccaggccaaaccatgcagccggagcactctgaataatgcatgaagatggccagtcctgtggccctctttgagcagtccaagtgagcccagcagtggccctcccagctgcctggcccccacccacctgagtcagaagccaccgggtccttggtagggctgcaaggctcccttgtgtgtttgctgctcaacgggagctgtgcagctccccggttgtctttgctggatgttcatttgcccccatgctcccctgggcctggtctcatcatccttgttattctctggcaccccctcccttgggccaatcgctggaaatgtccagtgcatcctactcacagtttattccttccactcctgccaatgcagagatgggtgggacctctcctttgtacctctcaccaaagaggggaggaggtgaagagcttggttgcctccctggaaggatttcttggtcagatgggaacatcaagcaaggagcagcttttcctgctccagaatagtaacagcagccctaacctcagacctcatgtcctatagtgactaggaggaaattgggggttggagggtgcagggaggggtccctccatgctcaaagctcagatcctgagaatgtgcctcactgtgtccagccccaggttctaaagccaacaggaccttgacttttctgggactgcccaaggggccaaggctcctctagagaaggattgctgaaaatccaccaagaacccagaaaggaaagaggagaggtgtgggttccaccctccatcccacgggcagccttcactagggcctccatggtcaatccaggagtcaagtcacacactcccacagctgagcagcagcaggccccttccaccacaggtgaggactccaagtccacaaactgttcctgctgcagaggtgacccttccacacactctcacttgagccaaaattaggacctgtagctgttcttggctccagggggctaaaggtttcccatgtgatgctggaaaacaaagctaatggtccagacagggctctgacctgcagtaagcagagctactcagctctgctggccttgggtgttcttatttaagttgtttctaaacttggcctttcacaaaagatccttctctgctgcttcagaagaaatggccttacaaagctgccagaggcccagacagtggagacagttccactttcactcttgatgagttccctagcctccagacagccccattgcccactcaggccagcttcctgtagggtacggctctcactggcaaccagaccgcagccctgtcttccctccctccctctgctcgcagcctgcttcagcacagagctggtgggcaagccgaacctgcccccggccaaatgtgcccctcattagtatgctgtgcctttggatggaataaatatctaatctttcccttacaagaggatgaatgggaaatcattaggcaacaagctcatgcatcaacaaaaagcgatttctccaacacagatgtacttcccgttgcttccccccaccttgctcccagagcatatgcacttgcttagtgcttccaccacctaatagcacacagtgacattttctcctggagagagactatttggtcgcaaggaaagcaacagccaaacatcccctctgggcactgtcacagacttttgaactccaggattcatccaggaggaagggaatgcagtttcctagatcagcagcaattcagagagactagggtcatggggtgtaactatgaccagaatagcaaccaacttgggagaattggagcagtccctgagggacttcacattttcccgcggaccatggtgttatgactccatattttcatggacttgggggtggtcagagctagaaagagcctcggagatgacctggctcaacctcctcctgccatagatgagcaatttcagaccaaagaagtctcacaccttgcttggggtggttgggagtcaatgcaaatctgggctccaaatcaggtctcatgagacccagcccatgcccttcctagtctctgggtttttataggaaattctcttgccttgttttcactctttccttcccaggcccctgcccactcactgccttcatcctgtgcctgtgagcctctctatactgtagggaagaggtgaaagacagaatttggagttaaaggcattaaatgtcaaagggcacagagcaaagaccccctcccctctcccaaaagttagtcttttccatgcaaggaagatctaagaccagaaataggcaaaccaacaagcaacatcagcaggaaaaccaaggaaaaaagaggccgtttatcaaagtgttttgatcctgagccaattaacccccacccaaaatctccccatggtacataaatatttctaccttagaggaggaaggagacaaggtgagctgtagagtataggtcagccttgtccagttgctatcatatgtttatggtgttttagtgtcagcagcaacacagaaaaatttggtctctacagcagccatcctccccctccctccagcccccacgccactgccaaccccgagcccatctggccctcattcatcctcatcagccatccactgtagccacattttcctctcatgtctgaattgacacctactcattctccatgaatatttaatatcttcctttctggataaagtccctgagaccttgagggcctctctagggctgcactgaaatctgagtagagagctttccatgaagtccacttggccttgggatgagggaattagagagacagcccctgggacaggatgagccacagcaagatgttcatccatgtctggccagcacaggctggcattgccctccatcttgatggcctgaaaaacaccaataattgcttcaaaagactgtcattttagagtcctaccctgctgatcgtctggatttgacacaacttggagttcaccaacatcctcgaccatgggtcgggtttccctaggagatattttatgttttcttcacaaaacctgtgtctgatgcacttgaggtgggagggaacagaggtgagatcaggaatgggtgcaaaaacaggcctcagatgacaatttatgtgcagaattccaactgcacgttaagcagggtgtccaccagagcttcttggcctcctgtgtgccaggctgtaagtgcattgtttattcattcctcacccctgccttgcagggtaggtactggtgttatccccagtttccagatgaagcaactcaggcaatctgctcaaggtcaccaggccagtgagcggcagtccacctgggccagccggttgcatgtgctccgagccctcccccatgttgccactcaggaactggctaacaggggctctctccatgcgtcctgcctcttcctgggttggggagagcatatatgatcatagtcccttctgccaccaacgttccacctcttctgaaatgtcatcctcctcttggtctccgatggctcttccttcattgacccagtcatggaacacgggtctagctccaccacactccaagcaacacaaagtgaggagcagcacttaactgaaggtctgttgtgatggaaagtgccacttcccagtggcacagcagactgctggtgggcacctgcccccagctccccaccactcccatcattctatcgtcttccctctcccttccccacaagttctaggcctcaaatccaaaccaccaccacacgtccctctttaaattgcctgacttctgtccagccccagccccatccccaggtgtagctcagttccggccccatcttctcacatttaaaacccaacaagatttctaactgaataactggccatcatttccaggagcagtggggaccctaagattgttatattgcctttaccaggctccaccctccatagaaggtttttgtggtttcaaatggcatttgctttctctgtttcctaagaattgctatggccattggcatttctgtggggcttgtaaagccattttcctatatatgcagagagaggcccctccttagggcttgggtggagttgccacctgagataggaagggggaagccacttctatctcaaccctcccagttctgcaagtctcctgagaatgaaccagtccttccattcaaaatgagaaggaggccccagccggatggggtctcagccagaaaagagacagagtgttagaggtaaatgtccataaaacagaggatgccactccacagggacaggcagagggctgccagggaaagagccggggaggggcctgtgcaagtgtcctggccacctggggctggagaccctgaggcagtgttgtttgctttgtctgtggttatttccttttgctcacccttagtatttgaagaagttcttttttatattaccaggctctttcagggatgtgatgggaaccaggagcagggttgggtctacacttgagttggagctttaaagagaatgcagggacagaacatgaaggagcacctagaaccagaaagaaaacccaaaaggaaagacggagaatgtgcagggggagagacagagggtccagcttcagccaccctggccacctgccagccttctccagggctcctctctgctgcccccaaaaggctttgcactttgtttgaataaaagaggtcactgctttgtagaaggagaggggagaggacagccccttgagccacccctgcacccacatgcatgggaacagcactggcctggggctctttcccagggtgagtccatccctcctcgagcctttggttgactcacatctctgtagtgacacattggaccatgtgctaggaacagtccaacttccagagagaaaaaaacagctctggtggtgtgtcatgacaacatgataagcatttcccttcttgagaagttggggacagggctagctttgtgacttgaggcacctgcttgaaaatgcctcctccacattgtcagagccatctccagctgagtcactcctgcagggccctgtgagacactgccgggagccctgcccagcccctcacaggatcaatacatcagaggaactagctgaaagtcagctggaagcaaaaaggcaggaaggagggcacgcggaacagccaagctcagagtgcctcgcgggccccggagaaaaggaggtgtgagtcaggattctaatgctgacaagctgtgctgggcgggcagggcccggacaggcattttgaaagtaggggattagggctcaaggtgactttgatggggaaaattttgagaaccaacctttcttggtgctgctgggcctttttggtaggtttgtggagaaaaagaggccagggggaaaggctggcagtgaaggcctttgtaactccaactcctgctgaaagggcgtttttagtgaatcctatccaagtgcaggcagccatccagctctttttagggagtgggtgttccctaggaaagtattcccccaaccctatttggagaatttttaccagagaaactctggctgcgctcctctctgcctcctgcaagagatagggaagtagaatctcagcagagccctctgccacccaccctgagtctggccagaccccaggcagccccacgtgtgtgtgtgcatatgctcatgtgcgcgcacacacacacacacacacacacacaaatgtacatgctgtgtccatcacacgccagggaagcagcaaagtgctcattcctgttccatcttgtttgattggctttctgtcaaccctcctccccctggaggactccagtccccaagagagggacattttttggttccgctaagaaattctgtttggaaaagaatttcgaggagaccttgcagcctgaagatgatgcgcttaggaataaccttaagtgtgattataataaaacccaaaccacttccatgtcaggttgcatctctcatgtgttgagaagggagaacaaagatttcactcacagggaagctgaggccctgataatggtgcagcaccttcaaggccacgcagtcagctctgcgctgtcagtcaggatccatgagaccctgcaaggggcacggatccaacggcagacttggttccaggccccaagagcctgcaggtaagcaagagttggagtcaggaggctggggcttgaaggtggctccactgtgtggcctgtcaaaccacttcacctctcgctttcccccttagccaaatgtggacaacaatctctaccacagggctgtgactagggtgcaatacaatttcaatgagacaagggccttcctaggttcttgccatggtttattgctcttgaatctaacaacaacaataactaatgtgtttataagtaaatttccaaagacgtgttctcatttaacctcaatataggaagatatcagtatttccattttatagatggggaaactgaggcaattccttgaagtcacacagttttaaaatgatagagcagagaaccaaaactgatatcattttccttacacactatataactaatatattttacccttctttgcctcaaggtaaagtattacattcttattttagataagttagaaaatacagaaagccacaaaaaatacgtttcactataagcccattctcccaagaatactgcaactcccatttcgatgagccccagggtcctcctgttgcttagaaaacaatgtgaatgcagtgaagggagaggactaccatggaggctgtgaggggttgatgcactggctgggttgggcctgcaaatgttcaggattaaggcattttggaggaatgctggaaagaagggaagatgtggagtgaagaacaggagggaggagagtgcgaggtgtgcagggccaaggctccaaggagggatagtgaggacaggcctgaagatctggcaggccccaagccagccttctcaccaaagaccaaggccactgcccatctcatatcagcaagtccctgagcattctgagatgttaggagtaggaggggccatggtcttctcagatgatgaggttgagatcccagaagactctctggagagtc

SEQ ID NO: 719 - DNA, 14695 bp, Homo sapiens
  source 1..14695: mol_type = other DNA
cactcgcacgcgtccgcgcggccgacccatgcactgagctgcgatccttccccgcttcccgccgcagctcggagagatgttcaagctccgactgcaccctcattcccaaaaagtggctggtcttgcggttgagcatctcgccgctcttccgtgccgcgaggcgccccgggctcccgccgcctaggttccaggacagccagcgctcggtcggcggctaccaaggccgggcccgttcgcctcgctccggccaatctacgcgcggagaggcgcggcggggcgaatccgtgggggcgtctccctccgtctcaacggcgacggttgccaagggggcttgtgagggaaggaaggcggaaagcgcaggctcacgccagtgggagcgaagagaacgcgcagatacgtgagaagttgcgagtgcccacctgggcgccctctcttccaggttgctaatacgagggccggtgctgtcctccaggctgggaagtgggagcgcggtgtcagttactatgggaactgcctcttggccaatcaccgagagaaagaggaggtgtttgggaagaagccagaggacccgagtggcgggaccaagcgtaaccaatagaagcagaagataaagaagtttcctcacatccggggctgcctttggcgcctgcgccctgcgcaccgttggggggggggcagtggcgtccagtgacgcccagtgacgtccggtgaaatccaagatggcggcgctaggctgaccctcctgctggtgagggctctggcgccgggggggacgggatccagcaggtgtgtgcagggtggagggtgtttggggctgtggaacaccagccgttcccacatctctgctctgtgtcttctgcaggtgacggaagtaccgcctcctcccgtttgacgcccctcaggggaccctgcatcgctccagccgccgcggccatgtctgggccaggcaacaaacgcgccgccggcgacgggggctcagggcccccggaaaagaagctgagtcgtgaggagaagaccaccacgactcttatcgagcccattcgtcttggaggcatctcttccacggttcgtgggctcttgccttaaccctcagaacttcccagagccctccctctgttctctggccaaactgtgcggaatcttacacccacttccccaagtttagcaaggtccgcgttacaggaccttgaaagaaaggttagaaagaagctcagaacacgacgcctgtcttccctttacagataggaaaacaggtttccagggggcgtgtgacttgtcaaagactaaggatttacaaggggacaggcagaaacaacgtgagcctcctcacaacaaagacactttcgctgtgtgttgtctgagcctccttagattctgttagcggttagtgtgggaatacctccatctcccatgcattgcagatgctctgctcctctttctctctctgtgattggtttgtgggccctgcttgacgctctcgtcggcccctttgtttcctttggtaggaggagatggacctgaaggtactacagttcaagaacaagaaactggcagagcggctggaacaacggcaggcttgtgaagatgaactccgagaacgaattgagaagttggagaagcggcaggccacagatgatgccacactcctcatcgtcaatcgctactgggcccaggtggataccttctgctttcaaagaccaggccttgattcagctgccaatccccagattcccctgctaggaaaggagtatcatgttggaaagcactaagggattcataacatttttgatgttttctccttccagctggatgaaactgtggaagcccttctccgatgccatgagagccagggggagctgtcttcagcgcctgaggcacctgggacccaggaggggccaacatgtgatgggactcctctcccagagccggggacatcagagctgagaggtaggaccagagtgctgggatctggggagcttaagttctgggagaagtcctggggaggaggggactttggtgttgggcccctgaattgcctatcttactacttctcacgaaatggatttcatgtttgggcagtaaagtgcagtgcacaaaaacacaggctttagactctgactaacttggtttatagagcaattcatgttttgacacccatttgtttcaaaacagtattatggttgagtattaaatatgtatttgacgcttcctagaaatgagtgttgcacttgctataagggaggaaattataaacatagtaagcagaaagtactggggctcctgaaacggaatgattgtgtgtgcatgcatgtgcgtgtgattctaattatattggtaaagtacaggaagcttccctgaggatgtgatacgcaactctgtagctttgaggaaattactttacctccctgaatttcatttgtctcactttcaggatggagataatagtgcactataggttgtgttgattaagtgaaccatgagtattgaagggctcagtctggaacttggtacagagtggtagtaactgctgctcttatcctcatgagggtctgtccattccttccagaccccttgctgatgcagctgcggccccctctcagtgagccggccttggcttttgtggtggcactgggtgccagcagcagtgaggaggtggagctggagctgcaaggccgaatggagttctccaaggcagctgtgtctcgtgtggtagaggcctcagaccgcctacagcgccgggtggaggaactctgtcagcgagtgtacagccgaggtgggttctttgtgcccatactgaaggggtgtccatccccacctgcatcttgatggcaccccttcctgattcccctaatgcccgagtccaagggcggccagaatttcccaaggaataaatcagccatgttcttggaagaggtaggttaggctgtagatgggggttccaactttgattccgggattgaatgctagagagatgggttggaggagttgttgatgccggtagaggctcctggccagaggcccctctggagcacttggtgtgggttgcggatccacaaggcatagcttcaagggctcaggccttgtaggttgacaggcttctcccaccttagttctgccaccctcacctggacatgctgggaaagtggctcccctctctgagctggtttccttctctgtgcagtggggataaagactcctggctttgtcatgagaaatgggcaagacagctggtggatcacactgggtatatagcagactccagaatgagttagttgtttgccccattgccctgagctgggctcttacctgggccctgccttcccaggggacagtgagcccctcagtgaggcggctcaggcacacacccgagagctgggccgtgagaaccggcgactgcaggacttggccactcagctgcaggagaaacaccaccgcatctcattggaggtgaggagccgggggctttgggggtgtgattagaatcaggcaggatttgggttagatgggcactcagggacctcaggaaccaagtcccccatccaagcatctgctccctcattgttcccagtactccgagctccaggataaagtgacatcggcagagaccaaggtgctggagatggagacaacagtggaggacttgcagtgggacatcgagaagctgcggaagcgagagcaaaagctcaataagcacctggcagaggccttagagcaggtggggcaggggtgctggggcaggtgaggcaaggctgggcccttgggccttagctcctcccctctacatccattgcctgtctgttttctctccacagcttaactctggctactatgtatctgggagctcctcaggcttccaggggggccagatcacactcagcatgcagaaggtgagcggcgttttcctcccaccccttctcacaacctcttctctgttgcactcttgaaattcccctcaggacaaaggacaaacatccatctctgaggcccttcctggtcactcctgctgctctttttttcatgcattcatatacttgttgagtagatttttgaacacttagtgctaggcactaggcatattggcgagaacaaaatagaggtcaaaactttcatggaccagacaagaaataaataaaagaatatatctttaggttctacttgtggtaacagacaagaaatcagtaaaatagcatatcagtgtgttatgagtaccacaaagataaagcacagaagagagagctaagagtgagttggagtcagttggcatctggtggtcactgtgccctttttccctttattagcactttaggcctttctggaatgccttccgtgactccccatcagttaagagccttagttcccagcaccgaccatgcagtattgaattttctcccatttttctgggagcccttaggaaagtacttggtttggggtgtcagaatcgatcattgccctgcacggggtgcttggggtggagtgtatgctggggatgtaagggaggcctgctgccacgtctggccctgcctcccatggccctgcctcccactccttagtttgagatgctgaatgcagagttagaggaaaaccaggaactggccaacagccgtatggcagagctggagaaactgcaggccgaacttcagggggctgtgcggaccaatgagcgcctcaaggtgggctgctgtaggggctgagaggtcctgggcctgtaagggagggactgagccctgaatcctgttgctgatcccatttgggcatccctgccccaggtggccctgcggagccttcctgaggaggtagtgcgggagacgggggagtaccgcatgctgcaggcccaattctcactgctctacaacgagtctctgcaagtgaagacccagctagacgaggctcggggcctgctgctggccacaaagaactcccacctgcgacacatcgagcacatggaggtatggccctggaacaggcgttagggctgggctaagggccaaaccgttagtgttgacgtgtttgtgccttccgaggccctgtgtgccagccaggggtccctggggaatagattcttcctaagatactgagtcctgaggtgggaccgaggggctgtgtgggtccttaacacatcaacccacagagcgacgagctggggctgcagaagaagctacgcacagaggtcattcagctggaggacacgctggcccaggtacgcaaggagtatgagatgctgcgcatcgagtttgagcagaatctggcggccaacgagcaggcgggtatgtggtgaggatagggcggaggtggggccttatctgggagtgctgggccctggtgtggggctgctgcttatccagatgcaagaggctaaggccttttttttcacagagcctcggcttcctatgcaaaacagggcctgcactgcttggctcccaggcacagtgagggtccgccagctggggtggctgatggagcaggcacatgcagagtctgagctgtcagccctgtcctcattcttctggtctgatgacgtctctgtctctcagatacttgtgttacaaagatttatcaaatgccacctctgagccaggctctgttctagggtttggggttatgccagtgaacaaaacagaattcctgccatgtggagcaacattctggtagaagacagactagaggaagacgaactagtagaagaaaaatggaaaatgtgttagctcttgacagataggaaagtaaagcagaaaaggaagataggaagtatcaggagaaagggtgttgcaattttgaataggaggccagggaaatgtactgggaaggtgatatttaagaatctagaagaagttaactaacttttgtgaatgttacagttaccttctctattaaagggaattggatgtataaaaaaaaaaaagaaaaaacctaggccaggtgtggtgattcatgtctgtaatcccagcactttcggaggccaaggtgggaggatcacttgaggccaggaatttgagaccagccagggcaacaaagtgagacactgtttctatttaaaaaaaaaacaaaaaaccccacatattctatattagcaaaaatcgtatgaataggcagtgtcaagttaattttgggtgagtttccttgaagtcagcattatttactttgatgagttcatgctccgttgaggccgcaatgttcccctcctgcacagtgggagtgatggcatagcctcttaccccactgaggggttggagtcctaacccaggaactggttctgacacctttacttgctgatgctcctccagggcccatcaaccgtgagatgcgccacctgattagtagtcttcaaaaccacaaccaccagctaaaaggggacgcccagcgatacaagcggaagcttcgagaagtacaagctgagattggcaaggtgagaaggggcctgcctgggaaaaggtttggctagactccagtgaacaccatctgacttcatccctcttcctctctgcctttgcagctccgggcccaggccagtggctctgcccactccacccccaacctgggccacccagaggattctggcgtcagtgccccagccccagggaaagaggagggtgggccaggccctgtcagtacccccgacaacagaaaggagatggctccagtgcctggcaccaccactactaccacttcagtgaagaaggaggagctggtcccctctgaagaggacttccagggtataacccctggggcccagggcccttcctcccggggccgagaacctgaggccaggcccaagcgggagcttcaggaacgggaaggtcccagcctaggacctccacctgtagcctccgctctctcaagggctgatcgggagaaggccaaggtggaagaaaccaagcggaaggaatcagaactcctcaagggtctccgagcagagctcaagtgaggctctgttcctgtctccttcctgaccctgccaggtggcctccagtcccactcactaagacttcctcctgtaccttcttgccaggaaggcccaggagagccagaaggagatgaaactgctgctggatatgtacaagtcagcgcccaaggagcagcgggataaggtgcagctcatggcagcggaacgcaaggctaaggccgaggtgagggcagctggggcttgtggggcattcagaaaggcagagcagagtcctagctcagcaggaagcagtgtcaagagagtttcttcttccctgtgctataggttgatgagctgcggagccgcatccgggaattggaggagagggatcgaagggagagcaagaagatcgcggatgaggatgccctgcggcgcattcggcaggcagaggagcagatagaacacctgcagcgcaagctgggtgccaccaagcaggtgcggcccatgtggtgccctcgcgtcggagcgcagggagttcccttcataccctgtttggtgcctctagtgcctgcaggaccttgatgatctgggtcccctctgtagttctttgcttcgctgcgttttcccatggttcccccacagccatcctgtccacttcccacgttccatcttgtctctgcccacttgctgcaggaggaggaggctctgctctcagagatggatgtgacaggtcaggcttttgaggacatgcaggaacagaacgggcggctgctacagcagttgcgggaaaaggatgatgccaactttaagctaatgtcagagcggatcaaggccaaccagattcacaagctgctgcgggaggagaaggatgagttgggcgagcaggtccttggcctcaagtcccaggtatggccgccgccagcttgcagactggagctggagaggtgggggtcatggccctgagtcctcctctggtccttaggtggatgcccagctgctgactgtgcagaagctagaggagaaggagcgagccttgcagggcagcctcgggggtgtggagaaggagctgacgctgcgcagccaagccctggagctcaacaagcggaaggtgaggctgggccagggggacacacagcttgggctgctggctcacctcctcaccttccggttctgctcagagcacccgatgcaatagcctgaggtgaagccaggctgtcacagaacagctcacacatattgaacatttacatgtgccagaccacatgctgagtacttgacatgcttggtcacatttcagtctcactaatcctatcaagatggtgtttacgggcgtggtggctcacgtctgtgatcccaacactttgggaaacagaggcgggaggtttgcttgaggccaggagttggagaccagcctgggcaacatagtgagaccccatctctacaaaaaaattttaaaattagctgggtgtgctggtgcacgcctgtagtcccagcttctcgagcaggctgacaggtgagaggatcacttgaacccaggaggttgaggctgcagtgagctatgatcgcactgcactgcagtctgggtgacaagagcgagactctgtccctagggaaaaaaaacaaaagatttttgagttggagtcttgttctgtcgcccgggctggagtgcagtggtgcgatctcggctcactgcaacctccgcctcccaggttcaagcaactctcccaacctcagcctctcaagtagctgggattacaggcgcgcaccaccacgcctggctaatttttgtatttttttttagtagagacagggtttcgccatgttgaccaggctggtatcgaactcctgaccttgtgatccacccacattggcctcccaaagtgctggggttacagcgtgagccactgcacctggctggattttgtttttagcctcgttttataaataaggaaactgaggctcagggaggtggattgttctgctcaagagggagtggccctaatatttgggtccaagcctccttgactccaggctctaccttctaaccactcgctggtgaactgtaaagtggggatgatgttctttgtcacatagttgtattaaatagaagaaatgtctagctttggctaaaggcttaagattaacattgatttccatttcctctgaagctgttttcttctccagttagttcattcatttaagcagtatgtttgtggtttttttgttgttgttttttttagacggagtctagctctgttgcccaggctggagtacagtggctcggtctcagttcactgcaacctccgcctcccaggttcaagcgattcttctgccttagtgtcccgagtagctgggactacaggagcctgccacctcgcccagctaatttttgtatttttagtagagacggggtttcactgtgtttgccaggctggtctcaaactcctgacatcgtgatttgcccgccttggcctcccaaagtgttgggattacaagtgtgagccactgtgcttggcccatttaagcagcatattttacatccctgctatgtactaggccttgcgctgattgctgtggagacattgggaacaagaaggtccctgccttccagtcaaagctggaacttcaggtcttggcaggcagagcaggccagtaatcccccaaataaaatagtgcatgtcacagtaagccttgtgcaggaatctgaggtgctgtcaaagaaaaataggggagccttttaggaggtgacacttgagctgaggcccaggggagctgcatgtgtggtggggaagttgaggggagcagagaggagagccttgtgaaagctcaaaaaccagacagcaggccaggcgtggtggctcacgactgtaatcccagcactttgggaggccgaggcgggcagatcatgaggtcaggagatctagaccatcctggctaacacggtgaaaccccatctctactaaaaatacaaaaaattagctgggtgtggtggtgggcgcctatagtcccagctactcgggaggctgaggcaggagaatggtgtgaacccaggagtcggaggttgcagtgagctgagatcgtgtcactggactccagcgtgggggacagagtaagactccgtctcaaaaaaacaaaaaacaaagaaaccccaaaaaacagcatcacacgggaggaactggagagggagaacaggaggggagggcttagggctcaggaggcaggagcagctccagggcaggtgtcactggggccctggacagaagcattggtgggccgtgactccacatgcctgagtcaccaggctcagaccagtgcctccttcctgttccaccctactcaggctgtagaagccgcccagctggccgaggacctgaaggtgcagctggagcacgtgcagactcggctgcgggagatccagccctgcctggcagagagccgggctgctcgtgagaaagagagcttcaacctcaagagggctcaggtgtgtgcaggggtgaggggccaggccagggtggtccacggtcacggacctatcctgggggcaagcggctcaaggttgaggacccttgcccttagccaggcctctcctgccccaggaggacatctcacggctgcggcgcaagctggaaaagcagaggaaggtggaggtctacgcagatgccgacgaaatcctccaggaggagatcaaggagtacaaggtggggctgtgggccaagttgtgccctatccacctgagaattgtagatgcaggattgctgagactagtggagagtctggggaccctggaagtaatgtagggcagcagaaagtgggcagcacagtggtcacagagtcaaatgctgtttgctgtacatgtactgtgagccaggcacagtgcttggctgggtgtgggttgggaggctaggaactggccctggtctctgacttcttgaaactgacagtcaggggaggaggcagccaagtaattctctcatcccagatgtgtaatatgatggcagaggccagaggggctgaggggactcaggggaggcccttcccctggccctggggtcagcaggcttcctggagtgaatgtcaccacagcagacctgaagaataggccagacgtggctgtgaggaacgggagtgagtagctttaggcaaagggaacagcagatgtggacgcttgagcggaggggttgctgggacagcaccggaggttgtaatcagaggagccaatgtggagaggttgggccgtgtcacctcctgaagagtgcggtacgccaggttgagacctcaaagggttttaaacaggagagtgatgtggttagatttgttgttggttttgggctggaagaggtagactggaggcagggaaattgttaaggtattgcagtcactgaggcagaaaccagagtagatgggttcaggagacatttcagaggcagaattgcttggactcgggggtggatcgaatgcatggagtgagggaaagggaacacttggaggactcctggtttcctggtttgagaaactaggtggatagttagtaccatttagggggttaggaggcctgcgggggagcaggttctatgggatggtgtcaaaggatgctgagaaggtgcctgtgggacccctttgggaggctgggaaggtgctcaaggcaaaagggccgggctggagaacaggcttggggaatgtcagtagaggcagaggtggaagccacatatgacttggtcatcccttggaagcagttgagccttgaagggcagaggcagctggaggcagccatggggtagaggcaggcttgggagcctgttcagtgctggtgtgtagggtcctgggagacaggagtgatggcagggaggctgctgaggcggcaggctgggctgggattttagcaggctggaggagcactgttgggggatgctgagttgagtcaatccatgtctggagttggaggtgagaccctcctggtggcggaagagaggtctcaggctaagaagggacccacggcagggtctctggccagtgtcgaggctgggcccagttgagggtagagagaacagatttctagttgcattgccattccagctgtgacttagcaagtgcaggtgaagaggtagacaagattgggatttcaccagaggcggccagtggggcaggagatgaagccccaaggcagagtccaggctgggcctgtgggtccttgtccttttgaggggacacatgatagccatcactgcccagtgatgaatccggactctgctgatttctagtgttgagaccttggcctctgcacctcagtttgctcattcatagagtgctcgtccttacctccagggttatgggaggatgaggtgcagtctccagtgtggtgggcttggcctggactcctcctgctgtcagcttggggtctgggcactgtcagagttgttcccaagctgatgcctttgcctggcccaggcgcggttgacctgcccctgctgtaacacccgcaagaaggatgcagtccttaccaagtgcttccacgttttctgcttcgagtgcgtgcggggccgctatgaggcccgccagaggaagtgccccaagtgcaacgcggcctttggtgcccacgacttccatcgtatctacatcagctgaacctgaaactcaggggactctggaacaccatggaccctgggggctgtgcccccatctcctccccaccccaggtctagtggccccaccctccattccggaccccatgggcccagcccctgcccatctagttggtttggggaccctggtgcatgctagtgggcatgggatcagccaagcttcgttccatcttttcctaaaggtcagagctgcagcctagggggcactgccctacagaaaaggtctgcctgagaggcctgaggagcccagagcacttgactgagcttcccggaaactggccctaacctgtctgtctccgtggatgcatcctaaccctaaggaaaattccccaggctgtgatctaccctagagaaggctcgctccctgcctactggctcacaaatgaggaccagtgagccatgtccttgttccttgtttgagactgggctgcaggccccaggaagactttccttcacccaccatccccctaacctcggcagggcttctgtcctgtggagttccctggacaccttggtctggctcttgtgccaagggctgaaggaggtaccctcttggcagatgggggcatcacttgcttcctttgggaagctctaaggttgctgcagtcaccttcctcatcttgcaggtgctgaaccaacatcatcagtttctattctaatcaggccccttcccaatctccatttctctgccaagcccatttacccccacctcatgcatcccaaggctctactgggtccctggacctaaccctgctttcatcctggtggccttaactacagtggaggtggaacttcccaggaggggaagggacagaccagccccagccgctgggccaacttccaatcattccagctagaagagcttccccctgacaccctgtgactgagcctgtgtcctgtctgcctgcccagccatgctccatcggctgtgagggcagtgcccggagaggccagagggttggagctgcagggacccgtttggacccacagcctctgttctagagatgcttgtataggctgttaattgtgatgaataaacgttcaaccctcggcctgcagccagagtagccaggccgcgcaccccaaatgtagtcccccgattttagctgcagcagctgagcagcactttgctggcttggtgtgagcctgggagggctcagacttaacggccggcagggatcccggactgggcctgaaggggagagcgtggtggtcgtcgcggagccgcctgtcctgctcccaccgaccccggtctgaccacgtccttggctgtcatggccgggggatgccgggactcctcgggctgcatcctgggaagtgtagttcctggtccgcacatggttaggaggttctcggagagagagctagtttcccggttgcgctggccaaaggccggcctgaactggatcctgcggaccgcttctcagcggcttcacccccacaccactcgaatgcacagatcgggacacctcagctgggtgacttccctcgttgcaatcggcctcgggagcggtgcggcgtgtaccgagcggcgcccctgggctcagcgcgctgcaggcgccccgggcggatccttcaccgaggcaggactggggctggcgccagagccggtgcggagcggtgttggttcaggcgctggcgacagtgctatggccacggcaggggccgcgtgcgtctcagcggtggcgccttcggaccctattggcgcccgggacttaagcggggccgccgctgctggaccaggacgaactggagaaggagacgcgggccgccacggtgacctcgggcgtagggccggcggcggcgggcacgctggtggaagcgcgggccgcggcaggggaggacatcgggccgcagagaaagtgccgatggcctggggcagcggtgcgagggtgggaaaaacgcaggatattgcatcatagagacgcggccaccttcgcccctggagagcgccagtctcaggagcgccgcaccggtcacgggtggaggtcagccaggcctccgtaagcgcggtccccttccaggagtagccttcgcctgggctcttgagtagatgccaagtaattccgcatcgtctctctagatatctgcgctaaaggccacccggtctccttatcagaggggcaaaactctcctcgtgggtcttcatacctaataaaagtcggcatcaaaccac

SEQ ID NO: 720 - DNA, 25410 bp, Homo sapiens
  source 1..25410: mol_type = other DNA
gcggagcgggcagcggccaagtcagggccgtccgggggcgcggccggcgatgcccgcagcccccgccgcgccccgccgggcctgctgagccgcccccgggccggggtcgcgccgggccgggccgcgcccggggcggggcggcgctgcctgcatgaccctccggcggcgcggggagaaggcgaccatcagcatccaggagcatatggccatcgacgtgtgccccggccccatccgtcccatcaagcagatctccgactacttcccccgcttcccgcggggcctgcccccggacgccgggccccgagccgctgcacccccggacgcccccgcgcgcccggctgtggccggtgccggccgccgcagcccctccgacggcgcccgcgaggacgacgaggatgtggaccagctcttcggagcctacggctccagcccgggccccagcccgggtcccagccccgcgcggccgccagccaagccgccggaggacgagccggacgccgacggctacgagtcggacgactgcagtaagtttcccacgcgccgacttcgcgccccctcccctggctcgggctcggcccccccacggcctcgcggcttccctccgccggtccccctcgcgcgctcgcgctctgcctcggttcacaaccccgccgcgggcttgcgggcccctggcgcactcggtgcgctctccgcgccctgcccaccggcctcgagccctcccccgacccaggccggacaggagggaagttcgggggcaccccctgggggtgtcccatttccggggccgggttcctcggagccggcgccgcgccccctccctgccagcccgccctcccggagctccggcgcgggcggctgcttttgttcccgggaagggcggagctgcgtcccggggagacaccagttgctgccggccgcgcggtcgctccccgctcgccagccgctccgggagggcctcgcggccgagggtcggggctggggcgagctggggaggggcccgaggctgggagcggcccggcctcccgcgtggtcccggcggcccgcagagcgcagctgctttgctggcgcgcgagcagaggaccaggaggaccgcggggccgcttgtcctttggaaaaaccttggcgtttcctcctccggtgtccatggaccccgccgcagccctcgccagggccgcgcaccttcgcccacctgttacgcccgcggcccccgggcagagagggccccccagcccgctccccctcctcccggactgagccctgagcccccgggagcaggcaagcgccggagtcccgggaccgaggcccggccggtgggcgctcctggcgccttttcccgtccccgagggtgcctgtccggcccgagccgggactggctgggaaaccgaggccggaagaggtcgcagtccagtgaggagtcggtttgcgcggggtggggatggcatgtgagaaccccctcctagctcagctgtggctccagacttgtcactgagacctggaaaaccagcgtctcgtcaaaccccagcccttcccgggatgtggcccttctccagggctggtgctgcccctcccctgcgcagcagggatgtctgcgcctggcctgggcactcaccagggcctgtgggctgcgggcctggagtttcccaagcatcaaatgtgccaccagaagctgaaggtagggattaccagtgcccccggggcacagaccccccatcgccccacctggggaggcccatcagcagtggccggttagagcagggcccctgtaggggaaactgcctgctttgcactttctagaggcctggaccacggccctcgggccagcgcctggcacatgaaggccctgccctggggcgtgggggctggggagcagtcttgtccctccactttcctgccagcttggggagattgggtcggaagagttttttgccctcagggctgtgccctagatccaccccccctcccctctgcccctggcaccctgtgcgaagctcaccctggacttggtgatcccctgggtgggccctgagtgggacccaagtaactgctttggctgccctgaatccaaagcctcccccagaagaacggatgggaaagttgttcccatttctggcatctctgctgctgcaccaaggaagtaagaggggagggcagagcttcaggccaccctcctggtgccacagagggccctctgcatggcgaatggccaagaggctttttctttttcttttttttgctgtctctgaacccacaaagcaaggaggggaccaggaagctagaaactcaggccagccagccccatctccaatccatcagctcagcagcccttcagggagcatgtcctggcagcagggctgggcccctggcctgagatacatgcggtgcaggggccagactcacatgaggtcagcagtgcagggcagagctggatgcagctttgccagcttgaactgtgggctggccacacccgtattatcaggacatgccaaagaaatgctgaagacgggctcagaggagctaaggaggacggtgtgccactgagctagggccagcttgggcccctgtcgcccccttcgaggggggccccaccctaggcttggatcctatgggaggctgacaaacatcctaggcccagaagcccagaaatcttggctcttgtccatggtgggggaacaggttctggggtgggactgccttccacccagtaccccaggcggtgcccccctctgggctgtgacaaccagatccttagaataagcctcaatgattcaagccagatggttcattacggctttagccagggttatgctatttgctgccctaattattggattatctctgttctgacaaaaagaaatgagggcggttgctctgttgtccaaggcagagagtgaagtgctgtttatttactcagccttttctcctggctttttaaagccctttctttattaagtcatgtcaaagcacaagcacataactcgcatgttcccagcagatctcgaagaggggcgatgacagggaggaaaggcagtgaatgtcccaatgaggagcaggacccagtgtcggccctgccagttctcctagggtggcctctgtggcgtgctgccctccaggtgggccgtgggccacacaccccacacgctgcccctacctgagaggctctcctgcccggcacccacctgtggaagcccagtccattcttcaaagctgtaatcactagagtgccatgggttgcaagtgacagataaccaactcagagtggcttaaacaatgaggacagctgaggtcttgctgcaccagggtgcaccaatgcagcagcccctcagcactgttggggtgatggttctgtccatctttgctcgtggctgtgcgtttttccttgtagagcaaaatcaaggcccgtttcctattcctaagggtgtctgggtgaggaaggttcaggtgcagaccaaagtcagaatgacgctgtcagtctccatcagccaagcaggaccctcaggtccaaggtggctgctgcaggtccaggcatcacatgtaacaataaggtccttgactgggtaaggaattggtaaggaccgattccttttctcatgtctcagtttaagagcgaggaaacctctcccagaagtccccaggagacctgtccttttgtctcattggccagaattggatcacatgcccgtgttaaacctgccctgtgtggttcacccaggaccgggtcaggaccgatgcctgtgcaggtctggagcaaggacaaggggttgagtccaccacaaaggttctccgtgttagggggcatattccagcccccatgggctgtggtgccccttcctttgagcccagaacctctttggccccagtcatgttctacctggacctgtgatatttgtaatgcactcgatgttacggcaccaactatgtggcaggctctgtgttaggcacagagatacaagaatgctgagaggcaacctctgacctgagggtgttcatcaaaaccaagacaaacaggtgaccccacagcgagggacagggaggcaagaacccagatggaaagctctggcaggcggaggtcactcacagagagggctcagccctaagactgggaggagggaggaggtgggctgacagagggaaaagaggaaagggaggtgctcttcgcagagggacagctgtgtacacaggtcctgaagtgtcagaaactcagcccagtgtaggcaaaacagtagagccaagtggctcaaagaaggggaagagacctatgaggaggccaaagtggtcatatcacacaaggtcttgaatgccacaccaaggaggttgaactgagtccaggagttgatggagaacctttcaacaatttaaagcagatgaatgaagatgtttataaaaatcttaacactcgtctctaagctcctgggaagcagggatgatggctcatttctctctgtcccccctgcagtgccggcctggctgaatggctgtttccccaactataaaatgctttcaacacaagcttgatgattttctatggtccttgccacaattgttttgttttttttaaagtatttgagagcctgacatttttcttaaaaaaaaaaaaaaaaaaaatcagggcagatttcctattcccaagggtgtcaggaaagtccaggtgcaaaccaaggttatgatgatgctgtcaggtctacatcagccaagcagggggtgctcggccttagaggagccaacaggggcttgagcttgattttctctgaattagccccattaaagctctgtaattatcgacaagcgggtgacaactctcaaaggcccattagtgaccaaccctcattatttttccgaagatgtaaacttcagtggggtcatgtgattggagcgctccaagggcagggcactgtgggtcacagagaagcaccttctcctgcccttagggccctcctcacgcccagcacaagcccaaggtgcttttccaactcggagggctctccagggcagcggctgagcccccactctccttcccctagagcaactctgcttttctctctttttgtttcttagttgcatcctcctaagatttcagctaaacaaagtggccaaaaaaaagctttttggaccagggcagagtggcccgtgtgtgcctgtaatcccagcactttgggaggtgaaggcgggaggattgcttgagcccgggagttcaagaccagcctgagcaacgtagtgagacctacccccccgcaccccccgcaccaacaccactgtctctttttttgtaaatatattttttaagttagccgggcatggtggtgggcgcctgtagtcccagctacttgggaggctgaggtgagaggatcgtttgagcctgggaggctgaactgtgatcgcaccactgtactccagcctgggtaacagaacaagaccctgtctcaaaaaaaaaaaacttcttgggagccagtaggctttaagggagaaactatcaggatggaagtgaagaggcctagattctgtgcctgggtctgctgggccacgctgagcagctcccctcccctctctgagcctcatttctctaaagggaaatgaagagtttgggccatgtgctccgtaagagagcttcaccagcctctcaaaactgtgaccgagcttctatttataaactatcatttcttacagaccttccagtggagttcaaagaaattcatcagtcccttcctggtgacacactgggtgtgctgttccttcccaggaggtggtgacgggtgtcagttttccccccaggcagttggagaagatcgctgccctccttggacaggggtttctgtagagccagtgcaggggcttctcccctccaggagctgggtgtcccagggggagcaggcagccgctctgtcttctggctgtccttctctggggttgggaaacaggcagaaatcagaatgtgcatttttacacttgggtgtcacaccagatcccagctcctgggagcacctggagggcaagttggtttgaatggaccagccatgtgtgtctgcatctgctgtttgttggtctcacaggtgtggccaaggcatggtccctgtgctcagggggctaattcgttgggggaacaaaccccaggtaggcctgacctgaacagcagatccatttactatcatgtaaagccaacagcttcagagaatattgttacaaaagtacagattggtgcatctcgggctgtggctgtgttcattgctgcaggagcagtgggatacacctcccttccagcagcctcacctgcctggtgtggagatggcagctagcatgcaggcagctgaaggccagctacagctattgctgctgcacacataccctgctcaggagaacgtgcctcaggcttcactcaagacctagtatttatttatttttttgagacaggatctcgctctgtcgcctaggttggatgcagtggcacaatcacactcactgtagcctcaacttcctgggctcaagcggtcctcccacctcagcctcccgagtagctgggaccacaggcatgcgccaccatgcccggctatttttgtattttttgtagaaatgggtgtttccatgttggccaggccggtcttgaaatcctgggctcaagtgatccacccgtctcagcctcccaaagtgctgggattataggcgtgagccaccacacccggccatttttgtagtttttgttgccatgttggccaggctggtctcgaactcctgagctcaagtgatccatctgcttcggcctcccaaactgctgggatgacaggcatgagccccacaccagccactcaaggcctgttggctcttagtttgcacacacttccaacaagtatcatcacctggtctcatgggagaaacaattattgaataggtgagagctgtctgcgccaacacagacaagtaatctaataggagtttcaggctgatgtcaaaggaagaggcagaaaaatgaagaaaaccgaaaagagggccacccgggaccctctggtgcaggggttgcttcgtgtccccttttgcctctggaacatgaccgtgacatacggaagagtcatcgtggccatagcaatgactcaggttattcaaaaaatttaagtgactatttgtatgttctgttcccaaaggcagggagggaaatgagccaattgaggacagtttcattccagaatgggtcttagagaagccagtactgttagctagaaaacccaccatagggatctgctccttctataatgatctactgagcacctcctacaccgcaggcacactgtgctgtgaggtggatactatcgttgtctccatttcacagatgagtaaactgaggcataaagacgttagataagctggccacacagcagggaagtgcacgctgggatttgaaccgaggagactgatgtcagagggcaggtcttgcaccccacactgctgcgaagacagagacatgtgcctgacccgtgttagaaggggatgatctagacaaatgccactcccatcaccagctcagaataaaggacactccacactcgtggcctttcattagccaatttccctgcagacccaagaaactttgttatgcctgggcccagcactcgcccagagatctgcaaacttgttctataaagaagggctggatagtaaatattttcagctgtgcaggccgtagggtctgcttctgaagtaggaaagcagccgcagaagagatgtaaatgatgggcctggtcaggtgtggccgtaattggatctagatccaggttgggagcctagctcagagcctgaagaacacagtctttcaagtttggccttcccttatcccgggatcacaccagccactaagcccgtacctgctggttggcctgtggttggaatcgtcacctcccccagcccctctttgccattggccaactcctactcatccctcatggctcaggtgaagcatcacctcctccaggaagccttccctggtggtcccaattcacatgggctccccatggctcccggctcaccagactctactgcggcaaattatttccatttgttcctccccttaagctgtgctttccttgggatagggactctgcctcacagatgtccatcccctagagtctggcatgttgtaaacacttggtaaataatgaaggaatgtgacaccatttgaccagccctgcagcctgggagcaggctctgggcttctgaagccatctgtgaatgtgcatcttgctgtctgcggactgccactaagctctgccccccaccatcatctccaagctctgccccaaccatcaccttggcctccatgctgggagccgcttctgcatggaaagccacagctgctatgagtgattgcccccggggagggaggcagctgcacccaattatggctgcaacctcccccaattatggctgcaccctccccccggcttttgggagttaccactgccattgagagacttgggggcagcagtatgaggacccagctggctcctcacggcctgctcggggttcccaacgggccagagagacagaggagctgcagtcctgtgtgttggctgggggactgttgagcaaatcagctgatcttcctggccaggacctgttcctctcaaagcctcgtctcctccgccttgtgtgatccttgtgacatttcacaggtgagggaaactgaggcacggggcccagactggcagttgcaccaggagggcaggaactcctttggctgggtgcccagctcaggtggaccacacactgggccagacagggaactggagtgacccacctgacctctctgggtctcagctcctcctctggaaagtggggagattattgtgacttcccagggttgggtgggactgggaggatgggtgaggggctggcatagagcaggtgcttggttggtggcagccgccatggaacggtggcacctgcccaggccaggctcatctggtctcacaggggcaggcgaagcctctccaagatgcggccagggtgggacctgtgccctcctctgtccgcagctgccctgggcacgctggacttcagcctgctgtatgaccaggagaacaacgccctccactgcaccatcaccaaggccaaggtaggccccgccagcctgcccccaaattccctgccccggggtcctcaagagggcctaggtcagggaggccagaccacaccactccccaggttcctgtccaggcttttggatgtctgcgctgtgtggggtgcggggccaggaaggaattcttctttaaaccttcttgaatacccaaccccaagaaatgccttggacagtcaggcattgcggggagcaaagaaacagatgagaatgggaagatgaaggcctggaccgaggaccctcgagcctggggaggggctgctgagagggaaagagaggggcagggtgatgtctgtcctgcaggccaagggagggcgggttgggtactggtgcctccaggcctcccagacgccctgaggagtggggacgccactttgcaccctggaagccgagccactgtaggaggccgatgccactccaggcagggtgtccacggcctgagcccagaggccctctgagcctcactacgtgggctggggttgtgggtgcctgtggacccctctgcagcctggcccggccgctggtgctcccctctgcagcctggcccggcccctggtgctcccctctgcagcctggcccggcccctggtgctcccctctgcagcctggcccggcccctggtgctcccctctgcagcctggcccggcccctggtgctctcccctctgcagcctggcccggcccctggtgctgccctctgcagcctggcccggcccctggtgctcccctctgcagcctggcccggcccctggtgctctcccctctgcagcctggcccggcccctggtgctgccctctgcagcctggcccggcccctggtgctcccctctgcagcctggcccggcccctggtgctgccctctgcagcctggcccggcccctggtgctcccctctgcagcctggcccggcccctggtgctctcccctctgcagcctggcccggcccctggtgctcccctctgcagcctggcccggcccctggtgctcccctctgcagcctggcccggcccctggtgctctcccctctgcagcctggcccggcccctggtgctgccctctgcagcctggcccggcccctggtgctcccctctgcagcctggcccggcccctggtgctctcccctctgcagcctggcccggcccctggtgctgccctctgcagcctggcccggcccctggtgctcccctctgcagcctggcccggcccctggtgctcccctctgcaacctggcccggcccctggtgccgccctctgcagcctggcccggcccctggtgctctcccctctgcagcctggcccggcccctggtgctctcccctctgcagcctggcccggcccctggtgctctcccctctgcagcctggcccggcccctggtgctcccctctgcagcctggcccggcccctggtgctcccctctgcagcctggcccggcccctggtgctgccctctgcagcctggcccggcccctggtgctcccctctgcagcctggcccggcccctggtgctctcccctctgcagcctggcccggcccctggtgctctcccctctgcagcctggcccggcccctggtgctgccctctgcagcctggcccggcccctggtgctgccctctgcagcctggcccggcccctggtgctcccctctgcagcctggcccggcccctggtgctgccctctgcagcctggcccggcccctggtgctgccctctgcagcctggcccggcccctggtgctcccctctgcagcctggcctggtccctggtgctgccctctggctctgccactcaagcatgtgtcagctccatgttctcaactgtcctgttcccttcccctcaccccattgctccctgtgggaggaaggtgccaaaattgatgttctctcgcaaggtaagggcctgcatggccagtagagtctccctagtagtgccatgtaagggcctgagccagcccagctcagatccagcggcttcccacagagctgcctgggcccaggccccacccagcctcccaacctgcaggccccctgcccctcctcccagcctggcagcaagggctgcccttggcagcatgctcacccagcaggacaggctactgcgtgccaccccaggctgtcccccagcccagcctgggccacatgtggactgccatgggtaggtgtgagtgccatccacgcaagcctcagggccctggtagggcactgagaggcctgcacgctccatcccacccctgccctctctagaaccacccatgctatgactcagggcatgtccagccctgcctggcgggggctccagcccacccctaggagcagaactgagcatttgtcaaatcccagctgtgccaaggtagagaccaagctagacccttcctcctttccctctgtccaactttgtagaggtggtccaggcctggggactggagaggtgccggctgccaggccactctggccaaagcccaccccttcctctctccatgccagacaccagggccttcccttcccagctccaggtgcgtttgtgtgtatgcacatacatggctgtatgtgtgtctctgtgtgtacatgtgtggtaccgtgcgtgcacacatgtaagtgtgtgtccactttgggctgtatccctcaggtatcagaagtgggggtgggaggcccagttccttctctgtgtaaatccagttctgtagggaaggggtggtgcaggctggggaagagctggggctctgggctggggtgtggggaggggcccagggtgggtgagctgaaggagggctggcctctggagggccagggtgggggctggacaccctggggtgcacccttgcttgtccccccttataagggtcagtctcagtttgcccatctgtaaatagggttggttgtccctgccctacatgcctgttgtgagcattaaatgagttaacacgtggcccctggcactaccagttctgggagactttttatttttattgtggtaaaatacacagatatacatttcccacctcaaccacttttttttacttcttccctcagcgctcaaccatttttagcgtacagttcagttgtgctaagtaccttctaccttcacactgctgtgaaacccatctccagagccctcttcagcttgcaaaactaaactggacccattaaacaacagctcccccttcctcctcccctggcccctggggaggctgccatttggcttccttctctatggatttgactattctagggacctcatgtaagtgcagtctcccggtatctgtccttttgagtctgcagtccccgggatctgtccttttgagtctgccttctttcactccgcagaatgtcttcaggcttcatccccattgcagcacgtgtcaaaacttccttttcaggctgaatgatacttcagactagaaagctcctcttccgaacacttcaccagcaacagcctctgagaggcccagggcggggcagggctaggtttttggggagaagctctcctctcaaagccagaccccccatctcttccctcagtgccagtaccagccagggcctcccccggggccgcttccacccatcctccctgtattagtccattttcatgctgccgataaagacatacctgagactgtgtaatttataaaggaaagaggtttattggacttgccgttacacgtggctgagaagacctcacagttatggctgaaagtgaaaggcacttctcacatgtttggtggcaagagagagaatgagagccaaggaaaacgggtttccccttatcaggccatcagatctcgtgagatgtattcactacctcaagaagagtgtcagaccatgagatctcgtgagacgtattcactacctcaagaacagtgtcagaccatgagatctcgtgagacgtattcactacctcaagaacagtgtcagaccatgagatctcgtgagacgtattcactacctcaagaacagtgtcagaccatgagatctcgtgagacgtattcactacctcaagaacagtgtcagaccatgagatctcgtgagacgtattcactacctcaagaacagtgtcagaccatgagatctcgtgagacgtattcactacctcaagaacagtgtcagaccatgagatctcgtgagacgtattcactacctcaagaacagtgtcagaccatgagatctcgtgagacgtattcactacctcaagaacagtgtcagaccatgagatctcgtgagacgtattcactacctcaagaacagtgtcagaccatgagatctcgtgagacgtattcactacctcaagaacagtgtcagaccatcagatctcgtgagacgtattcactacctcaagaacagtgtcagaccatgagatctcgtgagacgtattcactacctcaagaagagtgtcagaccatgagatctcgtgagacgtattcactacctcaagaagagtgtcagaccatgagatctcgtgagacgtattcactacctcaagaacagtgtcagaccatgagatctcgtgagacgtattcactacctcaagaacagtgtcagaccatgagatctcgtgagacgtattcactacctcaagaacagtgtcagaccatgagatctcgtgagacgtattcactacctcaagaacagtgtcagaccatgagatctcgtgagacgtattcactacctcaagaacagtgtcagaccatgagatctcgtgagacgtattcactacctcaagaacagtgtcagaccatgagatctcgtgagacgtattcactacctcaagaacagtgtcagaccatgagatctcgtgagacgtattcactacctcaagaacagtgtcagaccatgagatctcgtgagacgtattcactacctcaagaacagtgtcagaccatcagatctcgtgagacgtattcactacctcaagaacagtgtcagaccatgagatctcgtgagacgtattcactacctcaagaagagtgtcagaccatgagatctcgtgagacgtattcactacctcaagaagagtgtcagaccatgagatctcgtgagacgtattcactacctcaagaagagtgtcagaccatgagatctcgtgagacgtattcactacctcaagaacagtgtcagaccatgagatctcgtgagacgtattcactacctcaagaacagtgtcagaccatgagatctcgtgagacgtattcactacctcaagaacagtgtcagaccatgagatctcgtgagacgtattcactacctcaagaacagtgtcagaccatgagatctcgtgagacgtattcactacctcaagaacagtgtcagaccatgagatctcgtgagacgtattcactacctcaagaacagtgtcagaccatcagatctcgtgagacgtattcactacctcaagaacagtgtcagaccatgagatctcgtgagacgtattcactacctcaagaagagtgtcagaccatgagatctcgtgagacgtattcactacctcaagaagagtgtcagaccatgagatctcgtgagacgtattcactacctcaagaagagtgtcagaccatgagatctcgtgagacgtattcactacctcaagaagagtgtcagaccatgagatctcgtgagacgtattcactacctcaagaacagtgtcagaccatgagatctcgtgagacgtattcactacctcaagaacagtgtcagaccatgagatctcgtgagacgtattcactacctcaagaacagtgtcagaccatgagatctcgtgagacgtattcactacctcaagaacagtgtcagaccatgagatctcgtgagacgtattcactacgtcaagaagagtgtcagaccatgagatctcgtgagacgtattcactacctcaagaacagtgtcagatcatcagatctcgtgagacgtattcactacgtcaagaacagtctgggagaaacctccccttgtgattcagttatctcccgctgggtccttcccacaacctgtaggaattatgggagtacaactccagatgagacttgggtggggacaccgccaaaccacgtcacctcccgtgaggcccacccctaaaccatgggatcagtttatgtctcttgccaactcccaagctggggagcatgtgcccaagggccccactagcagctccctgccctggaaacagcctcccgaccttccccttccgtggacagaggtcaggctccgtgggaggccagccccacagaaggtggaggcactggcggaaccccgggtcaggaccagggaagctgcctgtttgggcacagaagttggtggcagcacagtgacagggcttcaggcagtgcctgctggtccttttgcttttggcgaaatgtgtggctgcccagggtgctcagggaactgccgggtggaggagtagagagcagcagcaggggcctcgtcacagtcccggggtctgaaggacagagcaggcatcactcccgtcccagcatgacagcgcccctcgacccagcctagctcccacgggtgtctcggggtacggaggtgggaccaccagagccactggaaagacatacgccagaacatgtggtggcccaaaggtttgtaagtgaaacgtgtcaggaaacgtggcccaaatggaaacattttaagctacaacaaacaaatgtataaggactgtaagaataagacacagcagtcaggcaccgcctggtcaggccaggccaccagattcccagaactctgcacttcaggcacttggtgggaaaggtgcaaggcagggtgagggagttgggtttggaagagcagccttgtcaccttgagcacgtgttgggccactgagccaggccctgtcccagaggcagccccacagtgcagggcacagctcagatgcacccagcagacctcaaccgcttctccggcgtctcacgggggcctggcgtgcagggaagggagcaaaccctgcctgccaggccctgtgtccacacagtctccctccctctcactccagccctaggaaggtgggagtattacacccccgccctttttttttttttttttttaaacttgagacagggtctcactctgtcacccaggctggagtgcagtggtgcgatcatggttcactgcagcctccgtgtcccaggttcaagcgatcctcccacctcagcttctctagttgctggaaccacaggcacatgccaccccacccagctaattttttagttttttgaagagacagggtcttactgtgttgcccaggctggtcttgaactcctgggctcaagcgctgggattacaggcgtgagccaccgtgcccggccaacccctttaacagatgataaagctgaggcttagcgtgcaaagtaactcatccacttcccagctggtgaacaggagctgagcctggagcccaagccagccaggcccccaaacctctgccctttgccagtggcagggaagtaggtggttggaagcccctgccgcatcccccagagctccgtcaaaccgaggtggggtgggcctgggagggagccccagcctccccttggagatgggcctggtgtgagccgccgagctgcctccctgacccggctgggtagaagccctttgaatactatcctggggttgccggctgcacccccacagatgccacagctgcctccctgcatccctgtgcaccatcccagaaggaaacaaatgcaattttcagagacaagagcctgctgaggtcagcaaagcccctctctgtccatgcttctgtgtgcctctggctgtgcacgcgtggctgggttttctgaaagaaccagagtgagagaggggtgccatcttgtggagggaccctctgtggccagtctgcttgtgtgatctctgtggactgactgggagttgtggcaaatatggccagaaatggggcctagtctcagactgtgtcccggggttatgtggatttagggtcagtgaggggcatggccactcaggaggccacgcttggtagatgggagacgggagtcaggatgatggcagggcctgagcaaagcagggtggagagggaggctcagagaagggggagccacctggcttccaggatgaggacaagagaaagtctgtcctgacagaggccccatgacagctgccctgggccaggatgttttggggaggggagattgcatcagcgttgagccatcctcactccctccatctggaggtgtggggcccgggggcttctgtgaaaggggccatgaatgggcccagccaggagacccaggggacaagggcatctgcaggccctgtcagttccatgtccccgatttccagttcacaccgtttgctcttctctgcccagggcctgaagccaatggaccacaatgggctggcagacccctacgtcaagctgcacctgctgccaggagccagtaaggtgaggggttccacccaggcctgcccaccagctgcacccgcccaccacctcaggcaatgcactctggtccttttgctttggggcctggactgggctgcgggcacccagggaggcccacagctgccactcccctcagagtccaagcaagctgatgggacctcagccattcaactgcacacagagcacccagtctgccccacaccctgttgcctcctggggacctcacgagtcagcgttacctacctgctgatctggggaaacccctggagaatttccaggccagcattttataagaagcattctcagctggaagttactattaggtgcaaacaaaggactctgtggttaaataacatggggaaacattgttaaacaggtttctgtaccacaggacttctcagagcatctaacgtgttgatgggctgttccctgactctccgcaagggggatgaagtgggcagaatctgcccctcattcctacgccggatgacccaagcgtccgaccacacatgtgctcagggcaccagcacaacaggtgcatctcggacaggagagagaaaaattgctgttaaataaaagcatcaaggtgaccttgagccatggaaagtcagaacttaattagacttccttctgtgcatcctacacttcagtgctgttttatttttaatttcatggggcagagtctgagtttacgtggaggcctaaatgggtaggcctggggcccacagcagcccaggaggaccaccccagaaggggcccttcccccttctctagggaaggcaggactgtaggagaaatggcagtgccccaccacctactcctggggaagaaatgggctccccacacagggtcttgatgcccttatgctgcaagaagggctcagggatatgagggccgagggcgagtatgaccagggaagtgtgctcagtgacccttcatttgtgggactggagccggcagtgcatggctgccgagttgtaggaagtccccaggactttccctagtgttttataaagagcagtctccttacaaacagctcctgaaagcaatgggagagagggattcctgtgccctttccacagtggggaacctgatgctgccacagagctggaattggaagcccaggctgtctgacctcccagcctgggccgggtgtggcaggcatcagaccgattcagacaaggagctcagagccgctggcacaggaggagggagtggcagcaatattccagctcggagaggccacccccgaggcagacccaaggacgggatgggttccaggcagaggggacggtccacaaaggcagggaatgccctgggaaggagactccagttccacacaggcctcctgcagaacctaccccgtggcatcgggctggaggtggggtcctccttggatgagcctcctacggctgctgcaacaaatgaccacaaacttcgtggcttaaagcagcgcgtttactctcggactgctctgcaggttagaagtccagcagtggtctctctctgggctaaaatcaaggtgtcggcaaggctgcattccttctggagcccggggagcccacagtttcctagctccttccagcttctagaggccatcggccctcctgggcttgtggccccttcctccaccttcacagcgggccccattgcatctctctggcccccttccttggtgacgtccctgactgtcttctctgtccattcttctgcttttaagaaccctgtgaccacattgggccacccaacaatctaggataatctccctattctaatgtcagctcattaccaaccctaagtccacctgcagcctcagtccacttggccatgttgataacacattcacaggctccaagatgagcacgtggccatctctgggggccattgttctgtttgatacacactttgatgctaataagatcatttttctcttctccaggcaaataagctcagaacaaaaactctccgtaacactctgaaccccacatggaacgagaccctcacttactacgggatcacagatgaagacatgatccgcaagaccctgcggtgggtgagggtcccaggccgcctgctccctccccaacccctactcccacccggcttttcctaatgaaggcaggactggagggtcagatggtcccctgtgggttcaacctcatgccagcaactccagcttgggggcttgaagaaaggcagaaaggtctgcccacgccaatggagcctggtgggtggaaaagggtcaccctggccccagtcccctgaaggtgcttcctggggcctctcagggtgctggaggtggttccctccagagaaccggctctcccagcctcctggctactcctggcactggttctgccttctcctgtcccctcttccaacctgaggacacttgtccatgaggacagtgcctgatatcgtgccacactctgcccctgtcagggcccaggcatcttgtgcgtctcccaccccagaccagggcagggcttggggcaggagaagccagggctggccctacctgcgcacacctccaccatgcccagtgcgtctgaggcactggctgtgcccctcaccaccgccccctctaggatctctgtgtgtgacgaggacaaattccggcacaatgagttcatcggggagacacgtgtgcccctgaagaagctgaaacccaaccacaccaagaccttcagcatctgcctggagaagcagctgccggtgagaggattgattgagcacctgctgtgtacctggctcggtggcaggtgctgggaaggcagaacttcctgcctgtgatgggactcatgaggggcagagtgagaggggaggggagaccggggaggtgagcatggagagtcaagggggtggaggtgaggaaggaccctggctttcactctgagtggccacgggagggtgctaagctgagggatcatgggggatgacattttaccaggctcgctggcctgggctcaggatggcttgaagaagagggaggagagggcaggaggcctggggagatggggagagatgggcacaaccctggcctgaccttggcagcggtaggagggcttgattctgaaccagatgtgcaggcagcagataggacgtccttgggtgagggaagggcagatccgaggtttggggcctgagccactgaagcctgaggggctgtttgctgcactcagaggactcagcagggaccacgggtggacaggacgcgcaaggagcacgcttggaacatgttagacctgagtgcctgtgagatacgcagaggagacagcagagtatcctttcctagaaatggcatttgtctcaacgttatgtcagaacagatttgccctcggcctgctccagcagctacgccctctgagtcttggtctctatgtccctcttccctcccccatcctcccttgtctatggcctcaccttcacctggttcatagggctggtgaagccaggagtcccccgtgccactggggtcaagagaaatcctggggcctcagcctcccagcgttcaggacacaggcggaggcatggtcccctcgatggcacgttgtccccctaagaggactgggcaaggggcaagtttgggaggacagagcccggcggctgtccccagtgtacccagccccagtggggcccggggacgtggactcacctcgagcttagcccaagtcaagccccgggggcgagtcagcctgaggccacggcttcttcccagaatcccagttacttttgcagaatttgatccaattttattccttgtcacattctctccccctcagacatttgtgtgatggatataacctttcctgttttattgttagtcactaaccacaggtaacccggtttttccacatggtctatgtcacttaagaaaggcaacatcttaggaggccaaggcaggtgggtcatgaggtcaagagttcgagagagcctggccaacatggcgaaaccccgtctctgctaaaaataaaaaaattagccgggtgtgggggtgcatgcctgtaatcccagctactcaggaggctgaggcaggagaatcgcttgaacctgagaggcggaggttgcagtgagccgagattgcaccgttgcactccagcctgggtgacaagagcaagagcaagactctgtctcaaaaaaaaaaaaaaaaagcaacaccagccctgccttagtgttcctgagttttcatcactggcataaacaaacaaccacgtgggtatgtacgtggggtgtcagcgtgtgtgtgtgtgtgctcgtgtgtgaattgtgtgtaagagcatatgtcagtacgtgtctgtgtgcgacagtgtgtgtgtccacatgtgtggtgtgcgttcgtgaaagcatgtgcgtccctgtgcgtggccatgatcagggcgttgctggatgcgctaccggcccattggtgccgttcagggactcacagtgaccgcaggagtgcagctggggatgcacccctgacagtacagccacattctggtggtacttttattattattattttttgagactgagtcttgctctgtcatccaggctggagttcagtggcaaaatctctgttcactgcaacctctacctcctgagttcaaacaattctcatgcctcagcctcccgagtagctgggactacaggcgtgtgccgccacgcctggttaatttttgtatatttggtagagatggggtttcaccatattgtccaggtgtctcaaactcctgaccttgaatgatccacctgcctcagcctcccaaagtgctgggattacaggtgtgcgccaccacgcctggctaattttggtatttttagtagagacgggggttcgccatgttggccaggcaagtctcaaactcctgacctccagtgatcctcctgcctcggcctcccaaagtgctgggattacaggcatgagcccctgtgccaggcctctggcggtaggttttagaatttacagtctgcgaacattatctgttttaagtcaatactgagcaagacccagtggtcttcatatgaaacaacccgaagtacaatgtcccacccctgaaaaaagagctaaaaatatgcctgctggttggttgttttttttttttttttatgagatggagtctatgtcgcccaggctggagtgcagtggcgcaatgtcggcttacttcaacctccgcctcccgggttcaagtgattcttctgcctcagcctcccaatagctgggattacaggcatgcgccaccacacccggctaatttttgtatttttagtagagatggggtttcaccatgttggccaggctggtcctgagctgctgacctcaggtgatctgcccgccttggcctcccaaagtgctggggttacaggcatgagtcactgtgcctggcccctgctagtttatattgtttaattttcacaccacacacactgacacaagcagcacagggcatcaaggccctcacacacaaagctctgcctgagcggcagatagcgagatctcgcaggcctggcctgatccaccaggaatggctgcctgagcactgtgttgaaaaggattctgaggtggcattggagcctagggcaaatgctaggatcgattagccatgtctgctctgggcgtgggaggtggcgaaggtggctggtggggcatgtatgtcttccctgctcaacatccctgctcacctcacaggagtctcatctccagaaagggttagatgtagccagagggactcactttggtgttaggcagggcacggttgtgggcaaaaggaggtggctggggctgcttgggagaggagcctggtagagtcctaaggggatccagggggacacagggctcaagctgggcgtgtgtgggtgggctcaagctgggtttgtctgggggggctgagggcctaggagagagggtttggggtgtgcagcagccagaaggaagaagccgggtagtctcgggagggcaaggaatggagaagcatcaggctggctggggatggggaggcctggagctgagatctgccttgagaggcaggcactggcagctgctgaggcagggaaggcactggatgggctccctacttggctcccagcttctccagggtgaggaatgtaccagaactctgtcttcggggttctcctgagggagccacatccagcaccctgagaggctccaggtagcaccttcagggaactggggccacggtgacccttttccatccaccaggctccattgtcatgggcagacctttctgcctttctttgaacctccaggctggagttgcttgtatgaggttgaacgcacaggggaccatctgtccctccattcctgccttcactagtacaagcctccagtgggcccttagtgccagggccttgcccagccctgaggtattaaagatgacgcaggtattatctggatgcggtggctcatacctgtaatcccagcacttcaggaggctgaggtgggtggatcacttgaggtcaggaattcgagaccagcctggcagacatggcaaaaccctgtctctaccaaaaaatagaaaaattagactgtagtcccagctactcagaaggctgaggcaggagaatcgcttaaacccgggaggcagaggttgtagtgagccaagatcatgccactgcactccagcctgggtgacaagagtcagactctgtcaaaatcaaaatttacaggtagagttccaacttcaaggaacttagaggctggggcagagccctgaggaagcagggggccacaccaggccatgacaggataaacccgaggcagtgggcgcgcagaggggacggccaacccaccctgagggtcagaaaagccccccaggcccagaaggaccaggaatttatcaacggtgaacactgaggaggtcagaggagggtgctggagctgtggattaagggtgcgcaaaggtgtggaggtgggacccggcttcaaagccaagggaaagtccgggcgggctgtgaggaggacctggtggaagaccgtccgcggaagccgagcgcgccaggccgggggctgcagacccgtgaagggccgcttagcgctaatgttaggctctgtgtgcctcgcaatctgtggccaccatgcagctctgtccttagggcaaaagcagccatagagaagcatcacggagctggcaaggctgcgttccaacaacacggtgttaatggaagctgaagtgtgaatttcatgtcattttcatgtgtcacaaaatatttttcatttcatttttctttctgccattccaaaaagtaagaaccagctgggcacggtggctcatgtctgtaatcccagcactttgggaggccaaggtgggaagatcccttgagcccaggagtttgagatcagcctgggcaaaatagtgagacccctgtctctatttttttgaaaaagaaattgtttaagataagggtaagagccatgcttagctcacatcccacacagagccaggcgtcgggcctgatctggcccccgggctgcagttgccaacccctgggctggcccttgctgggctgtgaaggccaccgtaggccacatgcagccaagaacagggagggtgtgggtcagatccagccctggaagagcccttgggagggaagagatgacagaagggctgtgagttcacagtgaggccactcaccagggaccgtgaccaggcccggctgcagcagccggatgggcgggctcaggaagaggaggccaaggacggccaagagaggggtgggagcaggtgaggactgagtgaccgtcccgtccaacaggtggacaagactgaagacaagtccctggaggagcggggccgcatcctcatctccctcaagtacagctcacagaagcaaggcctgctggtaggcatcgtgcggtgcgcccacctggccgccatggacgccaacggctactcggacccctacgtgaaaa

SEQ ID NO: 721 - DNA, 32744 bp, Homo sapiens
  source 1..32744: mol_type = other DNA
gaggtgagcaggaaggagacggccgcccagcagcccgtgggcaggcgcggcggagcgagcggggccggcggcgggcgccgagggacgccgaggcctcgggcgggggctggcccggggttccaggtgagatgcgtgccggactcgcccagccgggcccgccccctcggggcttccacctggggcggggaggccagggaggcccaggacccctgggctgtcgggccagggcgggagggctgcgcccaggtccgcgcgcctcgcccctgtccgcgtcgctgtgctggcctggaagagagacacctgtagaaagttctgcgggaaacttctctgcctgatctgcgcgatgactgaaacttgggcttgggtttgcacaataatgttggcttaggagagcaggagaacaggtgccccggccggctgggtgcggggggcaccgcgggcagagacggagtccccgggcccacgtgcaggcgccaggccagcggggttggcgacgcgcgtctgcggtgaccccctccccacgggcggcggccggagcgcggtgccccggcggcttagcccctgcccctgccatctgggctgtgtccctgccggccctttgtgcctcctaatccccggacgcaggaagcccgcgggagggacttcggtctccggcctttctccagctggggcggctttggacaccttcacatgacagtgcggagacccagtctgccctccatgctgacgggcggggtttgcgctgtgggatttggcgagaagtggaaaattctatcttgccaaagaaagtgtgtcttagtttgttccggctggacgattggtggacacgctgggccttggctgtggggagaactgacctaaccaggggagctgtagagtggcgctttgaggctctcacctgaacaggtgagctttgagtgaggagggcgccccttcccctggggatccgtatgcgactgccggcagccttaacctgggctccagggaccccctgctggagtttgtagttcaagagaaccttgagttctcttgaaggggctacagagaggattctgagcagggagcgggcagggagggaatgggtgtgtcaaggtgacaaggaaacgctggtaggaagagcagagctgccacagaagagctgtggcccagcccgggggaagccaaggtcagaagtggcagttgaggctgggtgcattggctcacagctgtaatcccagcactttgggaagccaaggcaggaggatcgcctgagcccaggagtttgagaccagcctgggcaacatagtgagacctcgtctctgcaaataataaaaaaagttagccaggcatggtggcgtgcacctgtagtcccagctactcaggagcctgaggtgggaggattgcctgagcccaggaggtggaggttgcagtgagtcatgatggcgccaccacactccagcctggggacagagtgagaccctgtctcaaaaaaaaaaaaaaaaagtggcatttgaggaaaactgtctgggtctgtgtgagcagaggcacaaggagaactgtgcgagagatgtctcagctttattttatgaactgggatttggggtttagttttcttaggcgatcttcccacagtgctagctgtggcagacagaactcaaactcagctcttaagcttctaatcagagttcactcctttcctctgaagttagactgggcccatctttgtgggggctcctggacagggtttccggggtccagggtcatttggcatccccattcttccttgaggcaagggagtttcccctttggtgtcagattaatatgcttttaattatattaaaatgacactacattcataaataagaaataaaatagaaaaaagtaacttttttctctttttttttcttttttttaaactaagttgaccaaattctttttttctttaataatatgttttttaatttgtagagatgggatctcaccatatgttgcccaggctggtctcaaactcctggactcaagtgaccctcacacttcagcctcccaaagcgttgggattacaggtgtaagccactgtgcccagctgttagtaactttttttttttctttttttgaggcagagtcttgctctgtcacccaggctggagtgcagtggtgcaatcactgggagatggaggctcactgcagactcgacctcccaggctcaagtgatcctcccacctcagccttctgagtagctgggactacaagcgcgcagcaccatgcacagctaattttctattttttttttagaaagggggttttgccatgttgcccaggctagtcttgaactcctgggctcaagtgatcctcctgcctcccaaagtgttaggattacaggcatgaactgccacgccagacccgttagtataaataactttttattatttttatttatttatttatttattttgagacagagtctcgctctgtcacccaggctggagtgcagtggcgagatctcggctcactgcaagctcctcctcctgggttcacgccattctcctgcctcggcctcccgagtagctgggaccacaggcgcctgccatcacgcccggctaattttttgtatttttagtagagatggggtttcactgtgttagccaagatggtctcgatctcctgacctcgtgatctgcccctctcagcctcccaaagtgctgggattacaggcgtaagccaccgcgcccggccttaaataactttttaatataccgcaacattaaaagaaaaaaaggccaggcgtggtggcttacacctgtaatctcagcactttgggaggccaagttgggccgatcgcctgaggtcaggagtttgagagcagcctcaccaacatggagataccctgtctctattaaacatataaaatcagctggccatggtggcacatgcctgtaatcccagctactcaggaggctgaagcaggagaatcgcttgaacctgggaggtggaggttgcggtgagccaagatcacgccattgcactccagcctgagcaacaagagcaaaactccatctcaaaacaaacaaacaaacaaaaaatggcccataatcccaggtgatcgctgttcatttaaaaaatagaaaaggcaataggagcccatagtgggaaaaaggaaacattgtagaaagtgtaaaattagagagcaaaaaattaggccgggcaaggtggcttatgcctgtaatcccaacactttgggaggcggaagcaggcggatcacaaggtcaggagttcgagactagccttgcccacacagtgaaaccggtctctacttaaaaatgcaaaattagccaggcgtggtggtgagcgcctgtaatcccagctactcaggaggctgaggcaggagaatcgcttgaacccaggaggcagaggttgcagtgagccgagatcgtgcgattgcactccagcctgggcaatagagtgagactgtctcaaaaaaaaagagagcaaaaaattatccctcctgcctgacagtccttttctttttttttctttgagacgaagtctcctctgtcgcccaggatggagcacagtggcgtgatctcagctcactgcaacctctgcctcccaggttcaagcagttctcctgcctcagcatcctgagtagctgggattgcaggcaggcaccaccaggcccagctaatttttgtatttttgtattttttgtagagacagggtttcatcatgttggccaggctggtcttgaactcctgacttcaagtgatctgcctgcctcagcctctcaaagtgctgggattacaggcatgagccactgcacccggcccctgccagtccttttatcttcatccttcatccttctatccttcatctctttaaaaacaaaaaataaaaaaaaattaggccgggctctgtgtctcacgcctgtaatcccagcactttgggagaccgaggcagacggatcatgaggtcaggagatcgagaccatcctggccaagatggtgaaaccccatctctactaaaaatacaaaaattagctgggcgtggtggtgcgtgcctgtaatcccagctactcaggaggctgaggcaggagaatcgctggaacccaggaggcggaggttgcagtgagccgagatcgcgccactgcactccagcctggtgacagagcaagactccgtctcaaactaataataataataatttttaaaaaaagatttttagtgtctttctaggcttcaggtgtagttttgactcgttctttgccgagtccttgctgtgtgaccctagtgtggtcactgacccgtgctgagctttgttttcacagatgagaagatgagaaaggtcactagcacgtgtggcctgccacacagcaggcacccagtgagggtggactcaacttccatgaagcataagaggcatccgtctgtcccaggcctttgggtgggcacttgggccttttggaagtgcctgatgggtttagggaatttgtcttctctggaaatcagctgacggctcatgaatttgtgatattttaaagtctctggctgggcattttggctcatgcctgtaatcccagtgctttgggaggtggaggagggaggattgcttgaacccaggagttcaagaccagcctgggcaacagtgagatcgcgtctctacaaaaatttttttaaaaaattagctgggcatcagccaggcgcggtgtctcacgcctgtaattccagcactttgggaggccgaggcaggcggatcacgaggtcaggagatcgagaccatcctggctagcacagtgaaaacatgtctctactaaaaatacaaaaaattagctgggcatggtggtgggcacctgtagtcccagctgctcgggaggctgaggcaggagaatggtgtgaacccgggaggcagagctggcagtgagccgagatcgcgccactgcactccagcctgggcgacagagcgagactccatttcaaaaaaaaaaaaaaaaattagctgggcatcgtggtgtgcacctgttgtcccaattacatgggatcgtaggaggatcgcttgagcccaagagtttgaggctgcagtgaactatgatggcgccactgcactccagcctgggtgacagagtgagactctaactcaaaaagagaaaaaaagtctctaggggtcagaagtttttcagcgaggacctttttcaggaattgagggcagcagtggagggcgcggcttctcctaaatggaccttgcattccagtggcccttgatgcttcccttgctccttgggagggccaagagtgagagccggttgcctgggagtctttcctgtggtggggatgtcggagagtgcaggattaaacctgctgtgagttctgccccagctgaggagtgcttgctgggtacaccctcctcaccctgctgggtggcagggcagagagcacaggcctgtgctgctctgttggcattaggagactttctaggaatgccattgtgccccctttcaaccttgcttggggagaggatgtcctctcctgccaggacttcctggccccgggaccctccctttggaagacgaagtgctgcctgggaccaggtggcccatgagcccctgcccgcactgtgggagatctgcgcatctctggcaagagcctccaggagccatctaaggagtttagtttccccggggagctattcggccttcctggtctttccagatgagtcaaaagcagctgttgagacctctgagttgggggccagaatggaggcccaagagaccaatgttctttctcctgggccggctgctttgagcagcactggcagcctggactcatttgtcctcaatcctcaactctgagaggccctcttatctgtcttaggtgatatcgttctcagggttcctcctggggcgaggcacgccaggtctgcttggcaacgctgttttcctctgtcaggagcagtttgcagagagaaaactggggacagggcaggagacgggcgtcccccagcggggccaccagcactgtttgccctccccagccctggctccctaggaattccaaggagaccctcgctcactgtgcccgtggccatggctttgctcaggtccctttggggtggccttccccacagccctgcctctcagaggaaactggctttgaatactcacccctctcttcttcccaggaaccacagcgaattcttgagctaggagaggctgctctgggcgtggggacgaggaggctgcaaggcacctgactctacccttcaggaattcggcagagactggagccttctctcgagacacctgacttagtgttcccagagtttgatgagagggacatctgggcacaggaccatatgactgtaataaattatatatatgtatatatacacacacacacacacacacactttttttttttttttttttttgagacggagtcttactctgtggcccaggttggagtgcaatggcatgatttcggctcactgcagtctccccaggttcaagtgattctcccacctcagcctccccagtagctgggattacaggtagctccccagtagctgctaccatgcccagctaattttttgtttgttttgagacggagacttgctctgttgcccaggctggagtacagtggcgcgatctcagcccactgcaagctccgcctcctgggttcacaccattctcctgactcaggctcccgagtagctgggattacaggcgcccgccaccacgcccagctaatttttttctttgtttttttgttttgagtctgagtctcgctctgtcgcccaggcagcagtgcagtggcatgatcttggctcactgcaacctctgcctcccgggttcaagcaattctcctgcctcggcctcctgagtagctgggattacaggtatgcgccaccacacctggctaatttttgtatttttagtagcgggggggtttccaccatgttggtcaggctggtctctaactcctgacctcatgtgatccacctgcctcggcctcccaaagtgctgggattacaggcatgagccgctgcgcccagccctctagtaaataatattaacatttaatataattctggaattctctgggggtcctggagctttggttaaaggcagggtccacaagggtattccgaacaggatgccaggcatgacgtccacagggccctggccttggccggagacttgaggacagggtaaggaagttccctgagaaccctgtggggtcctacctcagtgtttcgtggggtcagtgattggcagataccttttctagttaatccctagtcagtcttaactgttcgttcattcattcaagtactttttttttctttttttgaggagtcttgctctgtcgcccaggctggagtgcagtggcgcgatctcggctcactgcaagctctgcctcccgggttcacgccattctcctgcctcagcctcccgagtagctgggactacaggctcccgccaccacgcccggctaattgtttgtatttttagtagagacaaggtttcaccgtgttagccaggatggtcttgatctcctgacctcgtgatctgcccgcctcagcctcccaaaatgctgggattacaggcgtgagccaccgcacctggccctttttttttttttttttttttttgagatggagtctcactctgtcaccctggctggagtgcagtggcacgatctcggctcactgcaagctccgcctcccaggttcacaccattctcctgcctcagcctcctgagtagctgggactacaggcgcccgccatgatgcccagctaattttttgtatttttagtagagacagggtttcatcatgttggccaggatggtctcgatctcctgacctcatgatctgcccgcctcggcctcccaaagtgctgggattgcaggcatgagccaccgcgcccagcccgttcaagtattttctgatgcctcttgtgtggttctagatgttggatgtgatccttaaacaaagcaaagatgtctgccgtcgttgaaagttgtttctaaaaggtgagaagcctgactgacagaaagtaaaagtaactaataaattgtgttaaaaggtgatacgggctatagggtaaaaagaactagagcaacaattgggaacccgcatggtagggggcaggttacaacttttaacaggtggttagagtgggcctctgccagaaggtgacatttgagcaaagctttgaaggaagtgagggagctgtttaaataaaattccagtccctcccatgaggcacctggatgaggccagcacaatccccacctcctggagctgacatctggaagcttcttgggacagctgttccagttttagggcaggtaggaggccctagaaaggggcctgattggatgggctggatggcctgcccacgccagccccaggcaggtggtccatcttctccccagaatggttttgcttttccttggacttggctttctgccagtcacttccctggagagagagtctggtgttggattatgaaagggggctaaggcccccagaatgggggtgcgttcccaccttccaccccatcctcacaggcccaggaggggcaacagaaaggaaacttcaggaggagtctaggcatggcgggaggatcctcttggggttgtgggatggttgtgattccataggatagatggtggggggaatggaggctgaccccaaatggggcccatccagcctgcgagcaggcagcccctttgtcctgggagagaggcctgacctgagcggaggattctgcagtcagattggaatgcaaattggggcttggatttttttttttctttttttgagaaaaggtctcgctctgtcacccaggctggagcacagtggtgccatcatagctcactgcagcctcaacctcctgggctcaagtgatcttcccacctcagcctcctgagtagctgggactacaagtgtatgccaccatggctggctaatttttaagttttttgctgagacaaggtctccctaagttgcccaggctggtctcgaactcctaggttcagtggattctcctgcctcgacctcccaaagtgctgggattacaggcataagccactgagcttggcaaaggacttggactcttgactgtttgagcttggggccactctgaatcgatcacttcataagtaattgtaagaattaaataaggtgaatgtaaagtgctaaagtcacatccagccatagctagctctcaatcccttttactacttaattaacaacagcggggacgacagtcctccagtcatgcccccattccctctggtttgtgttcccctagatcccactccatggaactgcctttcagccaaggtttggttgctaagctgctggccagggacctgcctggtgcttctgggagactgggcttcccagggcgacatgggcacttgcaaagcggctacaggcgtctgagttggcacagatgccgcaggggtcagcagctgcctctgtggtttagatccctgcccaccagtgccatcagagtaggaggtgcaggggcggattcacatccgtcaaacaggaggccacagccacactcaggcctcacacaggatgtcgcagaggggaaggcagcttcttaatcagcagcgggctgtggggagcacgagcgaagaggagaggagagcatgggacatcaggtggcacgccctgagagcaggcagctggcgctgggtgcggcccgggggccctctctggtttcggctgggtctggagtcctgccgctgggtgtggactctcccagcagatcaatgagatcaatggaacttcccgagctatggagggagtttcttgagggctggcccctcccacatctccaggccagagggctggctgggcttggccaagccttggtctcacagggacaaattagcccaggtgccccaaacagtggcagggtgggagaagcagtctggcctggggatcccctctcctccgaggcacaatcgcatctgccacttagagcgaggggggcccaaggcaagtccaccccgtgtggttattctctctctctgcccccactggtctctttcttgagctcttgagatggaaggcgggccagggtgtggattttgtggcctgtcaccaagtggagagctctcctgttctttccaagtgggtgtccaggtgtgtggacacctgtcctagacccagaaatattttgccggccaggtgcagacgtgggtgagtggaacagtgaggagggaaggaaacaggtcgatcagctgcccacagggagctctcaggctggttccacatgcaaggcacagacttgggtagaaagtggatgggaaccagccacaaggcagcaagccttttgcggcccggctctaaaccctggcgcccgccaaaagggaacagagcagggcagaacagggagggtggctcagaggctggtctggtgacaggcaggagtggagactgaggttggatggcctttagaagttagtggggtggagaaggttttcctgagaagcctcatctcagaggtggcgctctggctaggtggcaaccccagtgaccatttctggtgttagacttgaggacttggggggctcctcagcctgtgggctcctgaacttgtctcttctccacattcctcccaggtgtgtcacttaagtgcacagcacctgagagtttgccaagcccgctccctggccctgctttaaagcctcgggacgatggaatagaaaagtcctttctactcaggaccctgaaacccaaggttgcacagctagtcccacctgcctgtctccccgcctttccgggcctaactattccgtgtctctagggggtacctctccccactcaggttgcggtggctggagaggagcccacgcctggtgagcaccggaacattccaccagcaggacagggctggacccaccctcccgcctgaccatgcctggggcctctttccttctctctttgatcctcttatccaccctgcctaggaggcagataaacaaaaaggagaaaaaagaatcaccactaatcccataacccttccgagtacattgtcaaatatagggatttttaatagattctacctgactcttggattctttgtacatatagtcccatgccatgaaatggtcttttctccatttatttatttatttatttactttttgagatggagtctttctctgtcacccaggctggagtgcagtggcgctatctgggctcactgcaacttccacctcccgagttcaagcagttctcctgcctcagcctcccaagtagctggggttacaggcacccaccaccatgcccggctaattttttttagtagagacggggttttggcatgttggccaggctgctcgcaaactcctgacctcaagtgatccacccgcctcggcctcccaaagtgttgggattacagacgtgagccacagcgcccggcccttttattccttttaatgactggaagccttttgtcataggcctgagcacacttcacccatcccctgttgtgggccatttaggttgcttctgattttttctgacagcttaataaacagcacatcaaggccaggagacatgcatgagcctgggaggctgtccctgtccaccatggtttcaatggatcattttatcctaaggtgtgtttcttccccatctgaacccatcttgaccattctcaggactctgagataaaatggtccctttaccccttaggataaaatgatcccaggctgggtgcggtggctcacgcctataatcctagcactttgtggggccgaggtgggcagatcacttgagatcaggagttcgagaccagcctggccaatatggtgaaaaccacagctctactaaaaataacaaaaaaattagccaggcatggtggtggacacctgtaattccagctacttgggaggctgaggcaggagaattgcttgaacctgggaaacacagttgcagtgagctaagattacaccactgcacttcagcctgggcgacagagcgagactccatctccaaaaaaaaaaaatcccttaaaaccatggtggacagggacagcctcccagcctcctaggactcggagaatggtcaggatgggttcagatgggaaggctttttggaaggtgacctttttttttttttttttttgagacagtctctctctgttgccccggctgtattacagtggcacaatctcgattcactgcagcctccgcctcctgggttcaagcaattctcctgcctcagcctcctgagtagttgggaccacatggtgcccgtcaccatacctggctaattttttgtctttttagtagagatgaggttttgctgtgttggccaagctagtctcaaactcctggcctcaagtgatcagcccgccttggcctcccaaactgctgggattacaggcgtgagccacctcgcccagcctggaaggggggccgggctgattgagggggcaagaaggtatttcagacagagaatggcagggaccatagtgaatggggccagggtggggctgagtagatggagcagccaacagggccaaggagagagggccagtgacatggaggagggaacggggggtgggcaggccccatcaggtccctgcctaggacagctcaggaggcccactttgtcatctctctcatgtcatctgcacagatctctgcattgggccccccacttgtcttcatcctgaaacatagaagcctctctcatcttgaggctttgcagctgttgttccttctgcctaacacactgtgccccaagttgtctgtggctggccccttcccaccagtcagtctcagtggagacctcgcctcctctgttcattcattcattcaacagataacgagtgaggactcgctgtgtgcactcggatacagcagtgaataaaaggacaaaaggtcttgaatgggaaaaagaaagctgctgcttgtgggggattccacaggtaatcaacaagattaataagtaagctattcagtgtgtccaaacgtggccaggtccaaggagaaaagcggtgcagggagggagagagaacatcccaggagattgcagcttcaggtcggggagggcgtgaaggtatctggaggaaagtgacccaggcagtaggaacagggaacgcacaggctctgacaagggaatggtcactgagacctgttggccaccaaagcctagttgctggatcttcgcatcctctttttctttctttttcttttttttagaaacaagagtctcgctctgtggcccaggctggagtgcagtggtacagtcatagctcacagcagcctcaaactcctgggctccactgatcttcccgcctcagcctcccaagtagctgggaccacaggtgcttgacaccatgcctggctaatcctttttgtttgttttgagacagagtttcgctctgtcacctaggctagagtacagtggtgggttcatagctcactgcagcctcaacttcccaggctcagcaatccttccaccttagccttttgagtggctgggaccacaggtgcatgccaccatgcccagctaattttgtttttattatttttagagatagggtctccctatgttgccctggctggtcttgaactcctgagctcaagtgatcctcccaccgtagcctcccaaagtggattacaagcatgagccactgtgcccagccctcctttcttttcaaaatttttattgttccatgtaaatttgaaaaaatgtcctttccttttttttttagagacagggtctcactatgttgcccaggctggtcgtctccagctcctaggctcaagtgatcctcccaccttggcctcccaaagtgctgggattataggagtgagccaccgtgcccagcccatctcttttttttgatcagagatagtcctgacctctgtcagaaatcatcccattttctggttacttttttttttttttttttatacagaatttcactccgtcacccagactggagtgcagtggtgcgatctcagctcactgtaacctccacctcccaggttcaagtgattctcctgcctcagcctcctgagtagctgaaactacaggagcacactaccagactcagttaatttttgtatttttagtagagacggggtttcaccatgttgacccaggctggtctcgaactcctgacctcaagtgatccacccgcctcggcctcccagagtgctgggattacaggtgtgagttactgcggctggttggaaatcatcccattttctgatttgtgtcctgtgaagtgtctgttgctcccctgtcactgctgtatccctttcctaggacagtgtctgctccatgccaagctcttgctccttctacaggatctgtgtgggagggagtgccatccccctttacagaggagctgtctctggaggccatgtggcttgggggagctatgcggtgctgtgatggtgagccctggcctgttggcccctagcccagggctctttcccttacaacccctggctccctccaggaatgggctgagtaggcaggatctgttcataccaggcgtctctaggcctggcttcctgaagtttctctgcagagaacctgcttgtctggggtggggagctgaggagccacctggaggtgaggcccgccaggtctagaccagccccctcttcaaggaagcgtggtgcttttccatgccttgacctgggcagtgggttgattggagtgaggggataccatgcccaccctgccttggtcctcctggctccatcaccccatgcccatgaggtcccagccccgtgtgggaagagcagcaggtccacacaaggccaccagccctgcccagccagacctcgccagcaccctgtcagcagcggccagtccccaggccccagactgccgggtcggctctgagctgccagcatctgggagcgtgtctgtgcgtgtccctgcctcttaattgcaagggtgtcattgggcatcctttgttctgtattatccatccatcactgctacccacagcccttctgacttggggtccagtccgagttctgccgcttcctacttggtgaccttgacagggtgttttgctgctgtggtctgtttccttgcctgtctagtggggacgttctgcttacctttcagatggcttcccagatcagggtggtgtgaggggctccacgctcacaaactcacacagtgccaaggaaaggagatggccaggacattcagcgacccatgactgtgactctctggatgctggggtttagggaggattttcttgtctgtatttggtttttctacaatgggcacagattacttgagcaaaatgttttaaatggaataggatgcagagggtctggtacactcactccctactgcacagcaggtgccccagggagcatttgggtgggtgggtggtgctcagtgtccacgccctcctgatgccattgctacaccctgtcttcctccttcctactggcacctcctcccagcccccagttctgccttgtcacttttaagcctgtgtggagtctttggcacggatggccctgtgccctcttgtcccctccctggagtctgcaggcagtggtcactctccagggagcccccaccaagcttcctctgacttctgacccagtgaccttggcctgggccccgggtgggggtgtgagccctccaggagtccaactggtttatgagtgtgagctgccctcccccaggctgcaatgctgggccagcagatctgggtgtcccctcacttccattccagaagcccttggggctttcccagccggtgcctgttctctgaacccccttgggaccttggatcaagtgggccctaggagtttcccggccacctgctcttccccagcaaagtgggatccccacctctggtctgactcctccaaaatgtgaaggcaggaacatcccggaatgaccccctttttcagtttccccagaaggtgacagcgctctgggggctggttcctggtattcggttttgagataactgaccgtgcagatcctttcactcaagggggatgtggctctgctttttttttttttttttttttttttttttttgagatactgtttttgctctgttgcccaggccggagtgcaatggcctgatcttggctcactgcaacctccgcctcttgggttctagcaattctcctgccttagccttccaagtagctgggattacaggcgtctgccaccacactcggctaactttttgtatttttagtagagacgaggtttcaccatgttggccaggctggtctcaaactcttgacctgaggtgatccacctgcctccgcctcccaaagtgctgggattacaagactgccattttttacagtgcgattttgtaaaatcgggtcaccctcccagcacagcaagccctcggttcctctgcccgaagacacccccaactctgccacgcacgttacctaccttctcccacgctgcccagattacatgggatcctatcatatgcaaagtcctgacctgatggttaatttttgccacctcccaagaacgcgaaatccttcaaacctcagcttagataccttcttctcgaaggtatctaagctgcctcccacttcgggccaggtgttccctctccctcctgcagtcaaagcactcaacactgggctgccctgtctctacctgtccctgcctggagcacgcgcctccagggtgcggcctggatctgcttccttcccccatcctgctgggagtggacggagctgtgcccagggtctgtgtttcccaaggacgggccttgctgtcctgtggtcagcaggaggctgagctactggaagccagaagctggagcacagaggctccttccccttcccccaaggataatccagaaatggtttccccttgggctgggaatggattctatggtgggcggagagtttaggggccttgagctggtttctttattgggagcagattcctcctgattattctccactagggcccgtgggaaagagaacctttctgagcacagcccatgagcgcacagggaagctggactggggctagccagagagaggggaggggaccggcagagaccccaggcacggtggcatgggccagcaccccctgaccgagtgctctgtgccacccgtgcccacttgagtttctcatggctgtggctggttggagaggctgaggccgagagtccctggacagccttccccgaggtcagaaggaggaagcatctgcccggtgccctggcctggagtcactgcaggcctctcccctgccccgacttgggctctgatctgggaaggatggccttggtgtttctaccttccacaagactttggaggaagaggcttgcgaagtttccctttctgcttagctggagtttcatggtttctcagaaaacaggttaacaattaagctaattaacctcagggcccgccggccctccttgtgcttataaagccaggctaaatggcttcctcccccagcttttcctacccccattataaggccacaggtggtgacagccttcagccctgaggtgggccggcctctagatctgagcgtggggaagccagggtgcatgggcggtcactgtgaagctggcctggccccggggtggcagcctactggacttggagagagaggccctgctccacctgtttgggccgggcctaatcgatacctgagtgccaggacagacccctgcagctccttctgtttctccaggtctccagtgggggctgcagactaagcaaaatgaggcggttcctgaggccagggcatgaccctgtgcgggagaggctcaagcgggacctgttccagtttaacaaggtaagttagggagagcagggaagatgacccccaggttttcggccaagcagctcaggctggggctgaggcacctcttacctggattaaggtatagctcttatgtgactgcctgcagtgcctcttgggactcagactttggaaatggggcctggttaaagggcttttatagaaaaggggaataggttgccctcatgagttgggacttctcatctgaaggctttcactggctgtgtgacctctgcaagtcactccacctcatggagcctcagtttccctacctgtatcatgggaataaaacgatctgccatgtctacctcggcacagggttgtcaaggaggtttagggacgtgggagatgaaaggatgaactcttcagggggtgataatgttccaggtcccttggggccctggagtcacaggccatggctgtttctcccttctcaaattgcccctgaaggaaaatgcagctcccctgcaggctgaacacgtgattccttctggctccggccggggtgagtggggagaggtgcccaggagaatgagccggagttggcctcggactaccccaatcccaaacctgtatccggggtaccagaaggcccacggggcttcccttcaggagtctggggcctgagaaggtcaggacgggcctgtacgcaggaggcgtgcagtgtggctcttcagctcccgggccaccaagcagtgtggggccttgtgaggtaatgatcttctcacctctgctttgcgcctctgctgggaaggtgggctgcaggaactgggacactgtgatcctcttcccccggggagccaggaccctcccaatatgctgagggcaggacatgtggctttcgttgggggcttccgtttgggctcccctgcccccgaaaggaagcagtggatgtgagaccagacagtctggaaaagggatgtctccctgtggagaatgaggaagtctctttggttgtatttttgttattgatttgagaactgtagaagtcagcttgcccaggtgcaaacccaactttgccacatagaagctggatggccgtgtgcctgtcgcccacaccataggcttgttaagggcgtacgtggggtgaggtaacttaagtgctaggcacagtggcccaggaatgctggctgctgctgtgggctggaggggatctccgtgacctccctgttgggagaggtgggtcgtggggtggagggacctccctgacctccccgttgggagaggtgggtcagcgctcccaatgtgccctgccatttctctctgtgtttcttagcctgtgggaggagttggtgtccctgatggagctttgccacgaggacatttgcctctggaattagggctttcctatcccaacgtgcctcctgccagctcgcttttgggccttgggatatgggggtgcaggtgttgggaatgggagatctcaggacacctacagcctgctacccttgctctggagggagtagcctatgggtgctgggtctcaaagcttcggtgtccacgggagatggaagggaactgagtgacccccatctgcctccagtctttcgctttgaaaaggtggcagaaacctgacaggctcagcaaatagggctgaacacccccctacccctgcccccttgcaccaagttctgtctgtgcagctgagtgaggctagggtggagctggggcaaggagttgtcccttcttctttcccctatcccccaggggtgatccccaaacttgattgtcccactcccaggcctgggggtggcagagggaggctcctgggtctcctgctctgccttcttctttccattcatatgcaagaagcatgcattgagcacttactggatccacagcccaaggctcagggctatgggaatctgattaggcctctgccctccacttttacagtctgcaggagggaggaggctgatggcctgaaatttcaggccttggaagtggagaggaggaaggggagagcccaggggattcaggagcggggtagactcatccggctcggggagtgtggtggggccagcagggtgggattggaggatgaggccagatcccagaggatttgggatcccgtctgccctgcccctccccagcccaggctgtgaagcagggaggctgctggtatctgggcctgatctgaccctgcggctccaggggttgtgagcaagggagtgaatagtggtcccatttacaatgtaggaaagataaacctggagatgtttttaccctttgggcaaggcaggtaagctcagagcagttaggagacattgccccgactaagataggtgacagcccagaaggaagggactggaagcccagccagtggggatgggaacgaggcatgaattgagcagggtttctcaacttcagcactcacagatgatatttgaggctggctgtgctgcggaggctgtcctgtgcgttgtagattatttagcagtgtccctagtcctacccactagatgccagtagcacatacatacacacacagcctgtcaagatgtgacaaccaagaatgtttcctgaggggtaaaatcgctcctggtttgagacccatggaatagagaactattcagggctgagatctgctgatggggcagtaaagagggaggggatggggaggggaggcgggtgtgcaggatgaccgtgaagtctctgacctgggtaggtggtggtgccaggccttgggagggggagcccaggccaggagtggcgaagaacagatttgaggaaaagtaatgtattttgatcgttttgatttggacacaatcgcaacaacagtgctctccatttttggagaggcagcttgcccagaggtgagtggtgccgactgcccggctcgccagctgtgtgaccttgagcaggtcacatgcctctgagataatgataatcagagccactccatccatagagttggtgtgaggactacatgagttcctgcacgaatcgaaggccacgtctggctggcggctgcagtgtccggcagcatcgttctgtggtgggtgtcatgtggcttgaggttgagttgggggagccttgggacaggcccagcagacaggcggagggcaggtccagcagacaggcggagggcaggtccagcagacaggcggagggcaggtccagcagacaggcggagggcaggtccagcagacaggcggagggcaggtccagcagacaggcggagggcaggtccagcagacagacggagggcaggtccagcagacaggcggagggcaggtccagcagacaggcggagggcaggtccagcagacagacggagggcaggtccagcagacaggcggagggcaggtccagcagacaggcggagggcaggtccagcagacaggcggagggcaggtccagcggacggtgggatacccagggctggagcctggagcggcacgtgggctgttggtgtaggcgagggtcaggccccagacagtgttcatgctggcaactcaggtcatctcttccagtggtcctggaaggccagtctgctgggtactgtgacagctgggacagtggcgccatcacagctcgaccccaggtggcttgtagacactggcttctgaaccagttctggcctttttgtccaacaccttttggctcaactcctttatacccacaccaagcccgatgcctcaaagagagcaaggacatcgccccgggggtcctgagagggagacgtcttgtttctttggcttcagtacttccagaggatctgtgattgcgaacagtctctgaactctgccaggaactggctgtcagagcggtaactccagttcaccgagggctatgtgccaggcatcagaggggccaggtagtggttaggggcagggactttgcagccacatgacctgggtctagatgcgggctctgatgcttcctcactgtgtaagacacagtggacgcattacttagcctctctgttctttagtttcctcatctgtaaaatgggcattgtaggggagcaaaaactggcttccctccagccttctaggttctttggctgggctatgaattaaattgacgagaggcggggcgcagtggctcatgcctgtaatcccagcactttgggaggctgaggtgggtggatcacttgaggtctgaagttagagaccagcctggccaacatggcgaaaccccatctctactaaaaatacaaaaatcagttgggtgtggtggcacacgcctgtagtctcagctactagggaggctggggcaagagaatcagttgaaccctggaggcggagattgcagtgagccgagatcatgccactgcactctagcctgggtgacagagtgagaccctgtctcaaaaaaaaaaaaaatgaggactggggtggaatgtgaccaggttacaggaaggtgaggggaggaagtgtaggtgaatgaaggttgtcttgttatgcagagaaggtcctgggtaataaaagttgccttggagcagccttcttcctgatacagatatggattgagcatacatgatcagaaaatctgatatccgaaatgctccaaaatctgagtttttgaagtgccaacatgacactgaaagggaatgctcactggagcgtttcagattttgaaagtttggatttgggatgctcgaccggtaagtataatgcaaatattccgaaacccaaaagattctgaaatctaaaaccctctattcgcaatcattttagatgagggatattccgcctgtacttgactaatgtagctttcctttgtggatgtaaatttattttacagaaggacaattttttttttccttttttttttttttttggacggagtttagctcttgttgcccgggctggagtgcaatggtaccatctcagctcactgcaacctctgcctcccgggttcaagggattctccagcctcagcctcccacatagctgggattacaggcatgtgccaccacgcccggctaaaggacagcttttcagagctactcccatgtctgcactttctgagaataaccagctcaaagtatgccaaagaagtggccgggcgccgtgtctcctgcctgcaatgccagcagtttgggaggctgaggcaggtagatcacctgaggtcaggagttcgagatcagcctagccgggcatggtggcgcacacctgtaatcccagctacttgagaggctgaggcaggagaatcacttgaacctgggaggcggaggttgcagtgagccaagatcgcgccattgcactccagcctgggtgacagagtgagattctgtctcaaaaaaaaaaaaaaagccaaagaagtatactttggggtagcccattctggtctcctacagtggtattttggggtggtatgtcctgagttccaacagcatcataatgatccctaagggagtgtaattgcttcaaacggtgcctgacacaggtcgacgccttaccaggacttgccttgttgtggtgtcaccctcacaacaactcaggatgggtgttgcttccattctgcaggggaggagactaaggcccccagggcttgcacagctggagcttatccggggcaggggcactggctggggtgaggatgtcctggtttcacctgtggtctggctgtgtggccttagagtggtggcttcacctcccttcacacctcagttacttcaccagtgaagtaactgtttgctatatatggtgggccgtcaagcctattggagggatggacagacagacaagtcagctgcagcaccaggacagggccactgaggaccaagggaaggaaccatgggacctcgggagggaggaagtgctgctggagaagtcaaggtaaaacccgttcctagacaactgctcacagccagctcgctcccctcggccaaacccaggcacaccccaagcagccacacccatcagggcaaacaggctgctgtgcttgcccggctgccgcagaagcacctgcctgggccttccctgcccgtgcccaccctcctctgtccccttaggccctgaacaaacagtgtgttcctgacccagcagcccctgcggagggccaggttgttctgtattggctttcgaatggctgggcccctggtgtcaggtgacagcagccacacagggagggccaggctgccgccactgccaggaatctgagctggccacacccagccagtatcgggcagagtggcccggccaggcaggagtgctcccccaaggtgctgggcagcctctgagggcctggtgcccaccactgcctccttcccaccccctgaggagtgccagggactcctcctcaggtcctagcccttgggcagggtcctccctggctgcaggcaggatgaaggccccactgtctctgacagccagcctttgcccactcgctccccttccgggacctggaaaggagtcccagagcccaggagagacgggccttctcccctactccaggctaacgttgcagtctggcggcttctgcaaatctttgctctcctttcccaacccccctgtcaaaagagttcattgttctctcctcccttggcagaggtcacctgagccaggtatcagatgtgggcggggccgggtaggctggatgccgcgcttcggaggccccagtggctgccaggcagctttggtcagcctcctggtttgaatctgaggagagatagctagggtcctagaatagctggggagggctggtcttggaattccttgaccacccaggggctatgccccgtcccgccctctgtcctgagtgcagccgcgattcagggttgctgtgtgtacctttgcaggaaggcagccctggggctgagcccaacctcctgtgctcaggtgggtacttccttttagggaggccatatgcactccctctaacagggacctggaactgttcctgaaccctaaacaaggggggagtcaccacctaagtgatacagaccttgttcagcagcagggaagctaagccttacaaggctggtaggagttgggggtgggatccaagggggtgggaagggcaccaaagtaaggggcggggcaggccgggcgcggtggcttacacctgtaatcccagcactttgggaggctgaggcaggtggatcacttgagtccaggagttcgagaccagcctgggcaacatagtgacacctcatctctacaaaaaatacaaaaattagccagctgtggtggcgcatgcctgtagttctagctactcgggagactcaggtggatcacttgagcccgggaggaggaggttacagtgagctgagatcgtaccactgcactccagcctgggcaacagagtgagaccctgtctcaaaaaaaaaaaaaaaaaaaaaaaacacacacacacaaactagggggcaactggggcacagccagaggtgcccatggagccttcgttctttccctgactggtttcctcaggacactaggccctgggtttctagcttctccctgtcccttctgttagctgctcttagtcctgttcccaaatcccaatcccttccctgttcccaacaagatcccttgggcttctcataactaacctagggctcccctgcctctctgcccagcccgagcccctgtcctcataggactgcctgaggaatcccctgggagacaggtcatttacacatgaaaccattctcttggccctgtccaggtagagtcgctgtgaaggtcactgcccttattttggttttaggggagccctggtccctccagagttgccaacttggagaagtgcccaaggtgatactatggaacaatgcgagcctcggaaggaagcagaggcctgtgtgtgctgcagggtggcctcagatccatcatctccaatccaaggacagctctgcccagtgcagtcaccagtaccatcccgtttattagatgagaaatgaagctcagggaggcccagcagctcatccacgaccagatgccttgtacgtggcaggaagggatacaaagcttagtgggtctgactcagtccctgttctaaatcagcctttggaaaagaaggtggggatgggggggaggggtggccacgataactccaaggcttgaagggaatgaggaatgaatgcgggtggttgaaggatgggcccaaccctttgtcttcctctgagttagaggaaagatgctgagccgaacaggagtagtgactctggtgaaatgttagaagaactgcccgcccttgacttgtggcctgagagcctagcaaaaagttacaggctgttttctctgtggcctgacgttcctgctggtgtgcggaattgtcgaggccaatgggaatataatatgagccatgtatgtgatttaaaatttcctagaagctgcattgtataattatttaaacacgtgaaattaattttaattatatattctggctgggtgcggtggctcacgcctgtaatcccagaactttgggaggtcaaggcgaggagatcacttgaagtcaggagttcgagaccagcctggccaacatggtgaaaccccatctctactaaaaatgcaaaaattagctgggcgtggtggtgcatgcctgtagtcccagctacttgggaggctgaggcaggagaatcatttgaacccgggaggtggaggttgcagcgagctaagatctcaccactgcactccaattaggtgacagagggagactctgtctttaaaaaaaaagtctagaagctgcattatgaaattatttaaacaagtgaaattaattttaatcctgtattccagctggtcaaggtggctcatacctgtaatcccagcactctggcactctggaaggctgaggcctgtggatcacttgaggccaggagtttgagaccagcctagccaacttggtgaaaccccgtctctactaaaaatacaaaaactagctgggcgtggtggtgtgtgcctgtagtcccagctcctcaggaggctgaggcgggaggatcacttgaaccagggaggcggaggttgcagtgagctgtgatcgtgccactgcactccaggcgtgacaggcgtgaccctatctcaaaaaaaaattatatattccttttaatccaacatatgcaaaatattttgacgtgtgattaactactaatgagattttttcagtttgtgtttttgaatgctcaatttgtgaaatctaggtgtattttacacttacggcacatctcagttcagacattaaatcttttttggaagtactagatctgtatttagaatttggatgatttacagtggaaaaagggaattcgaagcgtggcctgcctgagtccagcccctgttcttctagaacccgagttgttccagacatacttgaagggtttccaagaactgacttaatcctcattggtgacatgagccatactgcaagtgcttggtggccccatggggctcatggctaccgttctgggcagctcggagcatggggcctgctcctggccaggccattgggctcctgtagggcatttccaccagagtcctccaaattccagaggctgttccctgagctgcctctgctgctgggaaagtgctgctgtcctgggagacggctccggctgctgacttcctgaggccccagcaacctggggctggctgaggtctggtggggcccctgggggagcttgtcctgcacatcctatcccactgtctactccccttttcctgggaaatgtttacattccagacactcagctatctctatccagggcttctccaggctctgcatttttcgcatagctgaacagggacctgggctggcctgggggccgctgctgggccctatctgtccccctggctatcccatttaggtatgaccatttgcagggcaggccctgttcctagcaaaggccaggcctgaggcaccccccgtctcccccgacctttttgtctccaggcatcccccaaaataggcacttgttggagctctcctccctgcctgaccccagcatgggattccttgtgagagccattggactagactgactgatgggggaggcaggtagcaattgggtttgctaagctatcattgctagatctcatcagggacttctccttttctgctgctttgaggcctggcagggctgcaaagtaggaaagcccagggcctaaggaggctgcctcattgttgggacctttttctgcaagtcagagtctctgtggttgttttttaagtctttaaagcaatcagttgacatagcatcgctttgtgctgttctcacctagctctgcagggtcactatcccccggggtgggaggcgggggtcagattggggtaactgattaagaaactgaactaaaaaccttcctgaagatggtttatcactctaaatttgtagtgggtttatgttcatacctttcttaacccacaattctatccctgggacatctgccccaggaaatactcaagtggtgcagacaaagataggagtccaagaatgccatcgacatggttgttggattgcaaaccctctagcaacaaagtaaatactcaacaataaacctctggtgaattaggatatctacaggtaaagaatattctttagatgttttaaaagtcattttaggccgggtatgatggctcacacctgtaatcccaacactttgagaggccaaggcgggcagatcacttgaggtcaagagttcaagaccagcctggccaacatggtgaaagcccatctctactgaaaatacaaaaattagctgggcatggtggtgggtgcctgtaatcctagctcctggggagactgaggcaggagaatcacttgaacctgggaggcagagtttgcagcgagccaagatcgcaccattgcactccaggctgggtgacaagagcaaaactccgtctcaaaaaaaaaaaaaaaaaagccattttaggcagcttgcagtgactcacgcctgtaatcccagcgctttgggaggccgaggcaggaggatcgcttgagtctagaaggttaagaccaggctggacaacatgacgagtacctgtctctaccaaaaattaaaaagtagccgggtgtggcaggtgtggtggtgcatgcctgtagtcccagctacttgggaggctgaggtggaaggatcacttgagcctgggaggccaaggctacagtgaaccgaaatcatgccgtagcacccagcctgggcaacagagtgagaccctcaaaaaagaaaaattaaaaatttttgtcatgcctgtaatcccagcactttgggaggccaagatgggcggatcgagaccatcctggctaacacagtgaaaccccgtctctactaaaaatacaaaaaattagccgggcgtggtggcgggcgcctgtagtcccagctacttgggaggcttaggcaggagaatggcgtgaacctgggaggcggagcttatagtgagctgagatcacaccactgcactccagcctgggcgacagcgcaagactccgtctcaaaaaaaaaaaaaaatttttggctgggtgcgggtggctcacgcttgtaatcctagcactttgggaggctgaggtggacagatcatgaggtcaggagatagagacacggtgaaacctgtctctactaaaaatacaaaaaattagccaggcatggtggtgggcacctgtagtaccagctactcggaaggctgaggcaggagaatggcatgaacccgggaggcggagcttgcagtgagccgagatcgcaccactgcactccagcctgggcaacagagcgagattccatctcaaaaaaaaaaaaaatagacctgcaaacattcacaagtgcagaagactcgaaggatgtacacttaggttctagcaaggttacttctggttgtgggagtttgggtaatttttgttctttttttttttttttttgagacggagtctcgctctgtcgcccaggctgctctgcctgccgggttcgcaccattctcctgcctcagcctcagtttttgttcttaaacatctttatacctcccaggtttttcacagtgtgtgtgtgtattctgtaataaatgaaaaaaacacgtatgtgcaacgacactccaggaattccctttctgggaagatggttggaatttggtgacagtaagagtctgtgagacccagctgactggggcctggagggacctggaagagcccagagcagggcagggcctccgcggtactctaggcccctgggtgagcccggagctgcggtgcaaccaagattttctcccgagagaccggtgtctccattgttccaaactccccctactttccccaccccacacccataaggcccccatgccactgaggagggctgggtccgtcacccagggtgcacgtggtggaggcaccgagtcagttcctggaaagcattgagaggctggtatggtgtcggggaagatcagctcgcaggggtggccatgaggccaagggcagagtcacaaagggacagggggtggggcctggtaaatatgggttaggctccaacactcaggtgtctgggaggaaccggaaaggtaccgaagccctgcttcctgctgggtcgtctggtgctgcagctgcagcagccatggtggcgcgaaggggacaggtctgcaggcccaccccacgtgcttctcgttgcagacggtggagcatggcttcccgcaccagcccagcgccctcggctacagcccgtccctgcgcatcctggccatcggcacccgttctggagccatcaagctgtatcctccgtcccctcgctcccactcgggcagggccttggggtgggtgagatttggggagggacatcttttccttccttgcccgtgggctgttgggataaaatgagggactttcctgatttccagttttggacatgattttattccaaaatggggcaggtatggttgatggtggagcaggcacctgggcatgagtgcatccctggtgggatgcgaccctgtcctttgcaggaggacagtgaggtttgaaatggactgaggagatacaggcttattttgtctcctgtgtcctttcaggacccttcatgtggtctgctccctttactcagtttcccctctcacctattcctggaggtttcaggaatcccccagtcccgggcagggggtgaggctgctggggggctcagagacctgttttgcaggggttgtattggtggatccagagggaaggacctgacgcccatgtctcagccagtgatcattcagtgagtggctggctggtgcgccagtagcaaggcctaggcccttctgtgcccctgcctccctcagctccccacctcaccaccagaaaagcaagttacagggacccctcttgtcgctagggatgtttttaatttaaaaaaatttttttcggcactttgggaggctgaggcgggcagatcacttgaggtcaggagttcaaggccagcctggtcaatgtggtaaaaccctgtctctactaaaaatattttaaaagttatcagggcgtggtggcacatgcctgtaatcccagctacttgggaggctgagatgggagaatcgtttgaacctgggaggcagaggttgcagtgagccaagattgtgccactgcactccagcctgggcaacagagtgagactctgtctcaaaaactttttttttttttttttttttttttgtggagacagggtcttgtgatcttgcccagcctggtcttgaactcctgggctcaagcaactctctcgccttggcctctcaaaatgctagggttacaggcatgagtcactgcactcccagcctgcagttttgttttttaacctatctcgataagaatcagaggtggactggccccagggccctatccacaagcagagatggggtggccttgggccaggagagcagggctcggcagctgtcttccaaattccacccccactcccacaggcggcagagagtggagagggctctgcctggcagggacagtccttccccggcctgaggctggatgttgtccagttgggtcatcttttatccagagcactggttctggccgactgggggctcccagtgttttcagagatgaaaaaccggatcaggttgggcaccccgccagtctgatctgtgctcccctcagggcagggcccaagggagttgagagatgagggaccacctccaatagcttggctgccacctccagcggagcctgacctccctcttcccctctgcccggtgtgggggaggggtatggagcactcgagttccaggctgggctggtgtacacagggggccagggccttgctgcgggctcagccttccctcggctggttaatcattgccaggccacagccagactctagttaccaatccctggtgccaagactaatgggccaaggctgttggtgataggccccctggggtgccgtgtgttttttcacaggtgctaccaagcgacagccaacatgtcttttgcagctcaggatcagggtggcagcctgacagttgccagggtagggcttcgcctttctatggagttgctcccaccggcctgactgggaaaaatctcccagggatcaggtcactggcctggtgccccagggccagggctgctgtgtctcctccccaccctaggctccatgcatgggtcctgctgcctcgggggagggcagcccctctctgtgtttgcatcattgcacatgggccccgagggcctggcactcaaggcaggcaggggatggtgtccgaccttccagagctttcctgagcctactcctagctacggagccccaggcgtggagttcatggggctgcaccaggagaacaacgctgtgacgcagatccacctcctgcccggccaggtgagggacctggggtgggacaggaagccacttccatgccctccttgccttcactgcttccagcagggctggtgtggagaggctggcattcggtggccctgggtttgctgctgatggaaagacctgggaccccctccctttccacagctggggctcatgggccaccctgggagtggccagggggtcttttaaacaactggggctgcgtgg

SEQ ID NO: 722 - DNA, 20590 bp, Homo sapiens
  source 1..20590: mol_type = other DNA
acctcagcgggaagcggagacgcaagcagctggatctccggtaactgagacatagggtataactgttgtcgcggcggaggaagtgaggacggcgccaagggccttccgggccagtgttggatccctgtagtttgtgaagatggtgttgctaacaatgatcgcccgagtggcggacgggctcccgctggccgcctcgatgcaggaggacgaacaggtgagctgcttactcacgacccgcgaccccaagtctctgtcagcgcgctttgccctcagcatcggattccttcctaggaccgggagacctttgtgacttcccgggcactcccgacctctctgaagtgcgcttttatcttttggtgtaggagagactaccggcgaagaggaaatctttcctgaaggaggagttaagttttttgtgttagctgtttctctttagaaaaacgctctggagaagtggtagctttggttgattgtgatcacccagtgttctttgactctttagggactttgttaaaattcaggatttctaattttctgctgctaataggactgctgatggataaatcctgggaaaaaatcagccaagttcttcaagtctataacgtggcacctgatccttgacctagcttgctgacatcttttgaaagtgggtgaggtaatattgccacataaaagcacctgttaaatttcagtacatcacattctttcaggattatccccagttcccaccttctccaatacgccgtaccacattcctgcaatacattgtaacttatttttttctttgtctttcaataacttgagtttcctagcgggcaaacgacgggtcttaatcatctctttgttatccataccttttacaatagctgctttatgctagtaggtgctcaaaagtatactgaattgattaaaaacagcactaactccagatgtcttaaaagaaagatgttttgtgttttagaaacacagtggaaatttctgaagtaagacaagtttctggagcaagcttgggaggttctgaagacaaagctgagaatggaatttatataatttgtttaaagtgatcaattttattttacttttccatacagtctaagtaaaaccttgagccttaaaaaaagatgagatattgaaaaaatagtttgcacatttcttctgttggacttttcattcatatattaatgcaaaaaatttttactgagcacatcaaatgtgccaggcatagtgttaatgcagggagttagagtacacagtctctacctttgtggagcttacagtctagtggaaaaatcagataaccaacaaactattaaaatgtagtttaactgctaaggagaaggaagagggttttgtgcttgaacatggaaaatatatctaagttggttttaggaaatcaggaaagtcttcccagaaggtatgacactaaggtaacagtaggatccagtagtaaggaactattattctatttggttatatgcctttttaggtttgatttggaaatatagttactttcacttttaggagagtggtgatacagataataaagttgcaggtcatgctaagtgaaatatattctattcattacataaaaacaaagtctaatctttgaaataaaccgtgaacaatttaacataccccgatttgctaatgtgaaatgtttttcaggaatactctaggaccatcctgcagaaggagtgtaattgttcaaatgaacctaggaatatgatttgaacaaagtagatagtgcaggggaatatccttgaaggatgtgtagtttgactaaaaaatagttttcctacagtgggtggctgtgtgttgggggtaggggggatggaatctggtcaatttttaaattattgcattgaattccagtgttagcaaagaatacaaagtgaacttgaaagtctacttaatattagtggcccctactctctgccatgatactttattgaaaaattaattgatttattgttttttaattataaatttggtattggtttcatattggtttatcaagatgggatgctttgtttaattgacaaggaaagaaattttacacacaaatatttttgtgattgtagtgccatagtattttcctttaggaattttgactttgaataataaagtttgcctaaacttttaatgtctgtaaagatctgaatcttaggcttacttttactattttaatagtatacagaacatttataaaagcgcctactacataccaaacactgtgctaagcctattaagttcatttttttatttaatcctcatactaccatattagaacaggtactattaaaatctccaataatagataaggaagctctgaggcttagagaggatagatcacttgcctaaattcacagctaatgagtggcataatgaaatttttcatcagggtttttccccttggcactgttgacatttggggatggataattatttgttcttggggactgttctgtatattgtgtaggaggtccagcaatattcctggcctctaccctctagatgccagtagtaccactacccttccccactttgtttgtttgtatgacgacaaaaatatttctagacattgctaaatgtctcatgggggcaaaatcaccccaattgagacccagtggtttttattaagtttttgtcgactcagacaaaaacttaataaccactgtactttagtgcctaaccactgtactttactgccttgttctaaggccttttaatgatgtcttacctcttaggagtccaggaataactttttaataaacagatatctcaaccaaacagttttatatttaatcaccttaattgtccaggccagataattcaatgtattttcatttttgtatgtttttgttttcttatcagtgtactttcagtatttacactgataatagatatcatattttaggtatttactaggtgcctgtacaagctgccatattaccgaagatggacagttattcagataatacaatagagagtaaaatttacaaaataatgtagacagagtattttatacagggtgtttcctctgtgtttaactgaaaatttagacttagggcaggaagagagatgagcgtttcttctcaaatgtggactccctaactgataccctgtttatcttttttcctcattccttttatggcatgtttctccttttaggatttttgcaatttctttatctacctttctgttctgcctcaaaattattgtattttctttcattttcctctggcatcgtgaagggcagtccagacttgaagaaagtgttagatctcaccaaataggcagcaggaagctccaagaaagcagatagataacatgttatacagttaaattgtctcacgctcccaatcactgagggttgattaatccacttactgtaactgcttttagaggaaagtggttggttcttggtgctgctggtctttgaccagctgagttcagtgggtattgatacccactgaactcagctatgaaaatgataagagctatgaaggcaaaagttgttattgatacaactagttgttcagcagtcttaggtgacagcaacgaaaagtattgcggttgtgtgtcaagttactaccttctatcttttgtaatatatagatccaaatcctacatttgctgttggataacctcaaatttgtttcacagtttttccagttattctgatccactgcattattggattactaatagatatctcataatcatatcatatacaaatttcattaatcttttctagatgaagtagaaaacacaatgaggatatctaaatatttttaggtggactggctaactgtgggccctttgtgactttgatcttgaaagcaaactaaaggtcagtatgtaaaacagtggttaggttgttttgtgagatctagatcagagctgccccatggtttcttgagcatttccaatgagttagaattacatagtaagacttcacctaaaaggtggatctactattgaaacaatttcaattatagagttagggtagcataatgcttaggagtaggggctccagggccagattgcctgcattcagatcctagttcctccctttttagcttagaggctaaaaagtttgacttctcaagtaaaaaattgacataataattctaatcacctcatgaagaataaacgagttaaataatgtaaagtgttcagaacagtggctggcagaaagtgaacacttaataatttcatttgatcatttctgaagaatcttttctaattccatcttgcctttcttttttttttttttttgagatggagtctcactctgttgcccaggctagagtgcagtggtgtgatctcagcttactgcaacctccggtccccaggttcaaacgattctcctgcttcagcctcccgagtagctgggattacaggcacctgcaaccctacccggctaatttttgtatttttagttgagatggggtttcagcatcttggccagtctgatcttgaactcctgacctcatgatccacctgccttggcctcgcaaagtactgggattacaggcgtgaacccccatacccagcctcatcttgcctttcttaaaggttcacagatcagaactgcacataatcgatacactggatgcaaatatgtaatgaatgaatgatttttcacattacaaaattaatttgtgcgtattatagaaagttcagtaaatacataaaagcaaaatgaccaaaatgttaacagtgtttattaactataatctgtactcaaattatatccattttggtggatgaccttaaacatatgtatgtgtgtataacattaaataataggtaataccgtaagactgtttcacctaattttttccacttaacagtgtttaatgaatattttctcatatcattaaactctatacagcattgttttaatggctgcatagtattccattgtatgaatatgccagaaagattattatttaaccatgaagattgtgctagcattgtgttctcaaggatggtaatgctaactgaaccagcatggtaaggtgttggttggcataccataatccctataaatacatccccagtgttgtatattggcagtctttacattgctgtttgcaaattcctgaaattgcagaatgcttttggccagtttcttatagttgatacagttgttagtctttttctcaggttacagtaatgtttacagtgcctcttgtaaagtcaaaggatttgtaccaatctgagtggcaattttttccatgtttcttcaactagtccttttaagattctcacctgcctttagcaaagaacatatatttaacacctgtggttgcagttatgtaaaaaataccgatgtcacagccccacctccaagatgctgacttaattggtttggtggtggagactgggcataagtagttttgtttttgagatttccccaaatgattctattgtgaagccaaggttgaaaatcaccgatctatgttgatattctttcttggcacttgagtagcattcccaacattatttgcatgctttttatctactcttgtgggttcagatctcttcagaatggcactggggaaacaaaaagattggtaagtaccattcaaatttaggaaaatagaatattgggcactagttcttattggctaaaagcatatgacagtattcactcttactggctggccatatattagtagtactgtttaatatgataattttgatataattattataaagtactgtttaatatataaaactgtacatacatacagacatacatatgttaatatagaactatttctcaaatatataacaaatatatgtcaataaaacaaataattgccataacagtggtattaaacaagataaatctacaaactaatacctcgactggactctgcctatctcccctggttcacctcatgcttattcaccttcttattcatactgaaatttccagttcaccatttttacatatagcttagaatcttattatcctgtaattgtacatttgctgatctgccactttatcattttattgttgcttccttgtttttattatcagcttagcagtacactatctacaattttaagatatcactttgtactttatcaaagttagacctcagatcctgggagaccctagcataaatacttttctacttaaatatttagttattaaacatctgccaaagggaggctattctttctatgtaaaataaataattccaaaataggattatttctttgcatcacatggcagtgtcctagtctgggttactatacaaaataccataaattgggtggcttataaatgacagaaattgatttttctagttctgcaaggtgaagatcaagcaccagcagatttggtgactattgagggcctattcctggttcatagatgtcaccttctggctgtttcctcacatggtggatggagcaagctagccctctggggtctcttttataaaggtactagtcgcattcatgagggctctaccctcatgacttaatcacctcccaaaggtcccacttcttaataccatcactttggggggttaggatttcaacatgaattttgtgggggataccagcaaacattcagactatagctgggtagctggcagaaagctcccctaccccacatgtggatggaaaaacaatgtctatttgcttcccattcttcaggcacttcctttccctgttggatctagtagattggagatgcatggttttcttcttttgaaatgacactgctggtttttccagtagatttgccccctctttttaacaaaaataattgtaaaagcagttagaaattgttcaggaaaatattacctgtaattataacatgtgaatgctattattttcatttttgtctgcatatatccctcgatattcaaacttttgctgtccaaacttgggaaccaaatagatttcttcagtaaagggtatctgacatgctaatctttgtctctacccttggtcatttttatgtaattgcagtcaaagtgttcataataatttgcagtcactagtacacacatttagttttgtttaaatgctaaaaactgtaacacttgtggaaggttctgctggatattccaacataaaaatgaaattcaccaatcttgttcctaggatattcccctgagtatagcacatgctgtgtagttctgtgccaataactgcaaatgaaatgggttaggaggagagtactgtcctaatagtggaaagaagactggattgaaagttaagagtgcttaagtgtatttgaggtatatgcttttgcttcttagcaaataactaatgcgatcatcttgaagaagtaggggttaggtcttcctctgtactctgaaagtaggttgtctttcctccgttaaaatgaatcttacttacctgtaaatgaaggacctcattcagagtgtcctcataatatggtgcttctcactaattgatacagcattttgtggaaaattcttaaatgaagatgtcttctttcagtctggccgggaccttcaacagtatcagagtcaggctaagtaactctttcgaaagttgaatgaacagtcccctaccagatgtaccttggaagcaggagccatgacttttcagtgagtgtaatcttgatttctttatgatcatttaagtgtgaaatacagtaacagaatgcctgataaaaaataataatttttaaaaagtaaagattacttaaaaatgttgtcttttgggaggagcaacttctctggctctaattctacaaaatggacatcttgttggttttttcagcatgcttacagtaatttaacctgttaacatgtgtctatgctgtgcccatcatgcaataatagataacttcttgctttaggactgtcttggagccagatatgtgtaggttagtacccttgctcaaacatttcctaacagtgtaactttgagcagctcacataacttctctaagcctcagtttcctctataaagtagtgaaaataaacataggaggtttgagaggattgtgagggaatccgtgtgtattacttagcatcttgtctgacacacatgggaagggtcaataattattagttattattattttgaaaaaagaaaattataaaagataagagcatcttaatcagtggttataaacgatacagctgatagaggactcaaaggaacattattggattttaaattatctacaaataattggtatttaatgtttaatacatgccaagtttgaagctgacaaaatgggaaggattaaaaaggaaaagagtacaagagcatcagaggaaaataaaaacggattagttaaataatctttgctattttagggacttagatagtaagataacttaggccagggaggaagctgctatgtttacttttaaaaaacaaaacaaaaattctctacctataaaagacaagtaaaaagtacatcaaaacaaaaataaaaccctaggcaattggctaagaaaatgttggacattatgttttatgatgtattaatttttataatatctgaaatattttctagaactctaattttcaacaccaaaaatagtcactcacttaatatctagtatcctcattttcaccatggtttagagaaccaagacctaggaaagttctcatggaattgagaagagattttcttctgcctgattcctttaggacattcataatctcatatcatcctttatttccatccaagagctattaagggtttattctttgccggaccttatattgagtcctgcatttaatgtccataccttttaacactgttctcttagtacagagagagacatatactcaaacaagtatactataatatcttcattgaaaagatgttgtaaattagatttaaatgaaatgttttgggaacagagagaaggaaggaacaaattcccatttgtagggggtaagtttgaagaaacgggacagaggaggggagtatatttaaagaagtttcacagaaaaaattatggtagaattgaacatatggaaatgaacaggatttctccaggtatttaaaagagcattaatggttagaaaaaacaatataagcagaagtccacaaatatgtaaagaacctagcatgttggaaaacagtccgccatttggtttattaaaatatatgatagaatgttgcttacacttgttttgaaaggctgtaaatataataccatggagtatgattttattttgtaggtattagggaacccttagagtttgtaagcagggtaatatggtcatctgtagtctctgggaataaaactgatggtatagaagatggtgtagactaaaagcaaagagaccagttaactcaggtgcccaagcaaggaataagacagctgtattattaatattattttaagggacctgagagatcatataatagtctttatcctttatggagccctaggatgcctcaggagccacatagaaagggcaaggatgggagtatatataatgctttgggcccctaaactcctccttatgttttaaattttttccttttattttcagttgacatgtaataattatacatatttatgggatacagagtgatatttcaatacatgtatacaatgtgtaatcaaatcagagtaattagcatattcatcacctcaaacatttatcatttctttgtgttgtgaacattcaaaatcttgtagctttttgaaaatacgtggtaagttatagctagccatatttaccctacagttctgcagaacaccagaactcattcttcctatccagttgtaattttttatccattaacttgcctctgcccatcctccccttctctctacctttccctacttctaatacccacaattctactctctacttccatgagctcaaaaattttttttggctcctacatatgaatgagaacatgccatatttatctttctgtgcatgactgattttatttaacgtaatgtcctccagatttatccatgttgctgctaatgatagaaattcattcttttttatggctgaatagtattccatggtgtgtgtgtatgtgtgtgtgtgtgtgtgtgtgtgtgtgtgtaaaaaacacttttaaaatccattattctcttgatggacatttctcttgattatctatccatagatattatgaatggtgctgccgtaaacatgggggtacagataagtttttaacataatgagtttttttcctttggagaaatacccagcagtgggattgctagattgtatggtagttctgtttttagttttttgagaaacctccatactgttttccatagtgtataaaagttctcttttctcttcatcctcaacagcatttattgacttttgtctttttaatagacattttaactggggtgaaataatatgtcgttgtggtttttatttgcatttacctgaagattagtgatgttgagcattttttcatatacttggccattcgcatgtcttttgagaaatgtcaattctgttccttgcctactttttaattgaattatttttggttttgctgttgagttgtttgagttcctcgtatgttctggatattagttcctcatcagatgaatgaaactagatccctatctcatcatatacaaaaatcaacttaaagtagattaaagacttaagcataagaccctaaactataaaactactagaagaaaacataggggaaatgcttcaggacatgaacctgggcgaagactttatggcaaagacttcaaagcataggcaacagaaaagaaagtagacaaatgggactgtattaaactaaaagcttctgcacagcaaaggaaacaacacagtgaagagacaacttgcacaatgggagaaaatatttgcaaactcctacttaaactaaagaacctctgattttatctgatatatacattggccttctgaatataagttttgcttgttatatatacatattccatatataaatatatatatttgcatgtgtgtgtgtgtatactatggctaaaaagaagttggaaaaccacttagtagcctaacatttttctaagaatttctcagatgtgtaatcatatagccccttccagagtgcatgggcgctcatcatcacaaaagaaagtcagttccattgttgaaaagtttccagttgattacagagtcctcctggactgtaaattaaggagtcttattagtcttgtacccagtaaacattatgtcattaaccttacatttctatccacagaaatttccagttacagtgttttcctttgtggctggaaagagtttaaatatgtgtatgctagtttaccatatagaatcaaagggtggatggagtcacaactctgaatttttcaggaaaaagtcttaagtattaagcaaaaaacaaataaccccatttaaaaaatggacaaaagacatgagcagatatttctcaaaacatactagaggctagcaaactaatgaaaaaatgcacatcactaattattggagaaatgcaaatcaaaaccacaataagataccatctcacaacagtcacagggctattattaaaaagtcagaaaacaacagatgctgatgaggctgtggagaaaaaggaattgcttatacactgttcgtgggaatgtaaattcagccactgtggaaagcagtttagagatttttcaaagaacttaaaacagaactaccattagacccagcaaacccattaatgggtttatatccaaaaggaaacaaatctttctaccaaaaatcatgcacttgcatattcattgcagcactattcacaatagcaaagatatcaacctaggtacatgttagtggtggattggataaagaaaatatagtatatattcagtatggaatactatgcagtcataaaaagaaatgaaatcatgtcctttgcagcaacatggatggagctggaagtcattacctaagtgaattaatgcaggaacagaaaactaaatactctatattctcatttataagtttataagctaaacattgggcactcatggacataaatatactgaggacttactagaagaggagggaaggagggggcaggggttgaaaaactattaggtagtatgcttagtacttgggtgacgggattgtttgtaccccaaacctcggcattatgcaatatacccaggtaacaaacccgcacatatacatcctcaagctaaaataaaagtttaaaatgttagttgaagaattgtgtaatgggctgggtccagtggcttacacctgtaatctcagcactttgggagactgaattgggtggatcgattgaggtcacgagtttcagaccagcctggccaaaatggtgaaaccccatctctactaaaaatacaaaaattagctgggtgtggtggtgggtgtctgtaatcccagctatttgtgaagctgaggcgtgagaatcacctgaacctgggaggcggagattgctgtaactgagatcatgccactgcattccagcccgggtaatctgggtgatcgaaagagccctgtctcaaaaaaaaaaaaaaaaaaaaaaaaaaaaaagagaatctaatggatgaaaaattataataaatatgtctaaatactccttttagaatatacggctaataggctgggtgcagtggctcacgcctgtaatcccagcactttgggaggctgaggcgggcggatcacgaggtcaagatatcaagaccatcctggccaactaacgtggtgaaaccccgtctctactaaaaatacaaaaattagctgggcatagtggcgcacgcctgtagtcccagctgctcgggaggctgaggcaggagaatggcttgaacccgggaggcggaggttgcagtgagccgagataatgccactgcactccagcccgggggcagagcgagactccgtctcaaaaaaaaagaaaaaaaaaaaccaaaaacaaaaaaaaaagaatatacatctaataatgggaagatgtttgctttctgattccaaggatttgcggttttaaattgactctcgtttagccagcctcaaagtatttaggctagatttttaaaaaagtttgcatggtacagagattctgctttaaactattgtcagtgctattactttacagacaactttgtcttgctttttatgtctcaccagctacattattgagcagggggtgtgtgatttggttttatgtgaagctgccttccctaagacgttggcttttgcctacctagaagatttgcactcagaatttgatgaacagcatggaaagaaggtgcccactgtgtcccgaccctattcctttattgaatttggtaagtttttgcccctcacttctctctatcaagggagcaaacaatatggagaagctatttgttacactgatataatatttatacattttttctgatgtttacttgctgaagttttagcttctgcttccttttccattccacttctttttgtctttttgagtgactaaggctttgttctgaaaagtaattttctctagtcttttgatctttcccccatagaaattgttgccttttgccctttctgttatttggtttgattcttctttagagtcacatgtgacaggaactttgctaaagatctacttgattggcatataatggctgagttcttctttaccccagtccacagactcacactcacaataaggctcattttatggagatcagaattgggaaatcagaaagaatgatgttttgtttcttttagtagaataagatcctctaattaaaaaaacaaaacagaacaaagaaatagaagatacctggtactcatggtattggggtataatatttactacattcaggaatggtgagcataggtgtctgtatttgtacaagaattatagaaagactaattactaatcagacctggtaaagtatctgatggtaagggatcaaaggaaatgtcctaagtacagtaagtacagggagtgagaacaagtaggatcaggctatatcgctgcaatttttagttaaaagagaaattggttttactggcttagaatttttgaagtgtttcaagtttgctagataaatgggtcatcttgctttggaaaaacactctagtgtttcataactatatactctccaagtgctgctttatataatgtccagtttttcaaattttatttttatagacagtaatactcccataaacctccctcaaaaagaagacaaatgtatcagggtcatacaggaaacagatggcacacccaaattagcttaagggattatatacaaagatatgactaggctgtaggagaattacaaggtacagtaacctctgaccagtagcatactggttgttaccatccctaggcctgaatgtataagggggaggagcagtttctgaaactgaaaaggagaaaatttctagagaaggccaacttgagaggagcgtaacttttggtagagggatacttccagaagaaggttatttccttctctgaaagaagccaggggaataaatacccggacatcactcactgtctgttctccttcttccctactgttggggcttcttcattgcctgaacctaactggcacagagcaaggagtctattgaggcgcttcatccaagtcagcttcccagtgcagaaagcaaggtgcaggagggcagagaggagatctaaagaggcaaatgaaaggggtacagcacacttaaattaagatttttgccaaaagttgaaaatatctttaataataagtcgttcttcctatagttttgagaaatactgatatgagcaaaagatggatgagacttcagtttttatttatttatttatttatttatttacttagagacagagtctcgctctattgcccaggctggggtgcagtggcatgattttggctaactgcaacctctgcctcctaggttcaagtgattcttgtgcctcagcctcctgaatagctgggactagaggtgcacgctgccatgaccagctagctaatttcggtatttttggtagagatgggagttttgccttgttggccaggctggtctcgaattcctggcctcaagtgatccacccatcttggcctcccaaaatgctgggatttatacgtgtgagacacagtacctggccgagacttcagttcagttttatattggtattttggaaaactccctattacatacttgctttacctgaggtttaagaatggaatgaaactgggaatgtatattagagaaaataaggtaaagtttctcagctttttaatgatcatgagcccttttgccatgttaggctgtaataatgctagagtgttaccagcatccttttaaggaatgtgtagaggtaagtaacacttagcctaagggtcctcagaatactgtttgaaaatttctgttttcaggaaaggcttactatagtgggtcttaattcctctaaggattctgatagcagccttagatagcaaatacttctaatttaaaggtattcaaaggacatttctcctgaatggtcgtctaattatacctttacatcttacaaatgaaataatcaaagcctagattttgatattcaaccaagagtttggttaaccatggacagtggcaaatccaggaataaagtcagaactgttttggtttttttgtttttgtttttgagacagagtcttgctctgtcacccaggctaaagtgtggtggtgtgatctcagctcagtgcaacctctgcctcccaagttcaagtgattctcctggctcagcctcctgagtagctgggattataggcgtgtgccgccacgcctggctaactttttatatttttagtagagacggggtttcactgtgttagccaggatggtctcgatttcctgacctcatgattcacctgccttggcctcccaaagtgctgggattacaggtgtgagccaccgtgcctggccaactcagaacttttaatttcctacctcagtactttgatggccatgaaagaaatggtcagttttcttcatcattctagatactttcattcagaaaaccaagaagctctacattgacagttgtgctcgaagaaacctaggctccatcaacactgaattgcaagatgtgcagaggatcatggtggccaatatcgaagaagtgttacaacgaggagaagcactctcaggtatctaaaagcaatgagtcttatgaagaaatggttctcattccatagacaaggatagcttattttgcagtgccttttatgctattagattctacctagaactgttaagaatttatctcccagaagtacattacattacaatgcttccaatatattttttttcctagcatgattagtttttgttgagttggaacagtgtaaaggactcatccatattagaagcaatgattatttctaacatattcacaaaattaattaaattatataacttgtataaattaagggaaatgaatgagagaaaactcaacaatgtattgcagtggttttttgagtagcctctttgggagactttactgctgccagatcaatctttataaaatgccattttcatcaaagcattcctctctgaaaaacttttaaatctgggactacaagataagatccagtctgacttatttttccgtcagtcagccattgttattgagagcttgttatttgtaaggcgttgtgctctacatatggaaaataaggaagatgcaaatgtctgtcattctctagttcacaaacattcttctgtagccacaccagcttctttactatccttagtggtccttagaacagaatactgccttatgctggacctgttctgtatgtaagacctccataagaactgtctctttaaagaacctttctctgatccttatagcctgtatcacattaatctcttctgtcctttaaactcctaaagcacttagtaacataatggttttagcacatattacatgtatgtgtgtttacctaatttaccttaaatatatttattaaatacctcttaccatattaaatatatatttaatatatattaaatatatttccatataacataagtatatgtttcatatatttatattaaagtaggcaaacatatttggataattaaatatttttatataatttcatatatttttttgagacagagtcttgttctgttgcccaggctggagtgcaatggcacgatcttggctcactgcaacctccatctcctgggttcaagcgatcttcccaccttatcctcctgagtagctggggctacaggcatgtgccaccacgcctggctaatttttgtattttcttagtagagatggggttttgccatgttgttccggctggtcacaaactccagggctcaagcaatccactcacttcagcttcccaaagtgctgggattacaggcatgagccacaacacccagccctttatataattttaaaagtgtaggtaattaggtaaaattaggttaaaagtatatgtatatttacctgatatttaaatattacctaagtgtttaatgtggacatgtaagctctttaaagatagtgcttatgtattttatatctgtttcacatactccttatatatcccccacagaaatggtcacaaataggttccttaataagtatttttgaattcagccatgctatatattcattagtaagtgagttttcttttattatgaactacaaactttaacctttttttgagtagtgagcagttattcatttaccttcacactctttaaataccaaattttgagtgagtgagtgtgtaaggttttgtcatacagacttgcaattcctatatgggataaagtagactagcacaggaatttttcttgtatcactcatgcaagactctaaattccttaaaggcagggatcatgtatattttgatcactgttgtatcctcagcacttcacatggtgcctgtcacataaatatttgttaaatgacttctccaagcaatagctttgtctttatgttatcctgtatttcaaaacgttcatatataaattctctcaactatgacttgtttcatagggtctaataattgttcctctgctgagttattctcagcagatttagattcatttagcaaatgtttattgagcactaactatataccaggccctgttctgggcattcaggatatagcagcaaacacaataatttaaaatccctgtccagtgaagtgtatattcttgtaggctctgtaaaaagatgccctgtgcattgtcatggttatttctcagtccctgactcttcttccgtcactagatgtttttcttactcatgtgatcagttgctaattcagacgtggctgtcatgcctgtgttattaagtaacgccatgtttcccaatcaaaaccagtctctattaagcaactccaaatattccaaaagcattctttaaggaagaaacagccggattgcaaaatagttttttctgaaatttcaagaagtgaaaagtttgatcagaatttattatgtcaaatggagagtttgtgtttattattaaaatatgccctatattttaatatggtctagcttgtgtctatctggctatttctctaagtgtttagttaactgttataagaagataacaacattacaaatgtccttgggggtgaaaaaacttgccagaaaatactaaaaagcttaatttacttgcgtttttttttgtagtacttattgtattttagttacaactttcctatgtctattgaaatataaatcctgatagctttaacttcatagtagtctctactatgtggagaatcttagaaatgttagcagtcatcattgaagtatagcttaagactgtgtttggttaattgaattttctggttatctgagtttgttttacatggattatcattatcgtttttcaaaatataagagaatatgattcagaccattagaagattatgaagataataattattaacatgtaataattattataatttatcatgtgcaggcattgttgctcactttacaggcaatctcatgtacatacaactttatgacatagttactgttattatccccaattatagatgaagaaactaggttttaaataggttacatgacttgaccaatgtcacataacttgtacaggtgatatctgaaccaaagagtctgaggccagaacctgcacttctaaccaccttactatatagcctcaaaaattcagacataatctgatcagcatcatcagttaattagtatatgcaatgttagcctcaaaataaaaatgatgatttaagattcatggttgttgcagtgctgctcattttggttatttttaatgccttaatactttcggtaaaatacttccagggactaattaatgttttccttttttcctctttgacagcattggattcaaaggctaacaatttgtccagtctgtccaagaaataccgccaggatgcgaagtacttgaacatgcattccacttatgccaaacttgcagcagtagctgtatttttcatcatgttaatagtgtatgtccgattctggtggctgtgaaataatgaatacagtcactggtaagggagaacctagaacccagtaggtgtatattttcaggaaactgagctcacagagatgtgtattagaatccaagtggaacttctgcctctaaagaccttgcaagaaaagagatgtcctgaaaatgaaaggttgcacctcatttaatgaagcttaaccctatgtagaaagtctctttcgggggcagaggctttctctgggtgccaagccatatatattagggaatagtagattgttatttcgttttttccctcccagtgcattttaaaaacagcactggctggggcattctcattctctgatggagccatcaatgagatttaacttagtcaacctgtgctagcaacattctgaaattccttcaaagaaggcagtcctttgggaaggtgtttttttttttgtttttttgtttttttgttttttttgactctaatcaacattccttttgttggtgacatttgtgattttcagtaatctgagtttttgatggccttttaaacaagactccagtatgtgaaagttaattgctgtgctccacagatcttgtctattggcccctgtagaaagttaacctttgttgttttccttttataatttgcttattgcacaattgctttagggtaagtgaattatattaagatgccttgaaattatagcactccttgattaagaagctaaaatgtttctctcatttactccttaaacaaaagacttaaattagtttgggtcattattacttttattttgcagcatttggtttgttattagtgtaagagcaagtataggatatggagaggcccctggcttcatgagaacaaaggcaggcccaggttataattacagctttctcctgccccttctttactttctctaccacagttttctccgctgtttgttttcctcttgccacaatttgctaacacttaaaaaattttcctgcacccagtagtttcatatcctgtagacatcctcttaggacattctcaaatttcaaaataaaaaatattcatctatgtagttaattaaagttaaagtttctgcagatcaactactcaaactactaaatacatttacctgagaaaaagtc

SEQ ID NO: 723 - DNA, 25730 bp, Homo sapiens
  source 1..25730: mol_type = other DNA
ttcggaagaggcggagtcttcttccgaggaccattcggaagaaggcggagcctacctctcatcaggaccagtctgactgcacctgcatccttagctcagcgcatccccggagcatcttaagagctgagcgcagctgacaactaggggccggaccgtcgcaggaggcgtccgctggataccttcccccttccctgacctagagctctacagctgctgcctcggtactgaccgagggttcccagagctgtctcaccattgcaaaaacgttatagcaacagcctctgattacgacatggctgagatcaccaatatccgacctagctttggtaagtagactcgggaaaactaagcttgaggtggtcagaatggttgcaaggccaagggggcccagcggcagggcagagaatgcagcccagaccagagccttcaaaatgccagccccactaaaatcgggcctgtggtggtgggtagtgggtagtgggcagttgacagtgcatgaacttgagctatgggctgcagggactggcagggcctgagccacaccgagggtggggaagtccaggatgctaaaaccttgtatggtgcactgtcagcactgctggaggtgagaaacagcaagcgtgcggaggatgtgaacccctccttctgggggaggagaggtggggtaggccaagccctcccccttggggcacacagggcggtgccccttcctccccctcccattcctaagggctgcgggggagggaagtgacaagggggatggggcatcaagatggcagcttggagactgtgggccgtgtggctggcagccaggggaggcggcggcctctggggaaagaggggtgcggggtggggagcaaaaaggaagccactccttaagccggtcagctggatgctggggctaggaggaaacgtgagccctgcaagctccattccgcatcgtaatggtggggtccctccgatgctaccaaatggcgcttggcgctgctgggctgggggatgacgtgatgtctatttctgggcctcctggcagcgccgacgctctccttccggggcctttgttccctgtttccctgggccgccttttcaaaaagggggactgaccagcgttgatgctggcgggggcgcgatccaggccggagggggaggggcgaaagaggcccagcccgggggaggccgctttgtgtaccgcagaaagcattacgtcatttcagagcggctggtccccgacccagccctgtgggctccaagattagttttacactctctggagcagaaagtggagtggaaaatagggaagaaggtggcaaagacaagcttgagaaggaagttttttcctctttggggactcctgcagtatatgctaaaggagcaaacttcctgtgttatgctttcctgatcaaataaataaaatataattgccctgcttctccttgattcagtttagatgggggaagccagtgagagttgctgccaaagaaccttcttattccttcagggattctatccctcagacaatccagtaggtttgagcatcgggactccagtttttagggtggagacacaatccagctaggaaatggcttttctcattcctgaataagaggtacagtgaaatgagcagaatccagtgtgctctatcccctcagaataaggaagaagaaatcaaatcagatgtgttcagataactgatcttcacactcattaactacttgttctcacttattccacaaggctaaatcttgatggtattttttcttccacttcaccttccgcatctttattctttgagttctaagtttccaaaacaaaagtccctttcatgatcacatgagcaatccatgatttcttcctgttctttttcttcttattcccttccaacagattcctttctctaactgcagttccagaatccttgaaaaaaggagatggtgtggaacataatatagtgatttctcttagagggactattattgggaaagggaaaataaattatatcagcctgttacatactacattttatttaatcctaacaaataccctcgagtgtatgtattattatatatacttgccagacaaggaaaccaaagctcagaaataaaataacttggctaaagccaaacaaatgactaaaggtagcactagtttgtttttgtttttgtttttgagacggagtttcgatcttgttgcccaggttggagtgcaatggcgtgatcttggcccaccacaacctctgcctcctgggttcaagcgattatcctgcctcagcctcccaagtagctgggattacagacaagtgccaccacacccagctaattttgtatttttagtagagatggggtttctccatgttggtcaggctggtcttgaactcccgacctcaggtgatctgcctaccttggcctcccaaagtcctgggattacaggtgtgagccactgcacctggccaatgctaggatttaaaccaatgtctggctgaagccaaaatttattctcattccattgtattatatttgtctacttgactgcgaaaagctatgtttaggaaagggggtgtcaataaaagcagttctggtcagaagctgaaggagctggccaatagcccagatgtgtcttgcaggtctttaaaccattacagaggatctcctacatagagaactaccacttccaactttttcacatctcatagagtacttcatttcaaatgccacagcacttgggtgatacaccaagccaacactcaattatccatgaccatgaaggacaaaaggagcgagaagcacaggtcactgcaatttatagctactttaaaacactcacttcagccattagtttcaacttccatttcccaccaagctttggactaaagcaagacagagagctctaggttttaatatctttgatgattctagctcattgtcttggtttcagggagagaggcaagagttaacaaatactaaaatgaagaaagaacagcaaaaataggaaacaaggccagggggaacaactagataattcaaagatgcgttcatctgtttctcttcttttccttctctatcctcctggaatatgagaattcttcatcttctctcttttctaccctatctccattttctaacaataaaagttgatgcattgtaaatatgtaagcagcagtgggttgccccccgctcctccaccgcactgctgcagggaataaatctatgatagagccaaaagaattgcccaggtgtctcctaatctaagccttcagatctctctttatgatcattccaaaaaatatgcctgtcttggtagtttgctgtgttcctcttctcatagagacagtgttcagtttcactaatgagtagcaaacaatttgcaggaaagcacctgattgatgaatggagagccacttccttaggctgtgcccattcttaatggcaactgaatccaattagttgttcaaccaaatatttactgaactcctattagaagcaagagactcttgagggattcaaagatccataggatattgttcctgcctgccttcaagtagcttactaccaaggctgtctccattttgtgaaaactttccctaaaagctatttcatttaatactttgagactaaacactattattattcggtatggatatagacatggtcaccttgatttattttgttaataatgttttgctccttatctatattattttaaaatgtacccgggtacagtgggtcgtgcttataattccagcgactcaagagactgaggcaagaggatcttgaggccaggaattcaaaaccagactgggcaacatagcaccttgtctctaaaaaaaattttttttaattagccaggcatagtggcatggtcctgtagtcccagctattcaggagtctagggtagtaagattgcttgagcccaggagttcaaggctgcagtgagctgtgattgcaccactgcactccagcctgggccacagagtgagaccacgtctctaaaaaaataataacaataaatatatattttaaataaaatgtaactcttccttggttaggcatggtggcttgcacctgtaatcccagcaatttggtggagactaaagcagaattgcttgagcccaggagttcaagaccacctgggcaatatagtgaagactcatctctaaaaaaaatttaaaaattagctgggcatggtggctcatgcctgtaatcctagcactttggggggccaaggctggcagatcacttgaggtcaggagttcgagaccagcgtggccaatatggtgaaaccccgtctctactaaaaatacaaaaactggccaggtgtagtggcatgtgctggtaatcccagctactcaggaagctgaggcaggagaatcacttgaaccagggaggcagaggttgcagtgagccgagatcgcgccattgcactcaagtctgggcaaagcaagactccatctcaaaaaaaaaaaaaattaaccaggcatgatggcacatgcctgtagtcctagttcctcaggaggctgaggcaagaagatcatttgaactggggaggtcaaagcttcagtaagctgcgatcatgcatgccactgcactccagcctgagtgacatggtgaaattccatctctgcaaaaaatacgaaaattagccaggtgtgatggcatgtgcctgtagtcccagctactcaggaggctgaggcaggaggatcacttgagcccaggtggtggaggttgcagtgggccaagcttgtgccactgcactccagcctaggcaataaaatgagacgctgtctcaaaagaaataaaaaaagtaagctctaccacaatgcctggcagggacatataaatttacacaaaaaatagcaattttattattgtcactgctatacacaatattacatgtatattatgaccagtgcagatgaaattatacctgcctctcatgtaatctggacattatgctcatagtattgtgctcatgatgctcataggctttctagagaagataaacccttcatctaggtttggagggaagaaaaagccatggattggttggagaggataggagaggatacctctaatagaagggaaaacagtaggcattatactaattatagtccaagattgtggttgcctaaattcctaagtcatttttgactcatcaagtgaggttattgactataaataggtttttgagtccaaatagaaatttacatttatccctgatatatgtaatcatcttgactcaatccttttttttttttttttttttgagatggagtctcactctgtcacccagaatggagtgcagtagcacaatctcagctcactgcagcctccgcctccgaggttcaagctattctcctgcctcagcctcccaggtagctgggattacaggcacctgccaccatgccaggctaagttttgaatttttagtagagacagggtttcaccatgttggccaggctggtctcgaactcctgacctcaggtgatctgcctacctcagcctcccaaagtgctgggattacaggcatgagccaccgcaccaggcctcaatcctctctttctaatctgtggaggctgttttgaattcactgactcttttgttcactgaacgcttactacatgccgcatagttctaggacgtggaactatagcagtgaacaaaacagacaaagttgctgttttattaagcttgtctagtgatcaaagaaagataataaatatatgtcaggataataagctccatgaagaaaattaaggaagggtgatggggacattatcttacttggggcagacaggaaatatttccctcatccagtgaggttcggggctcacgataagtgaagcagtgagctgcacagatgcctgatacaagaatgctttaggccgggcgcggtggctcatgcctgtaatcccagcactttgggaggccgaggcaattggatcacttgcggttaggagttcgagaccagcctgaccaacgtggagaaaccctgtctctactaaaaatacaaaaattagccggacatggtggcgcatgcctgtaatcccagctactcgggaggctgaggcaggagaattgcttgaactctggaggcggaggttgcggtgagccgtgatcgtgccattgtactttagcctgggcaacaagagcaaaactctgtctcaaaaaaaaaaaaaaagaatattccagaaagaatcggggaaatgctggaattatgtctatttccttttcttttttttcctcgctctgttgcccaggctggagtgcagtggcacgattttaactcactgcaacctccacctcctgggctcaagtgatcctcttaccttggcctcccaaatagctgggactacaggcatgtgccaccatgccctgctaatttttgtaatttttttgtgtagagatggggttttgccatgttgcccaggctacatttatttccttagttctccctcccttccaagtggtcccctaaaaagtaaagtggaaaaaactataggcctaatctggacctttaaagcctaaacccaatttagcctcaatgaacttgagggagcgaagaaacttgagggtccaatttttgtgggaaaagataagactagggtaagggaaacaaaaaaaaaatctatttctctttctcttttttttttcttttttttttttttgagatggggtctcggtcttttgcccaggctggagtgcagtggcacgatctcagctcactataacctccacctcccggcttcaagtgattctcctgcctcagcctcctgagtagctgggattacaggtgtgtgtcaccacacctggctaatttttgtattttattttagcagagacagggtttcgccatgttggccaggctggttttgaactcctgacctcaggtaatctgcctgcctcagcctcccaaagtgctgggataacaggcgtgagccgccacacccggcctatttctgtttagttatttgttcatccaacacatagtgcctgctatgtgttttaagtgctgagggtacagccgtgaacaaaacagacataaatttttgtcctcatgagacttatattctagtgaagataaataataaattgtaaaataatatgcgtgtgggtgtttattcttacatatttgtgtatgtattttatatatttttttcttacatgtgtaggggtgtgtgtatcagagagcgagaatgacggcatgttgaaaaaaattaagcaaggctaggaagagtgggtggtgaggatggagaagattgcacttttaaataggtgagtcaggaaaggcctaagaaggtgacatttgagcagagatctgacattttccactaatagggaagaaaacccctatttcttccagtgaaggatttattaaggtaataataatgaaaagagaaagtctctatttcttcctatttagaataatatatgtatacataaatacatatatatacacacacacatatatacatatatacacacacatatacatatatacacatacacacacacacacacacacacacatatatatatatacatacatacacacacctatttttttgcctacaatggatatattcatcctggaggaatacctttttttttttgagacgaagtcttgctccatcacccaggctggaatgcagtggcacgatctcagctcactgcaacctctgcctcccaggttcaagcgattctcctgcatcagcctcccaagtagctgggattataggcacatgccaccacgcccagctaattttttatatttttagtagagacggggtttcaccatgttggtcagtctggtcttgaactcctgacctcaaatgatccacctgcctcagcctcccaaagtgccgggattacaggtgtgagccactgcacccagccttgtattttatatacctgggagctaaaattttggaacatattttaaaagtacataaacccagaattcttccttttggcacccatccatttttactaccctgaacaccctaccaagaccatctaaactcatctccacacccttccaccctagcctgacagcgagtcagtcagtgcaggccctgttctggatgctatggaatatcctgaaaccaaacatcttgtgtaacagttgaagtgaacaggtgctcatgtaaaaaggtgatcttagaacacgtacagagcagctttatgtgaagcacaaatcagtatgagcaaaccaagtctataagtgctgagagaaggtctaggaaagaacatagagtcaagtggggtgcttcagagaaggctttctatagaaggctgggaggaaaagccgtggagtggttggagaggttgggagagggtgcctctaatagaagggaaaaattctgaagcccagatgagcacattttgctttagaggctagattgaagattagcttggctccagcagtggcaatgagcaggggagatctagacaggaggtgaagtccacccgccctgacacatctctgatctccgccttcagatgtgtcaccggtggtggccggcctcatcggggcctctgtgctggtggtgtgtgtctcggtgaccgtctttgtctggtcatgctgccaccagcaggcagagaagaagcagaagaacccaccatacaagtttattcacatgctcaaaggcatcagcatatacccagagaccctcagcaacaagaagaaaatcatcaaagtgcggagagacaaagatggtcctgggagggaaggtggacgtaggaacctgttggtggacgcagcagaggctggcctgctaagccgagacaaagatcccagggggcctagctctggatcttgtatagaccaattacccatcaaaatggactatggggaagaactaaggagccctattacaagcctgacccctggggagagcaaaaccacctctccatcatctccagaggaggatgtcatgctaggatccctcaccttctcagtggactataacttcccgaaaaaagccctggtggtgacaatccaggaggcccatgggctgccagtgatggatgaccagacccagggatctgacccctacatcaaaatgaccatccttcctgacaaacggcatcgggtgaagaccagagtgctgcggaagaccctggaccctgtgtttgacgagaccttcaccttctatggcatcccctacagccagctgcaggacctggtgctgcacttccttgtcctcagctttgaccgcttctctcgggatgatgtcattggcgaggtcatggtgccactggcaggggtggaccccagcacaggcaaggtacaactgaccagggacatcatcaaaaggaatatccaggtgagtaggaagtgtgtgttggggagcaatggtaggttgggggagaaaatatctcaggggataaatggaagtgggaggggagtgggttgggtggcaaagaagggctgtagagaggaagctcttggatgtcaaggataagcagtggtcagagtaagacagagggcctggcagatgaggtctcctctaagaagcaacttcctggtgagagaaggttcaatagctttcaccatttcacttagtggttggcatcctgatgctgtccagcttacttggaacaggctggcctaccatttgtagatccttcattatatcagggatatgggagctaatttcctctccaaaatgatgtgatcttcctccagtgaatttatttttcacagctgagaagctatgacaataattcagtaatttttccctcagcttccctttcccaaccctaacctaggggtgtaaatgataccatgtacatgtcttttttttttttttttttttttttgagacagagtttcactcttgtcgcccaggctggagtgcaatggcgcaatctcagctcattgcaacccccaccgcccaggttcaagctattctcctgcctcagcctcccgagtagctgggattgcaagcacccatcaccacgcctggctaattttttgtatttttagtagaaacggggattcaccatgttagcctggctagtcttgaacttctatcctcaggtgatccacctgcctcggactccaaaagtactgggattacaggcatgagccactgcacccagccgtcatgcacatgtcttcttatgaccattttacaatgcaattcaatgaattgcttcacccttctaggcccaaacctttgccatagacacttcccctctctccatttctcctgtcctccctctttgtattagaagagggacgagggccctccatcctgccttctctctccctcttcccactggaccgacattggctcttgagttgtaatttcaggagcacagtaagtgtagccccacccaaccccattagttcatttatttcttccacaactggggaggcagtgaaatgctgcagttaaacacttgggctccagaattggactgcacgactttactctccagcttaccacttgccagccgtgtgacacgggtgagttactcgacccctctaagcctctattttgtcatttgtaaaatggagctgataatattgtcttccttacagagaatcaaatgagataatatgcctggcatatgattgcccttgaagaggtttcactttattgaaggagaaagacaaatattttttgtaattactgtatagtgagtatggtaggtgctatgaaagaagttgttgaaattttaaacttagagtttcatgtctttttcagggtataacataagtggttaaaatagcaaggactttgaagtcagacctgagtttaaatccaaattccaccagctaaatgaccttgggcaagctgcttcactttcgctaagtctcagtttcttatgggaatagagtaggatgatgattttatatagctactaggacacagtgagccttcaataaattgtgaccgttactattattgttattcctattattagtcaagtttgatacctgggtgatgcatgtggtttgtaaatatttatattttgttttgacacagtgaaggaagacaagggaggaattggtgaaggaggttaggaaagaatttcgaggccactagaaacaactgcacatctcccagaaagagctctgcctgtgggcagatcatacttatttcttgataccttttttacctgcaagtcctcactggactcagtgggtagacaggaggctcaggactggatagaagaggctcctaagttagcaggtgcagagtgtgcagtgagtacccaggaacaaggtttgcctgctgaagaagggtactgtgccaagtctgggtgggggacagcagggagcacactttgtgtgtgtgtattcttgccttctctgctctgtagtaggcacctgtccccctgcagccagcccggtcctgcctttcattgcctgaaggaactgctactgccacctggcacactcagatccatgtcacaggggccagggaagtccaagaatcttgaagaatattagacacatttgtgattgtgatttagggtagaggtggccctcaggacatctggccccaagaagggtttattgaggttatgttcatccacctaatacaagggctccttggctagaaaatcactctgaaagaggttctgctaattataggaaaacttggtgaacgtcagagcataaacaagacactgccacaacatcttgtggttctcaatgccaggatacaatgagacatcccagagtccagccctgaaggggttttcgcatcctctgagactggaatcagaaggtgtgaatagaaatggaagcagtggcctgtttcatccccttctctcccctcccctgtcccatcttttttcctcagggctctgccgacccattctgctgtttccgtattcccttcacagcagctcccatcctctactccttcccttgtctacctctccttgaaggaggagcctttccaatacacccttccctgtgactccaaccttggtaaagtcaccaaccagctggactcctccagacagctatacacttgcagcccaaggctgggagtagaacatggctctgtgccaagctgcagctgggaagagactggcaatgaaagggactgatttgggctgggaacaaaacagcctcaaatcaagggcactggacacagcacagacaatggcatttgctaagctgccaggggctcttggcaagagccacatttctttccactttattaactcccttgaggagggataagccagggctaggatcctgagcaacacatgccctggagaaggcccgagataggttacccagagcctgtgcagccccaccctagagccttccagcctcccaggcttcctaaacccattttcccaaccagtgcccgtaggcaggactatgttccatctgagccatggctgtcatctccctagtcactcatccactaggttccctagaagtgcaggctgcaaatgtctatcccaaatcctccctaccatagcaaagtaggatctctccttggtgaacgtcagctagagctgccctggaccatgccacactggctgtaaagggctttttcctggtctggattacatagaccaggaaaaagctactgcactctagcctggatgacagaaggagaccctgtctcaaaataaaaaataaaaaataaaaaataaaaaaataaaagaaaatatggccaggcacagtggctcacccctgtaatactagcactttggaaggccaaggcgggaagcccaggagtttgaggttgcagtgagctattaccacaaactgcactccagactgggcaacagatcatgtatgtgtattgcagggaggaaaagggggatgggattgaatgttaaggttttgttttcccatggttgtgatttaggctagaggtggccctcaggacatctggcctcaagaagggtttattgagcttatgatggtccacctaatacaagggctccttggctagaaaatcactctgaaagaggttctgctaattataggaaaacagactatcccttgcctaagtattatttcttctgagtgtattctttaggaccactgttcctgttcctctgttccactgaaggagcaaggagattgccctcagagagccgagccccgcagctctgtcaggcatgagaaaatcctttctcccccttgtccttctgcttgcctgccccccaacagggcctttgcctcactaggccaaggggctgggaaacagagcttgctcacagccttcaatggctctttcaaaagaaagagccattgacatagctacttggaatgggaattgggtagaaagagaaagggagggagcttgagggaatgacattaaattgccttcaatgcagaatggagtggcattcaggtggtgttgtggctacagacttgggcatcacaaagcggcgctgagtggggatgggcatgctgcccgtgtgagatggcacaaggtgaaggagggatcagatggaggacagttgcctgaggagtgattttaagggagaaaaaaatgaaaagggtaaccagaagttgtcaactttcccaaaaaactaggaaagaggcatggggattttgattaggaagattttcctagaatggatgatttaggatacagaattttaaataagtaatcgggaaacctaagctataatcttgtcattcgtgttattcttgcaaataaaactgtgcttttaaaatcagatgtcggctaggcgcggtgtctcaggcctgtaatcccagccctttgggaggccgaggcaggcggatcacaaggtcaaaagattgagaccatcctggccaacatggtgaaaccccgtttctactaaaaatacaaaaattagctgggcgtggtggcacgtgcctgtagtcccagctactcaggaggctgaggcaggagaattgcttgaacccgggagacagaggttgcagtgagccaagatcacgccactgcactccagcctggcgacagagcaagactccgtctcaaaaaaaagaaataatgaaacgttgcttttcccccacctatccttcctctgtatataaagttagaatcatatttaaagactgcatatttagtatttagatactcagtattgaaggatggccccagaaatggatatatcaaacctagctaacattttattattattcatggaaacagacgggagcagtagccaaaacaatgcaaaagtcctttctagatcagtgccgtctaatgatgatagaaatgttctatatttgcaccatgcagtgtggtagctactagctacatgtcgctattgagcacttgaaatgtggctagtgtaactgaggaactataattttaattttatttaatttaaattaaaatgtaaataggcacgtgtagctagtggctactgtattggatagctcagttctgaatgttttggaatccattcaattttcttttccatatgggattacttttcatttgatgtggctaatagtaaaaatgagtttatattcactgattacattctgatttctggcaaaaggaaaaagcccagaagtatactggttggcaagagcaaccagactgtaattcaaaactggctgagggccaggcatggtggctcacgcctataattccagcacttaaggaggctgaggtgggcggatggcttccactcaggagatcaagaccagcctggccaacgtggcggaaaccccagacatggtgattcacgccggtaatcccagctactcaggaggctgagacaccagaatcgcttgaacccaggaggtgggggttaccgtgagctgagatcgtgccactgcactccaacctgggtgacagagcaagaccctgtctcgaggggaaaaacaaacaaaacaaacaaaaacacattggctgagggaccaagcatggtggctcacacctgtattcccagcactttgggaggctgagacggatagatcacttgagcccaggagtttgagaccagcctgggcaacatagcaaaaccccatctttaccaagaatacaaaaattagctgagcctggtagcacatgcctgtagtcccatctactcaggatgctgagttgggaggatcacttgagccctggatgtcaaggctgcagtgaatgcacaccactgcactccagcctgggcaagagagtgagaccctatctcaaaaataaaaataaggccgggcgcggtggctgacgcctgtaatcccagcactttgggaggccgaggcaggcggatcacgaggtcaggagatagagaccatcctggctaacacggtgaaaccccgtctctactaaaaatacaaaaaattagccgggcatggtggcaggcgcctgtagtcccagctactcaggaggctgagccaggagaatggcctgaacccgggaggcagaggttgcagtgagccgagatcgcgccactgcactccagcctgggtgacagagcaagactccgtctcaaaaaaataaaaataaaaataataaaaataaaataaaactggctgaggatactttccatggatacgattaagagctgacaataggccgggcatggtgactcacgcctgtaatccccgcactttgggaggctgaggcaggcagatcatgaggtcaggagtttgagactagcctggccaatgtagcgaaaccccgtctttactaaaaatacaaaaattacccgggcatggtgacatgtgcctgtagtcccagctactcgggaggctgaggcaggagaattgcttgaacccaggaggtggaggttgcagtaagccatcgcaccactgcactccagcctgtgtgacagagcgagacttcatctcaaaaaaaaaaaaaaaaaagctgacaatacatatgttatgggtaaggacaaaatgtggggcttctctctagcagagaaaaaacatgaaaatatttttaaagttgatccccttttgtatttcaatttcaaaagctaaggagtgggtttaaaccttggttagattttttttttttctgagacagtctcactctgtcgcccaggctggagtgcagtggcacaatttcagctcactgcaaactccacctcctgggttcaagcgattctcctgcctcagcctcctgagtagctgggattacaggtgtgcaccatcatgccccactaattttttgtatttttagtagacggggttttaccgtgttggccaggctggttttgaactcctgacctcaagtgatccgccctcctcggcctccaaagtgttagcattacaggcgtgagccaccatacccagcctagttagttattttttatgccctgtgagagacatttccatatgctcctaggacgaaacatagactcaataaatttttaaaatcatgtgaaatatcacagtttcattcctggagatgacttaaggcctacaatcaaagcacaaactattaggcttatttcttgttttttattgatgagttaattggcatatttgctgccgctgttctttcctgcaccagacatacctgagtagatagtgaactagcctgggagcttcttaagggtaggattcctcagtatccatcttttcagccctagcttctagcagagagtgcctggcacttaataagtgcctaacaagtcatttttgtgggtgtgtggtgtatataaggttggtgatgagcatagtctatttttgctcaatttaagaattcctggagtagatgacatttctttggggctttgaagaatacaaggaataagggtgattgtgggggtatgattttgtcccaaatttaacttattatgttctacattcctcaaaactcacctccctttttttttttttttttttttttcttttgagacggagtctcgctccgtctcccaggctggagtgcagtggcgcgatctcggctcaatgcaagctccgcctcccaggttcacgccattctcctgcctcagcctccccagtagctgggaccacaggcgcccgccaccacgcccggctaatttttttgtatttttagtagagatggggtttcaccgtgttagccaggatggtcccgatctcctgacctcgtgatccgtccgcctcggcctcccaaagtgctgtgattacaggcgtgagccactgcacccggccaaaactcacctccttttgttttctttatcccagcctcatccccactttctaaagctaaaaacacaagaaatagtccaccctttcctccctcttccctacgcttcacagccaattaactgcccaagcctaaaaacccctgacaattcttcctgagacatattttacctccatgtccatctcctctgccacagccctagttccagtcccaatcatttcttctgtagcacgttgctacagaacaacgaagtctgcttttttgagatggagtctcactctgtcgcccaggctggagtgcagtggcgtgatcaaggttcacctcaacctccacctccttggttcaagcgattctcctgcctcagcctcctgagtagctggggttacaggcgcccgccaccacacccggctaatttttctatttctttttttttttttttttcctgagacggagtcttgctctgttgcccaagctggagtgcagtgactacaatctcggctcactgcaagctctgcctcccgggttcacgccattctcctgcctcagcctcctaagtagctgggactacaggcacccgccaccatgcttggctaatttttttgtatttttagtagagacagggtttcaccttgttagccaggatggtctcaatctcctgacctcgtgatccgcccacctcagcctcccaaattgctgggattacaggtgtgagccactgcgcccggcctaatttttctatttctagtagagatgaggtttcaccatgttggccaggctggtctcgaactcctgacctcaggtgatccacctgccttgacctctcaaagtgctgggaatagagtcgtgagccactgcgcccagccacagcagcttctttttgacagggtctcactctgtcaccaaggctgaagtgcagtggctcaaacacagctcactgcagcttcgatctccggggctcaatcagtcctcccaagtagctggctctataggcacacgccactgcgcccagctaattttttttttttttttttgagacagagtctcgctctgttgcccaggccggagtgcagtggcgcaatctcggctcactgcaagctccgcctcccgggttcacgccattctcctgccgcagcctccccagttgctgggactacaggcgccagtcaccacgcccggctaatttttttgtatttttttagtagataccaggtttcaccgtgttagccaggatggtctcgatctcctgaactcgtgatccgcctgcctcggcctcccaaagtgctaggattacaggcatgagccactgctcccggctatagcggcctcttaactgagctttctgatgttggtcttcctcgactttagctcattttccacctttctctgaaataataataattttaataaaatgatgacaactggccaggcatggtggcttacacctgcaatcccagcagtttgggaggccaaggtgggcggattgcttgaccccaggaatttgagatcagcctgggcaacatagtgagaccctgtctttacaaaaaatacaaaatgtagcctggcatgttggtgcacacctgtagtcccagctacctgggatgctgaggtgggaggatctcctgagcccaggaggtggaggttgcagaaagccgagatctcaccactgtccttcagcctgggcaacagagtgagaccctgactcaaaaaaatgacagctttgccactcctatactcaccaacctcctcttgtatgggtgctgctgactctgctctttggtagtgtcccaacagccctttactctagccttgcccacctttccaggttcctgacctacccctcctatcagccacccccacttcaggcatattcacctctcaaccattctctgaacacagcttaccttttcaggcccaactcctttgtaccagccatttctgtcaatctgcctgatatgatcatccctctgcccattgcttcatggttttgtacccccatcaactcagtccaggcatcagctggtaaagccttccctgaatctccatggccgggcgcggtggctcacgcctgtaatcccagcactttgggaggccgagacgggcggatcatgaggtcaggagatcaagaccatcctggctaacatggtgaagccccgtctctactaaaaatacaaaaaaaattagccgggcgtggtggcgggcgcctgtagtcccagctactcaggaggatgaggcaggagaatggcatgaacctgggaggcggaggttgcagtgagccgaggtctcgccactacactccagcctgggtgacagagcgagagactctgtctcaaaaaataaaattaaaaaataaataaataaattaattaattaattaattaaaaaagcctcccctgaatctcccagctctaggtgcccagagcacttagacaggcttctcatttctctgacaagtcccgcacaggtttatttacttctctgactcttctactaagtggtaagctccttgggagcaacaactgagtcccatcagctctggatcctcaaaacctggcatgcagtgcctatgaaaatgttctttaaaatgttcttggaggggccaggcacggtggctcacgcttgtaatcccagcactttgggaggccgaggtagacagatcacttgaggtcaggagttcgagaccagcctggccaacatggtgaaatcctgtctttactaagaatacaaaaattagccgggcatggtggcgggcacctgtaatcccagctactctggaggctgagacaggagaatcacttgaacctgggaggcagaggttgcagtgagccgagatcacgccactgcactccagcctgggcgacaagagcgagcctctgtctcaaaaaaaaagttattggaggactagaggttttttcaagctcaaaatggagcctagcatcacatttaaagatggagaaacaaagatcagggtgctggggaggaagctgacttggctggagaagatacactggagtgcacattggggtgggcagagcaggtgtggatattcaccctgtgaaatgcagggacaggttcagggacttgcccaaggacatgtggtgagtaagtggcaaggttaagattcaaacccagttctcctacctcccactgtacagtcttcagaactttttaaaggataagaaccaaatgagaggatgcacttctatagtgcgcactatgtgctgggcaccattgcagtttacaaattttaacttatttaatccttctgataatgctatgtggtaggtacaacctttcacccacattttataggtgaggaaactgaagtacagagatgttgagtaacttgtccaaggtcacagataagaaatagcaactgggcatggtggcttatgcctgtaatcccagcattttgggaggctgaggcgggaggatcacttgagaccaggaattcaagaccagcctgggctacacagtgagactctgtgtatagaaaaaagaaaaattagccagatgtggtggcacacacctgtagtcctagctactcaggaggctgaggtgggaggattgctagagtccaggagatggaggctgcagtgagccaagatcacgtcactgaattccaatctgggcaacagagtgagaacctgtctcaaaaaaaaagagaaatagtcaggatttgaatccaggctaatctggctccagaggtcatgctcataaatccaaggctatgtgggctctccatgcaaattatttaatatcagaattatggttataatgtttcctttctccctccttgttaaataaaatcataacacctttccaggggatgagcatctttccaaaaaacttatcatccctgcacttgtcctcccccagactcttcccactgctctgcacactttttgtgctctgccctgcaccctctgccaggattctcacctgccattttttcctcacagaagtgcatcagcagaggggagctccaggtgtctctgtcatatcagcctgtggcacagagaatgacagtggtggtcctcaaagccagacacttgccgaagatggatatcaccggtctctcaggtagcagctatttacttcaacctatttcttactgtctgaaccatccccgactccttgcctgtggcccagatagacctccacacttcaagatccttgcctctttcacttttaatctgctcctctttctgtagacattctcttcctgatgagtatctacgtccaatagatttccctggctaggaagattcttcagttgaacaaatggggtctttacatttggcaaggtatcctaaataatattcatgccaggtgctaagagagacttctcaaaaaggctgcaggcatttgtctctgtgccctttaatatacttcttggtatcatgggatttcttcagacctaacctgagaaagttgttctgttctattcctgcttggtttccttggcccctcatccaggcaggcagactcacatatagtcagtgtgtgtttattgtgcaatcactaaagaacacatgggatggccatcaaagatacgaacaacagagccccccctttcccaacatgaaattaccattacataggagaggactgtgtcataggtctgtctccctttttcttatctctttgggggccccagatccttatgtcaaggtgaacgtctactacggcagaaagcgcattgccaagaagaaaacccatgtgaagaagtgcactttgaaccccatcttcaatgaatctttcatctacgacatccccactgacctcctgcctgatatcagcatcgagttcctcgttatcgacttcgatcgcaccaccaagaatgaggtggtggggaggctgatcctgggggcacacagtgtcacagccagtggtgctgaacactggagagaggtctgcgagagcccccgcaagcctgtggccaagtggcacagtctgagcgagtactaatcctgttcttctctcctctaatccccgggggccaagctggggagggatgtggaggggaaaaagatgacagagaagtggactccaaacctcattttagttgtagaagaaaatttcttacaaaacaaattccacaaagaacaccctatatgaccacagctgcagatcagttcttagcaatgatgtttttttttctgctttgcaaggcgctagaatcttttattttactttattttttttgaggtggagtttcgctcttgttgcccgggctggagtgcaatggtgagatctcaactcactgcaacctctgccctccaggttcaagtgattctcctccctcagcctcccaagtagctgggattacaggcacccacgagcatgcccggctaattttttgtattttcagtagagatgggtttcaccatgttggccaggctggtctcgaattccagacctcaggtgatccacccgcctcggcctcccaaagtgctgggattacaggtgcgagccaccgtgcccggcctctggttttgttttgttttttttttttaatgggggacaaaagagagggaaagacccctataaatctatatataacaatgtaaccatatacttgcatgtctaatacaaactgaagaaattagcctaactgccaatatcaagttgcagattttaatccatggaaattgtgttttgtgctgaattgtatttgctgattacctgaaattggcttctttttattgggcttctctggagaatttctcccactccccacctctgcagaagaaaattttgctcttataaaacctcatgttttcatcattcccatcttttctttttattgcctcttatatctctgctctttgacctcaaggtctagaggtctgcagtaagccaagaaacaaaggtggggtggatgaggcaaggtttgcaggagaaagaggaattgagaaatggggtatttttgctatcagctcttctgctatgaagtagtaaaaggcagtctataattaactgacagacctaactgaagcacagagaatacatcagacttatgcatccaagacatcagaacttggattttatcaaacttgatgacttctctaaaaggagctttggaaacttcaaattcagctataggatagtaccaatgaacacatccagctgatcccaaaagctgttttcaggtataaggacaaggagaggagacaagtgacgacagccattcccctttgcagctatctactgtagtgacagccatttcttggttgatgggttggaagtcatcagaggtttgaagaattacactggcctttgtttttctggaaatgccgaccatggagatgctttagagtcttctcaaatagcttagatgttgtaatgaggttagctttgcttcataaaacaggggccctcagaagttctccttaaatttttcaataaaaatttagctcttaaaaaaataacagtgtgactgagtgaatgaagataagttggattctttcagagcattcttttcctcaaaacgagctgcataattcttggaatttatgtcttaccacatggtggagggatggaggaactacaggatgcaattcttcttctaccaatgggcaatagaggttgagagagattcagcatctttctgggattagaattcaagtctctttactcctacagcagctgtgtctccaacgttgagactttgcagatggcacagactccatggataataggtaaacttggggccgggcgcagtggctcacgcctgtaatcccagtattttgggaggccgaggtggaaagatcgcttgagcccaggagttcaagaccagcctgggctacatgacgaaactccatctctatcaaaaatacaaaaaattaactaggtgtggtgctgcacgcctgtggtcccagctattcaggaggctgaggtgggaggatcatttgagcccagaggtagaggctgcagtgagccatgatcatgccactgcactctgggctgggtaacagagtgagatcctgtctcaaaaattaattaattaattaattaaaataaactaggtaaacttggataggcagtagatatttttgcccacctgaggaggaactcagtcaagctgttgcttaacagcttgatccagggcgtgaaaggttagttgagactgaagtgttcacttccatagaagaacatcacttttaaccttgctttggcgaagggagtcggaaagctgagtctctatggacgggggggtgatcttgctttcagtgttccctcagcttttgtggatttaaaaccattctgctccccctaaaccttttgtttgatttcagcccatgttcttgacaatgcagagcaattctgagcagtcacaaagcctactctctgttcttgtccctgccaacccccaccccccataatctgactcacaacttcaccatcagttggggtcataccactagtctctgtcctataccccatgaaatgtaaatactgtatcataagtagaagaaaataatttttgttttctaaaaatgcattttgagatagtttaatgtaaatctgacaggagcattctgaagccccattaggaaaaaatttaaatggttcctcttcatcgccttaatgtctaaagatcagaaatcgctgagcaaacccgcttttgtttccttcccagaaacaatgcaaaacaacaggtggagatagtctggtctttgccctgctgtgtgtgcctctgtagctcctcctgacaaacgtctgggaaaacagcctcaccccactctcctctctcttccccatttccttgtagctttattccttgcatctttgggtctactgagcagtgggtgctgaggtgacaggggaggaaccagttgttctgtagcctaggaactgcctcagtgtctttgccagaaaaaggcaaagaggcggacagtgcagggctcctccctcctacctcaggcctgatccatcgtgcccttgactttgccgtctcaaagtttcttagctgactttggctttcacatttgttctttccagagctaactgataagagtggaggaggaatgccttctcctaagagtcagttgaaagaaagacaagagagtcacatcttagcttttgcacaaggcattcgtggtcaggaataggttagggaatggtcacttctgattttccaacagttgctccttctctgaagagatcttgattcctttgggaagacaagaatttttcttaataacaaaggtccctttatgagttattccttctttcagttcatctcactggagcacagccaagatggacatgtttatggacagtgctctagatgtgaaaacagatagaactggtttgtgggacaggggcagcttgctcaggagagggaataacgcaggtcccttttcttggaaggcttgtactatggccatgacagtgacattgccctcaccatgatccctctccaaagtggttgtctttctttaccttgtgtcttctcttgtaaaaatgaaactcaaaaataaaataaatgtgtcaaattttgaaaaaaaaagaaaactgaaaaagctaacatgaattgtgtgaaattgcataatgctgtaatgctaatctacaatatgtaatgctatcttgtatgttgaatttgttaatgcaccacacaagtgcaaaataaagactgattcacattacataggca

SEQ ID NO: 724 - DNA, 14225 bp, Homo sapiens
  source 1..14225: mol_type = other DNA
gctgccgaccacgtgattcgctggctcagctcacgtgacaaagctcccggaggtgggagccctgggccaaaatggcggcctacctgcagtggcggcgcttcgttttcttcgacaaggagctggtgaaggagccgctgagcaatgatggggccgctcccggggccacacctgcttctggatccgctgcttccaagttcctttgcctccctcctggcatcactgtctgcgactcaggccgagggagcctggtctttggagatatccttcgtttggagctgtcttttccctcccgggatcccgaagagatcgagttaggatgaaatctgtttgtcggaggggtccgtgccgcgcgcctctttggtttagctggtcatccagagttgttctgtggtctacgggaagaaagaaggaagtccatctcctaacttgttatcaactgagcaatcctgggcaagtcatttaacctctctgggttttaatttccttatctgtaggagatgtgtgcatgccaatttgacgaggttaatttgagatcaataagaaaaagaatgcaagttggctttaaaagatgaatatgtaaagtgacatgatttcccctgccctaatattatcgttggcgaggaggtaaatgagcctagcggtttgttgctttcatcttcatgttgctgctactaaattctggcctttttacctttttttttttttttttttttttgatacggagtcttactctgttgcccaggctggagtgcagtggcgggatctgggctcactgtaaccgtctcttgagttcaagcgattctcctgccacagcctcccgagtagctgggactacaggcgcttgccaccacacccggctaattttttacattttcagtagagacggggtttcaccatattggccaggctggtctcgaactcctgacctcgtgatccacccgcctcggcctcccaaagtgctgggattacaggagtgagccatcgcgcccggcgcactaaatttttttcttttttttgagacggactttcactcttgttgcacaggctggagtgcaatggcatgatctgggcacactgcaacctccgcctcccgggttcaagcaattctcctgcctcaacctcctgagtagctgaaattacaggcacgcaccattatacctggctaatttttgtatttttagtagagacaggtttcaccatgttggccaggctggtctcgaacccctgacctcaggtgatccgcacccccccccccccccggcctcccaaagtgctgggattacaggtgtgagtcaccgcgcctggcctcattctttttaagataaggagtatgtgggaaaatccttgaaaattttagagttatatacatgtaattgttatctgagttctggtctgaatgtaagtatctctccttggaaaggaggctccttgactaccctgcacatatggaaggccagatctggttcttgccacgttcctacagcttacaggcttccaagcctacaaactacgggtgacacacctgtaccaactgaagcagcacaatattctggcatctgttggagaagatgaagagggcatcaaccccttggtgagtcccagcagggaaatgggaaagatccagaagcctaggaatgattttttgttggaggatgactagcatttacacttctgaggtctgtccacaggttaagatctggaacctggagaagagagatggtggcaatccactctgcactcgaatcttccctgctattccaggaacagagccaactgttgtatcttgtttgactgtccatgaaaatctcaactttatggccattggtaaacagaaggcaaaactaaccctcctagatttgttatagattttcttcagagttgcttctgcctctcatctttactgttttcaggagaccactttgtactgaactgaggcctttgcgatattaaattttggaatgggggccaggcgcggtggctcatgcctgtaatcccagcaccttgggaggctgaggtgggcggatcacctgagattgggagtttgagatcagcctgaccaacatggagaaaccccatctctactaaaaatacaaaattagttgggtgtagtggcacatgcctgtaatcccagctactagggaggctgcggcaggaaaatcacttgaacctgggaggcggagtttgcagtgagccaagatcgcgccattgcactgtagcctgggcaacaagagcaaaactctgtctcaaaataaataaataaataaataaataaataaaataaataaagtttggaatgggaaggcatttaattttgttctttgaaaatgtgtcagtgagtaccaatattcaggttaaccattagagaggttgggtatatggagaaagcttgtcacttctgagtgcctcaagtggtcttttttcccctctccacttcctgatcttttcagccttactgaagtaattttcttgttttcttacaggtttcacagatggcagtgttacattgaacaaaggagacatcacccgggaccggcatagcaagacccagattttgcacaagggcaactatcctgtaactggattggcctttcgccaagcaggaaagaccactcacttgtttgttgtgacaacagagaacgtccaggtatgaccaaggcctccactcttaggagcaggcagggagggcttctccattgttcagggggatagggtaatgaagtgacaggaaaggtgggagtgttaaagttttaatcatataattcgaatcatttgcctagctttgtattttatttttttgcctaggaagctggaaagagttagactctgggcttgtagtaaaaagatgtgaattttctttcttttttttttttgagaccgagtctcactgtgttgctcaggctggagtgcagtggcgagatcttgactcactgtaacctcagtctcccaggttcaagcaattctcctgcctcagcctcctgagtagctgggattacaggcacacaccagcatgtccagctaatttttgtatttttagtagagacagggtttcaccatgttggccagtctggtctccaactcctgacctcaggtgatccacccaccttggccttccaaagtgctgagattacaggcgtgagccaccgcactcggccttgaattttatttctaactagctttttttttttttttctttgagacaggatcttgctgtgtaacccaggctagagtgcaatggtgctgtctcagctcactgcaacctctgcctcctgggctcaagtgatcctcccacctcagcctcctgagtacgtgggattacaggcatgtgtcaccatgcctggctaatttttgtattttttctagatatgggggtttcaccatgttgcccaggctgatctcgaactcctgggcccaagcaatccacctgcctcaaccacccaaagtgctggaattacaggcatgagccactgcaccggcctattttctaactaactttttaaatgacgttggacaagtatctttacctttcttgttcctggtgccccagatttacaacagtctactctctcaggaatactcttgataaagtagtagattattacatttttcttacttgcagaatttctgtactagatagtgataatatatacagagaaagaaattgtgatctctggttatatatttaatagatgggtaatggttaatgaagaaggccagcagccaagagaaagactttagaatgccaagagggaaaaaagagccagtatggagatgggaatacctttgtgaaggcttagagttacctcctcaaaggagcctgttaacccctttgttgcttctggcagtcctatatagtttctggaaaagactaccctcgcgtggagttggacacccatggttgtggcctgcgctgctcagccctaagtgacccttctcaggacctgcagttcattgtggccggggatgagtgtgtctacttgtaccagcctgatgaacgtgggccctgcttcgcctttgagggccataagctcattgcccactggtttagaggctaccttatcattgtctcccgtgaccggaaggtttctcccaagtaaggactcagtgagaagggacagggagagggctggacttgttccccagaatccgcctgattttaaaatcctaatgcctggatactgccaatctcctactcctactccggtgttatgtaggtaacatttctgttttttttttttgagatggagtctcgctctgtcacccaggagtgcagtggcgtgatctcggctcactgcagcctcgcctcctgggttccagtgatactcctgcctcagcctcctgaatagctgggattacaggcatgtgccaccacgcctggctactttttgtattttcagtagagacgaggtttcaccatgttggccaggctggtgtcagactcctgacctcaagtgatctacccgcctcggcctcccaaagtactgggattacaggtgtgagccactgcacccagccagtgacacttatagctagagttggttacaatgctttttttaactgaaaaatggatgtttttactgcaggtatttgctacatagccctagcatactagaatgctccagggaatttggacctgctttttttgttctgttttgtttgagatggagtctcgctctattgcccaggctggagtgcagtggcgcgatctcggctcactgcaagctccgcctcccgggttcacgccattctcctgcctcagcctcccgagcaactgggactacaggtgcccgcccccatgcccggctaattttttgtatttttattagagacggggtttcaccgtgttagccaggatggtctcgatctcctgacctcgtgatctgcctgcctcgtcctcccaaagtgctgggattacaggcgtgagccactgcgcccggccttgttttgttttttaactcttttgtcaaaataaattgggcagaggaacaagggattcagcagtggagaaattagaaagtgctgggaaacgtaggatgcaagttttctgttttgttttggttttatttttttaaggggtaagtggggtcttctgcatgatgaaagtactccctgttagatgctggtttgttttgctttcattcagttccaggcacagtgttttacatataccatgtattggattattattttctaaatgaatggatatgttagtgtacttaattttctaatctgttacttgggttaattgtaggatcctaaagggtaagatcaggtttatgtgttctctatgtacaactaccggcacagcgctgcatgttatgggatgagagggaccagagaggtgatttgtgctgggtgaaatgtgcaccaaagttatcatgggaaaggaaataggggagataagacagagatgtccaaacatctggtgctttttctttcctatgcaggtcagagtttaccagcagggattcacagagctccgacaagcagattctaaacatctatgacctgtgcaacaagttcatagcctatagcaccgtctttgaggatgtagtggatgtgcttgctgagtggggctccctgtacgtgctgacgcgggatgggcgggtccacgcactgcaggagaaggacacacagaccaaactggaggcaaggccaccaggctcgcagagctggccacaggcacctagaagcagctgcaggagcaggttccccaagtcatattggccagggtgtttccctccttgtgggtcacagccttactcagcttccttagggtaggattataaggtaaatggcctgggatggggctttagagggaagtagtggctgggagcctgagcccactctaagggttcactttgtttccagagaaccttatgaaataagatgatactgatcttggggatatctggtagctcttggtttgtctaggatctaggcagatcagaaatccaggactttctgttttgtgtgttgtgcgcacattttgggaaagtgtcttcccaggaccacttctaccaattttctaatctctcttcccttctagatgctgtttaagaagaacctatttgagatggcgattaaccttgccaagagccagcatctggacagtgatgggctggcccagattttcatgcagtatggagaccatctctacagcaagggcaaccacgatggggctgtccagcaatatatccggtcagtctggaggcactttgggatatagctgtgaatgcagggacaggcagctagatagctaaagcccatccatgctccaggtaggggctagaattctaccaggaactgtttttgtttttggttttttgtttgtttttgttagtttttttttgagatggagtttcgctcttgttgtccaagctggagtgcaatggcgcgatctcgacttactgcaaccttccctcctgggttcacatgattctcctgcttcagtctcccgagtagctgggattacaggcgcgtgccaccacacctggctaattttttgtatttttagtagaaacggggtttcaccatgttagccaggctggtcatgaactcctgacctcaggtgatctgcccgcttcagcctcccaaagtgctgggattacaggcatgagccactgcgcccggtgtttttttctttgctttttttgtttgtttgtttgtttttgagacagattctcgctctttcacccaggctggagtgcaatggtgtgatctcggctcactgcaacctctgcctcgggttcaagcaattctcctgtctcagcctcccaagtagctgggattacaggatcatgctgccatgcctggctaattttttgtatttttagtagagacggggtttcaccacgttctctaggctggtctcgaactcctgagctcaggcaatctgcctgcctcggcctcccaaagtgttaggattacaggtgtgagccacagtgcctggcctttttaattttctttataagaactatgatgccttaaatgagagaacaagattccttgttgaaaagggaattttagggtcaaatattatatgaccagtatgcagttgagccgatgattacctctcattttaacctttagcttggcctttgtaaatattcactttgacctggttctttaagggggaaaaggtattcatctcttgcttccataattccttccatcagtactaattcttggaattttctgccttaagaaggggttttagaaatctgtctaaggtggccgggcgcggtagctcacgcatgtaatcccagcactttgggaggctgaggcgggtggatcacgaggtcaggagatcgagaccatcctggctaacacggtgaaaccccgtctctactaaaaaatacaaaaaattagctgggtgtcgtggcgggcgcctgtagtcccagctacttgggaggctgaggcaggagaatggcctgaaccccagaggcggagcttgcagtgagccgagatcgcaccactgcactccagcctgggtatcagagcaggactgtctcaaaaaaaaaaagtttgtctaaggctggggtgcagtggcatgtgcctgtgatcctatccctttgggagaccgaggtgggaggaatgcatgagcccagtctgagcaacatagcaagaccccatttctaacaataaataaataaataaaatttaaaaatatggctgggcgccgtggctcattcctgtaatcccagcactttgggaggccaaggcgggtggatcacttgaggttaggagtttgagaccagcctggccaacatggtgaaaccctgtctccactaaaaaaaaaaaaaaaaaaaaaatacaaggccaggcgtggtggctcacgcctgtaatctcagcactttgggaggctgaggcaggtggatcacctgaggtcaagagttcaagaccagcctggccaacatggcgaaaccccatctctactaaaaatacaaaaattagctgggcatggtggcgggcgcctgtaatcccatcttaaaaaaaaaaattagctgggtgtggtggcatatgcctgtaatcccagccactcgcaaagctgaggcaggagattcacttgaacctgggaagcagaggctatagtgagccaagatcgtgccactgcactccagcctgggcaacagagcaagactctatcaaaaaaataatagtagataataataataataataaataaataaattgccagggggcagtgactcacgcctgtaatccaaacactttgggaggctgaggtgggcggatcacgaggtcaagagattgagaccatcctggccaacatggtgaaaccccgtttctactaaaaatacaaaaattagctgggtgtggtggcatgcacctgtagtcccagctactcgggaggctgaggcaggagaatagcttgaacccaggaggcggaggttgcagtgagccaagatcgtgccctgcactccagcctggcgaaatagcgaaacttcgtctcaaaaaaataataataaaaaaaggccgggtgtggtggctcacacctgtaatcccagcactttgggaggctgaggtgagtggatcacctgaggtcgggagttcgaaactagcctgaccaacatggagaaaccctgcctctactaaaaatacaaaactagctgggcatggtggcacatgcctgtaatcccagctactcaggaggctgaggcagaagaatcgcttgatcctgggaggcagaggttgcggtgggctgagatcgtgccactgcactccagcctgggcaacaggagcgaacctccctctcaaaaaaaaaaaaattaattaaattttaaaataatgtaaaagaaagagaacaaaaatacaacaataaaacaacaacaaaatagtaataatataaaaagaaacctgtttggcctcttccccgttctctttagaattcctatttttagccaaatttaagaagcagtgctctggagccttgttacccagtgtggtccacagtctagtagcaccgatattacctgggactttgttagaaatgtagaatctcaggccccactccagatccactgaaatagaatttgcattttgagaagatctgcaagtgattcctgtgtacatgagctggagaagtacactgattcagatgctatcgggtgcacatgtctccctagaaccattggaaagttggagccatcctacgtgatccgcaagtttctggatgcccagcgcattcacaacctgactgcctacctgcagaccctgcaccgacaatccctggccaatgccgaccataccaccctgctcctcaactgctataccaagctcaaggacagctcgaagctggaggagttcatcaaggtgcaggatgttgttggtggggaagtcttggaggccccactgagcatgaggtggctccaccgggacttgttcgtttcagcaagacatagggagaggaaagggctgaccttatttagaggagtggctgttcctgttagttcggtgccatctcccctcttgttttatgattctagaaattcccatggtatctaagcccagggtggtggcactggggaagtcctgtccctagcggtgtccctctaatggtaggggcagaggaaaactttagtcagaaactcccacaggctgagtagcataatattttcaaagtgtgaacgttatgatatcaccttaggaatctgaaagtcaggtgcctgtttcctctcccttctctatctccctctgtgtaaatgattttgtctcatgtctccctggcagaaaaagagtgagagtgaagtccactttgatgtggagacagccatcaaggtcctccggcaggctggctactactcccatgccctgtatctggcggagaaccatgcacatcatgagtggtacctgaagatccagctagaagacattaaggtaggtgagactgtcttttttccccaagagacagggtctcactatgttgcccaggctggagttgaattcctgggctcaggtgatcctcccaccccatcctcctgagtggaggtgagactctcaacttgggcagagccctgtcgtttttgaagacatctccagaatggtgaaagtgcttcctggtggctgaggcaggagtatacactattctgccctttacttttccacagaattatcaggaagcccttcgatacatcggcaagctgccttttgagcaggcagagagcaacatgaagcgctacggcaagatcctcatgcaccacataccagagcagacaactcagttgctgaagggactttgtactgattatcggcccagcctcgaaggccgcagcgatagggaggccccaggctgcagggtgaggctgcagggaaaagagcttcagactgtggggatcaccttaagggcttcctgtatatcacgcccactcattcagcctcctttttcctctcttgccatcctaggccaactctgaggagttcatccccatctttgccaataacccgcgagagctgaaagccttcctagagcacatgagtgaagtgcagccagactcaccccaggggatctacgacacactccttgagctgcgactgcagaactgggcccacgagaaggatccacaggtgaggcctggccagggcttcaggagaaaagacagttcgtgccgtctccattcttccgtcttggtggctgcctttcactgcattccttagaccagtaacaccttacctcggggctcaatggtcctctgtgaagagggaatggactgagggaaagagttgactggctttgtcccaagagaccttgtgattttccccttttgtccagcagctctgccctccttcctctccaggtcaaagagaagcttcacgcagaggccatttccctgctgaagagtggtcgcttctgcgacgtctttgacaaggccctggtcctgtgccagatgcacgacttccaggatggtgtcctttacctttatgagcaggggaagctgtaagagtttggggaatttcagggaaaggggaagaatccaagtcattttccagagacagccactgaggtgtgcccttgccccggccgcaggttccagcagatcatgcactaccacatgcagcacgagcagtaccggcaggtcatcagcgtgtgtgagcgccatggggagcaggacccctccttgtgggagcaggccctcagctacttcgctcgcaaggaggaggactgcaaggagtatgtggcagctgtcctcaagcatatcgagaacaagaacctcatgccacctcttctaggtacttgggaagacagatgggtgggtgacaagctgctgacagctgggctctgtggcaggggcccttcacctttatccagagagtgccacacgtggttgattgtcttgtttcctcttggaccccaatctcagtggtgcagaccctggcccacaactccacagccacactctccgtcatcagggactacctggtccaaaaactacagaaacagagccagcagattgcacaggatgagctgcgggtgcggcggtaccgagaggagaccacccgtatccgccaggagatccaagagctcaaggccaggtacccggggcatggatatgtggaggagtccaggggataacttgcccttcacagggtattcattactaagtactttccgtagaggatactatggagtgcttttgagcattttgattcttcaagttgtgttttaattgaggaattccaaaaaatggtttattacatagatcattatttattgggctttggatgatattattttgtagcaggtactttttgttctttatatgcctgtattctaccacttctaaacacatccgtattgtggttggaagccgttctggtgtttttcttttttgagacaggatcttgtcactgaggctggagtggaggggtgtgatcacggctcactgcagctttgatctcctgggctcaagtgattctcccgcctcagcctcccaagtagctgggattacaggcgtgtgccaccaagcccagctaatttttggatttttagtagagatggggtttataatgttggccaggctggtctcgaactcctggcctcaagtgatcctccggccttgacctcccaaagtgctgggatgagccacggtgcccggccataatcccaactctgaaatcttacctgcccttaacattctgtaaaatatttattagagaacaacagtttcttcattctacaaatattgagcctctgtggtgtcccagacactattctgaacagcacaggcaaaaagccttcatggagctttatgttgtagaagagacagacagcaaacatgttaaataggcaaactttttttttttcttttgagatagagtctcactctgtcacccaggctagagtgcagtggcgcgatctcagctcacagcaacctttacctcctgggttcaagcgattctcctgcctcagcctcctgagtagatggaattacaggcgcctgccaccatgcctggctaatttttgtatttttgtagagacagggtttcactatgttggccaggctggtcttgaactcctgacttcaggggatctgcctgccttggcctcccaaagtgctgggattacatgcgtgagccactgcacccggccaaataggcaaattttttttttcttttttgagacgaagtctcgctcttgtcccccacgctggagtgtgatggcgcaatctcggctcactgcaacctctgcctcctgggttcaagcgattctcctgccttggccccctgagtacctgggattacaggtgcctgccatcatgcctggctaatctttatatttttagtagagactgggtttcaccatattggccaggctggtctagaactcctgacgtcaggtgatccacctgcctcggcctcccaaagtgctgggattacaggtgtgagccactgtgcccagccaaatagacaaagttttgtagtatgttaggtggtgataagttctgagtggcaaatgaattgagcaaggggagtgggagaagtgtgttaacaagtttagagaaggtggcccaggaaaggcctcagtgaaagggtcacatctgagtacagacctgaaagttaatttagtggcagttgtgaaaatggagacagaggaaacaatccccaggctgagttggccttgttgggagcatgctgagactcactgcaggtccagggctgttgtattcatttgactcccttaaggcgataagaagagcagggcagggccttcaggggccttaccagggaccttgccctgtgcacttcagctgccttctttctcatccttgactcctggccttgccctcacttttgccactcacttctggtctttcttccctgtagtcctaagattttccaaaagaccaagtgcagcatctgtaacagtgccttggagttgccctcagtccacttcctgtgtggccactccttccaccaacactgctttgagagttactcggaaagtgatgctgactgccccacctgcctccctgaaaaccggaaggtcatggatatgatccgggcccaggaacagaaacgagatctccatgatcaattccagcatcaggtggggatgagtgggctagatgggccaggggattcccactagtgtcacagagtcactggagggcttgtttccttatcacctcctcatttaagaaacaagcactttgattctgattcgtattccttccctcctcttctcctgcagctcaagtgctccaatgacagcttttctgtgattgctgactactttggcagaggtgttttcaacaaattgactctgctgaccgaccctcccacagccagactgacctccagcctggaggctgggctgcaacgcgacctactcatgcactccaggaggggcacttaagcagcctggaggaagatgtgggcaacagtggaggaccaagagaacagacacaatgggacctgggcgggcgttacacagaaggctggctgacatgcccagggctccactctcatctaatgtcacagccctcagaactaaagcggactttctttccctgccttcttatttagtcagcttgccatccctcctcttcactagcagtgtagatcattccagatcagtgggggagggcacctcagcaacctctgagtgtggacaatagctgctttcttctctatccaagagcaccaggctgtgcttgggtccttgctctcagagtctataaataaaagaatataatgatttgggagcttaa

SEQ ID NO: 725 - DNA, 12690 bp, Homo sapiens
  source 1..12690: mol_type = other DNA
atccggcgcggtgtttagactccactgatgtcgtggcgctttaggggaagaagttggtgtttcgctgggccctggtactgaagacgcggtccgggtcgcccctagctgtttcctactcacccaaagccccgcacccgccttttctctctctcctctggcaggatgaggcgtgcaggcctgggtaagaagagggctgaggttcgaagttcggggccctagaaccgggagcgctggggcgcgggaggaaatcgaacctgtcttatgttcctggcatttggtccaaaaaacaggatgtctagaggggatctttggggtccatgtcgagtggaaacacaccatttgtcccagatctttggaatttccttaagtttgagtcagattcaagtttggatggtaggctagagaaagtagtggactaggggtgggtgtgtacaggtggcatctcagtggtcgagtgttttagtgttattgactgagcgtggttatggacgctgctatgttttccaaagcccgactccggtttctgtttccctactggccctggatcttagtttcttcagaagcggaatttgaagagtgggtggttgcacccaaagcacgctagtaatggtcgttaatctggtaacagtgagttacaaaggtaaatgtatgtgtcattattgttaaaggtcctggaactggaacttctgggtcaaaggcgatttcttaatctgaaccttgtgccacggttaaggcagtagaacgtggttaaggtttggcgacttaacatttgatctttacctttggggttaggaaactggctcatcagcaagaataagttagacacaaggaattttaatggacccttatagtaacgcacagctactagaacggcattttctggttctgaagctttctcttaggacacgattttttttttaaagaagaccccgctaaattagagtgcagtatacttcagaaaataaatgaaacatttgaaaaaagatattacctttctcagtcattataagattgaaaaaagaaaaaaaaaatccccaaagtgtcagatatttaaagtcagtgaaagttgccaataaccgtagacttgtttattgatcaataaattgtagtatgagaaagttttttgtttttttaatgaagtttttatgaatacttagatcatagaaaatggggccaggtaaattgaagagaaaaaaaaaagaaataattttgagcaagtttagctttatatgtctaaatgtttttcttgttcatcatccttaataccaaaaaagatttattgtgtgcttgagtaagctctaggtatacagttgtttgttgccctgtttgtgatccccaaagcttccagtctaggtggggagtaggaatatgtgcaaagataaattgtagtacaaagtgtcgctatacatccaaataccagataagttctacatataagggatggtctcagagatttcagagatagatcactgtgtactttgtggggaagatctttgtgtatttggtggagacataggaatttgaagtagaccttgaataatggagagtgggggaagtgagttccagataggaggaactcaaaagaagtaagggattatgattaagccagtttgggtgaagtaggggattcgggatcacactgtggagatctttgcatgcgaggccaaagagtttggatttcatcagtaggcccctaggcccttttgagtattttcctgctgcagtgtgccatgttaaattgcaggaaagtgacttgagtaatggttctcagccctgactgtacattagaatcccttgggaagtttttaaagtattgttacctggacctcagctcagccagtaaaattagaatttctccaatttagagcccactaccttctccttttttcctttttttttctttcttttttttttttttttaaaaaaaagctcttctgtgattgagaggagaagtaattacctaggtaactactattgctataatttacattggtgtgaagtgacaaaggcttttgttacacattttttcttttctttttttttaaagtatgaatgcatattgacctgaaattttaaatttgggatcatagtgaatctgatacatatccataggcagaagctgccacacttcacatgaatctctaaatggttttgttagcttactgatagaacctatccaaaaaagtagcgtttatctaaataaacaaaggctgaggatgatcttcagtactcactagcttttttacaacttttcatagcagtacaccaccagaagagaagtggctttgtttggaatagcaattctagcattttatttggtttttacttttgtcattgtatttgggatgggtcatagtttgagggaagatcaactctttaataggaatgtgcattgatatatttctggacgataaatacaacaagaatttcactttgaataaatggaacagcatggaagaactctaaaattaaaattaagataggcaaaagcaactaaacaaaggaaagaaaaaatagcagttaatttataatgaattccttggtgaagttgtcaaatgtttgaattcaaccagtcagtaattacttattgggtaaatgttatatactcagaacctcagccacacaaaataagaagacattctttctttaagtatcttggcccttattaaactacagtttgcacagagtatcattggttaacagagtaagaatgcatttttaaatggtgattttaatatttgactgagcggaaaaatatgcccactccttgagttcttttataataaaacatgtggagagcttcatggatagtgtgtcatggatagtgtgtcagcagcaaaattcagatagtacaactctcttctgtttggaaaatacttcttcaatattttgttgtggtttttgtggtggtggagattgcataggtatctgctgcatataaagtactcattaggtacagggaggatatggaagcatgagatactgtctttgccttcagagaagcatatgattccattctggacaaaggtatgcacattcaaagttcaataacagtgaactcagattcttttcattaattagttcacatcatgtattcattgagtgtgccttacagtgtgtatgtgtttgtaggtttatggggggacatacagtgttgagtcaaacaaacttattctcttcccttatagtactgtacagagtgcaatattagtgttacatacaatcagagctgtaagaaatcagtgagagttttgcttcatagggaaaatgaaatttctattgtgccttgaaagaagttcctattcacaccttgactgtccttcagtgatcagtgctgttacctcctgtcactgctgctgcatctgctcattgagcatatggagacttctagttttgtttgtttttaatagatgaggtcttgctgtgttgcccaggctggtctcaaattcctggcctcaagtgatcctgcctccctcagcttcccaagtagctgggattataggtgcaagcaactgtgtgcagcaggctctgagacttctagttttgatatcattcctttccccacattctcaagtcactgttgaatctgctttaatatctgtccaatctaatccccataatccagatcttcaaccgctcttttggcaagcagtctcaacctcttggggctccgtttttctgcaacctcaatattataagcttccaactatagattagtccaaccatccaccttctcctggactaactcaggccgatgaactcttctgcagaaaaaaaccacacacctgggacgattgaagccaccgtagtatattgcctcaaacaagtttgttttatctttagtaatcctgtgcagtcccggtccctttcctccatcattctccttactgtatattctgaatgatcacccattcttcagcagatagcccgttttctccctttactgagaaaattgatggcaacaattatgttaaaaaaaagttcacgcctgtaatcccagcactttggggggccgaggcggatggatcatgaggtcaggagatcgagaccatcctggctaacagggtgaaaccctgtctctgctaaaaaatacaaaaaaaaaaaaaattagccaggtgtgatggcgggcacctgtagtcccagctgctcgggaggctgaggcaggagaatggcctgaacctgggaggcggagcttgcagtgagccgagatcgcgccactgcactccagcttgggcgacagagcgagactccacctcaaaaaaaaaaaaaaagtatagttaactaacaccctgaactatgccgtttcctgttaatcgcccaacatatttatatatgtattcactaaggcccactccatctgttgtttgatagcctgatgactatgaagtactatattaggcagggaggtgtacattcttatcccttagagttccataaaagtagcacctagaaagaacagtggatctgatacatggtaattcttcaaatatatgttgaagaataaatgaatctccctcttgactctcagctagcattctgcataagttattgtgtctctttcctagagcttcagtttgccccctccctgctttggctctttcctgtccaactgtctatttaagagaaagagatgccagtaaagaaccctcgccgctatgagctcccgtccttctgtattaaccacttttcccttcctcttcacagccacgctttttcaatgggtagatgatgttactgcttttagaactttcattaaaatatatgtttctcttgagcagggaatgtatcctgaatattcttgtgtattagtacctatttttgtatcttctggacaatcaataagcaatccagaaatgtgtatcaaaatgaactgaactgaatattctttggttaacagagagtaatggaaagaattggtctgatctctgtttggttatttattttttaaattcatttggagtatgaatattagagacatatgtggtttgcaaggccctccaggggtctttttcagttctttcctaactaacagtgtttcaaaagtggcttctctagaaccacctttgtgactctgatccttgcaggtgaaggagtacctcctggcaactatgggaactatggctatgctaatagtgggtatagtgcctgtgaagaagaaaatgagaggctcactgaaagtctgagaagcaaagtaactgctataaaatctgtaagtatataacaaatattatatgtgttttaattcatatatttctatacatataattataaactatatattcttattgacgtcatcctaaggaattcatttactcagatactgtggttttgtgaggtcaaagtacactcaaaatttagactgtgctttgagtaagttaaaaaatgtggcacatcaaaagatagattttttttaatacttaagaaaaatctccagctcttttttgtatactgtatgctgtctgctgtaatgtctcaaacagagctgtccatcttccacccccaagtagctcttctgctttttttaatctagccttctaagctataaatcttggtctttcttatttctacctttgtacttcatttcagtcactgagtcttacactgtctttctgatgtttctatctttgcctttctatttctaatactatcccctggttttcttttcttttctttttttttgagatggagttttgctcttgttgcccaggctggagtgcaatggtgcagttttggctcactgcaacctctgcctcctaggttaaagcaatccccctgtctcagcctcccaaatagctgcgattgcaggtgcccgccaccacacccggctaatttttgtatttttagcagagacagggttttaccatgttggccaggctggtcttgaactctttatctcaggtgatccgcccgccttggcctcccaaagtgctgggattataggtgtgagccaccgcacctggcctatcccctggttttcttagttgaactattggaagaacatcttaacctatctgttcctgtttttttgcacattatgatctgagctatataatcattgccacagtcctcgtttagaatattttaaaacttgcatcctgcactcccagaagtcttcagcgtccttccatgatttaataaagttcatgcttcgtagcttgattaaatcagatagatctttcaaaaattggccttagcttttgagatcttatctctcacacttccagaatctgtatgtgcttcctgctagacaaattacactttgtgtcctctgtatgctgtcactttcccacccccatatcacactatccctttgccttaagcctccacttccttcttagatcaactgaagtgctgcttatccacatccgccccacttcattgcaccccctccctccaaacttttacctgattaccacatccaaaagtaacttttcttcttatgaacataagaccatttgtgccatttctgtagcacttattcatagtgatttgcattggcattatttgtatgtaaaaggaatttaccagaatgcaggttttctattgtacttactttatattctatatagcacttagcataattccttatcaatggtgttgagtaaatttgtattgaaccaaagaattacacgaagatgattttaataatatatgtgattgatactgcattataatgaacatgacgttcacttataaagcattcagtagaagcccatgttgataaaacttaattggtatttcaatatagtctttggaaaatcgaattacattcagtctggagacctttagattttgaaacaggattgttttcaaagtcatattaaactaaagttgatttatgaactaagtaatattgtataatgttaattttaaaaatacaacacttggaaggacttaagaattaaatgcctttaaaaacccccccaatgtagataatttagattacttgttagaagaaagttgtgatgtcctggaaatatttttccttggcatgaatgacagtgatagaagttgagtaatgtgggcagtctagctttatagttactttattatctctgagttgttaaatctgggaggaaagctcatgttctgatctatagaattctagtatggttttgtatcagtattatcccatgtgctttcacacagatgaagaacaatatttgcagtgatttaccaagattttcagtagatgattctatttatttaaatatcttggaagtgaagcctttgatgaatctgtcctataaagtattagatagattttggtttgaatagttgtcataattagctatagtattgtattttgtaagctatggctcttttcttcagagcttcaggaagtaagtaacactaatatttatttttttcaatttattatcatattttaaagcaaaaacctttaaactaaggaaaaatcagtttagacatatttaaagtaatgtaacatttcattaggaaaatattaaatacttctgtctagatttgaattggttgtatgggtacttctagatctttcaaaatgtaataaggttgggtactaggcttaattcttggttgacgaaataatccgtacaacaaatccatgtgacatgagtttaactgtataacaaaccttcacctgtacccccaaacctaaaataagttaaaatatatatatataatttataaaatataataaataaaatgtaagaaggaaatatacagatatttgtaggaatttgtagcttttgtaggaatataataaagatataaaagcatacaaggttaagagaatcagagagaagtagtacataccaaattaaaagatggaattgaatattaagatgaaattaaaataaagaggaaagaagaaatgtccataattgggaggagtagaaattccaaatttattttttattgatcttggtagaaaaagtatcagaaaaagagagtttatgtgtctagaagaccgtttcatttcagaaaatgtgtatgcttagaatgacattatttttactttataacacttgaatacttttatgtgagtaatcctgtgtataccttcttctttatagctttccattgaaataggccatgaagttaaaacccagaataaattattagctgaaatggtaagtggttatgattttaactttaagaaatttgatctaatattcgcaaataatagaatttcaacttttattcattttgaaatacagagatcgtaagtccttgattcccgtccatttgtatctaatgtgtttggaataactataaggtttattttgccatgcttttgcatttttcatctcgtcttacgcatgtaagtgggaggaacaagtggaagccaatatatctttaatcctgtttttagaatgattgttaaaaacaagacaaatgactattttgagtagtcttagaagtctcaatagtagagactactagtaatttattaaccaagcaatcaaaaggcacttgatatccaaccaactaaatgtcgttcacttaatggatacttactcttttgcttgatttcctaaggatcacttatgaaaaaagtgctcatacatttgaacagcccagagccttttctctctaacaacatataccttttcttgttagagtccccttccatttgttaacgtttatcttgaatgtcaagcttctctgaaccttctctggttccatgtgcttttaaaattgtgctattcaaaaatgaatttggcatcaaaagcaatgttcttgctaagcttgtgcgctataataagctagggacctctttaaaaatgtatatgcctgattctgtctttaaatatactgatttagaatttcgtgaggagggatctagatgtaaatattttgaaaaaagcatctctggtgattctgatgcataaccatgaaaaagcatctccggtgattctgatgcataaccatggtgaagatccatagatctaaagtatatgagccacatagacactgagctatacaaaggatatttattattatgccagggcttttacatctcaggatattataatttctatgaaagtatgtgtaatatttctagtccctacctaagcctctctcatctttaggattttccagctatgttttaatacgttagtttttccccatccatatttatagtccttatcacattttactacctctatatgatattctcttaacttaatagactctacttcaaagtcagctgtctaaacaaaaggatattaaaagtaaaggtccaaggcctagcatggtagctcacgcctatactcccaacattttgggaggatgaggtgggcggattacctgaggtcagtagttcaagaccaccctggccaacatggtgaaaccccatctctactaaaaatacaaaaaaattagctgggcgtggtggcgtgcgcctgtagtcccagctacttgggaggctgaggcaggagaatcacttgaacctgggaggcagagattgcagtgagctgagattgcaccactgcactccagcctgggcaacgagcgagactccgtctctaaataaataaataagtaaataaaagtacatttaactgctaaccgtattacattttggatgaaatcctctacttgggtagcagtcaaccatttgaccttggagagcaatggcacaacaaaaagtggggaaaaaaatctgtgtgataatgcacaaagtacttacatttattgttaattttttttatccacataattggaataacacctaaatagttttgagttgttgaattactctgtggagctgaaagaagtgtttattggacaatgaaagagctttttattcgctgagagtattactgtattttgcatggagaaatcaggctgattatccaaggttatcaacaggctcctgaattgattaaacacaaaactgtcattacaaatgtactatggtaacagttattcaattacttggatatgcatatgtagactcttagaatctaactgtgatattttatttgcctttatctctgataggattcacaatttgattccacaactggatttctaggtaaaactatgggcaaactgaagattttatccagagggagccaaacaaagctgctgtgctatatgatgctgttttctttatttgtcttttttatcatttattggattattaaactgaggtgatgcatgtaattgtgaatttggaatttgttccaacttaatggcttgcagtaccactttgataaaaatcagcatcaaaacattcctagtgttcaaatactgtggcattttccattgaaaattgctgaattttgcttattttataaatcacattagttaatacagtggtctttgaatactgtttcttaatgactcattttagcccctattttcaggggtagtgagagggtgtggctccactaatttccagtttgtttttctattgtttgccaactgtcagattaaatagcattataatattttgttgtaatcataaatgcaggtttatgtcccatgtaaggaaacttagtgggagagtaacagaatgcctggagagcctgactctgagctcttgaagtagtcagccagtttgtggtaaaatggtaattgaattttcctaactgcatcaactgtaatgatatactcccttctcctcctttatttagttaaaattgtaggctgatttctttttacctacaatcttcctaataatttttgatgataatgacccctcatttctttctgcccaaagacctcattctttaaataaaacttgttattttggcatatttctggtagggcccattgcacatgtgtatcagtatagttattatttcatattaactttatgaattctcttgacttggcttataatagttttatgatttttactacataggtagcacatttatcatttgtgacagaataatgtgaagttaagtaattactgaactttaaatggaaatagtatgcaagaaactcaggcattgaacttgaagataagagtattattgctttaatccagtgtatttgtttatggaaagaaaaacacaaaggcagactgttgagtaaaaaatattaaatattgttaaatattctgtattttggaatttatccatttataggcttcaaaagtaaatttttaaataaaatatattagtcgactgtgttacttctttaagtctcttttacattctcagtagaatctgagaaatggtcctgacaactcagattccaacccaaatcaagcaaagttaatatttgtattgttggaacttgattcaaacaaataagcaaatcttgactctatttcaaaaatctctttaattctttatattttgggttatgaatgtattttcttggattttactgagttttcaattctttttgttcatccctaataacctgtcagtttgggttctattttttctggcttcattcgtcattatttgggcctctacctgacaggttaaaaccaccggaactgagtgtggttaagggacttaaacagataagcctgacgtgtgatgggagaggcactggtttgagttagatgacctgggttcatatctctattccttaacttgctcactgcttttgtccttgatttcttcattacaccatctatttcataggatagttgtgagaagtagataatatgttgtaaagtgcctggtatgcgataatcactcaataaatgttggttctcactaccattaacagaaattctcagaaaaggtagttattttaaggacaagacaataggttgttttcaggcttcaaggtgatgaaatacctccaagtaggtattttcatcaggcaattggagagtgactcattcattcaagaagtttttaactgtactttgtgtcaagtatgtgacaccagagctcacgggagattcagaaatcattgtcaataattaaagttgtgaaaaacgggaagagcagaaggccaaagaaaatgacttaaaaatgaaaacaggagaatcaacaatggaagtagaggatatcaaagccttaggaaaaccaatgatggcaagagaaggatggatttcaggattgtttagctattttatgaaagtactttgtaaaatatttaaaaattttaatgtggacagtatcatcaagcagatagagatttcaggaaaagggattttgggtggtataaaagtgattctcatcactgcatggttcaacatttcttatgatttttatttctaagtactatttaaagtaggtctctacctggcattttgtcttgctccttcacatcactgtgtctgctgagattcctggcaggcagggaactcctctggacacactggcatgtcgctgcccaaccagggatccttctgccagcaccctctttttccatctaaaacaaatatgcaacattttaagcatcagaattctggagcagagaaccctagcacctgtccccatgaaaaactctggttctataaaatagttttcctaattttttaatgctcctaaatttcaagttagatatattgaatttacttctttgagagaatgttgaaaaagtgtttgataatttgggtttatgcagtcaataaataataaataatgtcatcattctatactgatgaataaactttgactaaatatttattgggaagcagagtagcattgtggctaagaccaaaggctatgaagttacactgcctgagcataaatcctggctccaccattcacactatga

SEQ ID NO: 726 - DNA, 32742 bp, Homo sapiens
  source 1..32742: mol_type = other DNA
tcgcagtatttcctgttcggattatcttttgcttccccccagctgcctccttaccctcacactcccactcctccgtttccgcggtcgaagctgccttcggccccgggtggtctcccccgcccggggaccccctgtgcctcccctcccgggctgcgggggagcccctccgagaccatgaggaaattcaacatcaggaaggtgctggacggcctgaccgccggctcgtcctcggcgtcgcagcagcaacagcagcagcatccgcctgggaaccgggagccggagatccaggaaacgctccagtccgagcactttcagctctgcaaggtgaacggagcgcgcagccccgcgacaccgtcattgaaaaattggggttgttttaagggggctactcgggctttacatgggaatgcaagggaagagaacgccaataataataataataactctaataaaaggctcgctcctcccttggcaaacgtttcttcggtgggttgttttggagattgataccttactccttttcattgatttttctctctcccctttgcacatgcagcaatcagttcaaggttgcttcaaactattatccgacctttaatcgtattctgacactgccagtaataacctggaagcttttatattcaagcgttttaatatgattcaccaacttcgaagtttcctttggaaacggtgtctaatgaatgttgtttatcaaaaagccaaacctgttctaccacacctttgctcatcacttttcccttaaaatgtggtgtaagtggcttacgatatgaaatcacagggttctttttatcattatgtttgttaaaaagtactgagatttttgcctgttaatggcacgataattgccatagcgttctgtaattcagaaagaatgatgcagcgaattaagtcaccagctgcttaatgagaaacacaaacttgcctcggttttaatacctgcctttctcataaatagccatgtatttgtatgtcagagttaattaaaagtgtgcatatatatatatatatatatatatataggtctaatgccctaaaatgattatggccttaatagtaaattgcaaaaatgtatgttgtactcatcttcattctgttacaagtgtaaaatgttgggatagaggtttgattattgctctactgaatgcttgactaaagtaattatatgacagcttttccttagaagtacttgcgttagcatccaaataaagtaatgatgaaatgaatactgccaaaataaagtatgaattgcatttaatgggtttacagaattttggaccattgcaaactttagtcatctggtgtcggatgtagtagtatagaatattaataaaagattttcttctatggaataccagtattatggaaaagcgaaattaaagtatatcactggactagatttttgtttgtttcaggttctatgtgaataactttgttaatgtaggtttcacttattttttcaaaagcagtaagtgcatgtgtatgtgttttgcatcagtggtagtggttctaaattctaacgcctctattgactttctattttaaaatttcgcttgctgccttggttgctgtgatgtcacttgcccatccctagactgttcgccatggatttccctatcaaccctcagccctggcctttgatcctgtacagaagatcctggcagtgggaactcagactggtgctttaaggctgtatcctttctttaattttattttttaacttctactttgttctccccagtccttctgtgttgctgattagttccaaagaaagtttttattttcctgttggtgtgattagatatatactatgagaaatcatgtgttggcttttcccttgattataattcagcttatatactgctgtgatgtttctcagctcctagtttatagtagctaaacatatatccaaatagaggtctaaagtttttttatgataactattttatttgtaaggagatagaagtttctaaggaaaaatatatctgcttctatactattggtgtgatgaatgaggtatgttaaggatgaggtttaaagacaattacttttaaaaatattatgcatggtagatattgaacttatgacctattctaataaattagagattggatttcaatctgaatttggttgtttttggcatgtccgtgtagaaaaacaattagcagaagtgtagcaaattaattttctatgaatagttataaatggttaatatttctaccagtttttagagcgttttcttgaaaaatgcatggggataaattttttctcttgatatactttttctctcatagtctacatttgttatgtatttgtaaaaactgttaggttactatacattaaactagtagtatagaattacttttcctggttgtgtatgaactatattagttttatcaagcatttttttaaatacttcaaaagatttttttcaagataattttttagtgagaacagtacagacgactcactttctatttttatgttgaaatgtgttttcttttactgtgactttgaaacatacttaacctaaatatattcttaaacttaagatttggattcatctatctgtgggatatctacctcctgcatattaatgagtaatgtgttggtgataaatagaaaaaaaaaatcactagatgatttcagtagacattactattgtcaaaaaaaagaaaagaaatatacgataggggaggagctttacccctttatattttagatttttctggttcctgagaaggagtgagggaacctgcatttgagttaaacatgtgccaggcattttacttacattttaaagtcattatttcaaagaagtactatgtgatacatacaaatatatatatatgtatagatagatagatagataatgcctcaagttttatttgtcacttaatgtgctatcttcaaaatgctaatagaagttttaggatggactattgaactgtgttactaagtgaagtctactatacatagtaaatactacgcagtcatacctttataaacgacaaaatctgaccaggctagatctgaatctgttaatttctgagacggtgtgtctgaagtgctcttgcccaaatatctagatagttatgaccagaatgttttttggcttcaattgttagatatttttattcctgaactcagtgatcaagaccatctagtttagggttgtgtgaagacgggaatgaagttattttgtcagtgtgggccctgagtgttcagcaaaactctgtagtgacgagactagtacagcgttggatctagatgcattctttggaactgaaagcagtttcttttttttcccaacaagataatttcataactggactagaagaaggaaagtaaagttgaattaaatcagctatttttcccttattttgcttttctgtaaaatgagtttaggttttattgttttcccagtgtggtctcgacattcttttggtaaataacctcttttccttgtaacatccaatctggcccttttataatttagtataattataagtgagtaccaccagcaaggctgattttataaaaccagattcttagacaacacttttaccctaatgcatttgtgtaattagcaagttggcacaaaaggtgtaaagcgttaggcctagtgtgaattgccaattaaaatcaaggatcaggtggccaaaattgtcacttgtatataacttttggtgtactttctatagttaaatattatgtgaataaaagtgaacctgtaattatagtttgcaattatactctaaagtttttttttagaacctccttactaagaatgaagtatggaaaactgtttactaaattaccttctactttgcctttttatgagatttctatggacattccagagtgctaaattggcttgcttgccagtaataccacctagtcattccttctgttgggtttaagtagcagatgagcttatgagctttatttattatggttctgatttatagaaaatgactaagccctttttattttatctcattttccatatatgtgctttcaggtatatgttagtgtctctttctttgttatttttgaaactggacacctaaattccgaatctccacatttggttaacgtgcagatttactacaagtgtgtatattttgacttggatcttttgtatattttcctattgtaattggtttcttttgatcctttattctcttcttgtattagactcttgtagtctgtaacacagttatcctaaaagatatcattagagcagaaaatagacttctagataaagtattttccttgcagattgaaaagtaggcgatgttttcagaagtaagattaggctattacaattccaaatgtgtatgtaatttgactgatgaatatcttcctaaatgttagaagactttactaaattgatttatctactctgggttaaaaccaaaaaatcaaagaagaaagatatatctgatagctaatgtttgtagacaaggattagtgaaaaatcttaatcctttaataatacataacaaattatgaggcaaaataaattaaatgtatttactacattaatgtatagcaaatgacatatgatataaatatgctgaatgctaaaccttcttggcttctggagagaatatgagattgaagaatgaaggtatttttaataatgttactgtctttatctagacttctgatttactactaaaatttcaaattgcttcatactttaatcatgggttaccctgatcttatttttaaagtaaattttttttctaaacacaatgaggtcattatatatatgaatatttcaaggactgagcagaaaaatggaatttcaggtttactgaacttgtgtaaaaatttgaggtttaaaaatgaattgtcaaattattatcgaagaacctcattcattgtcttcttgactggtggaaaatacagtgaaatagacaatctctgttttgatgaggcatggattgtcttttaatgcagagtaatgttgctggagacaggcttacaaagtgatttttttaccttacagttgatttaacaagcacttgagtgtcagacaacattagattataaattgtggcctgaattctggttcttcgctttccactaaataattacatgtccttgaattagttttttttttccttactataaaaatgaaggtgcagtattaaatgatttcttcaaggaagaattttatgatttcaagtagctatgtattctagaggagtaatacaaaagaaatgaaaatgtgatccttccttcaaaaagtttccagttctaaccaaaggactggaactaaataagcagttgaaatttgagaattatttggggctctactgacattacacaaagtcaggttacatgtaaatttgttgcatttgatgaacatttctatacattggtagataagtattcagaatgacagggaggaaggagtgggaaaattattctaggcaaggaaaacagtatgggcaaaagcatggaaaagggaattatgcgagtttggaggaatactaatgaggctagttggaataattgagttagcaggagaaataaggaggctgttgagggtctgcaattttaacctgaggtatctgcatgatattcagttaggaatcatagttatgtaataggagatgctgacaggaagaaagcatgattttttagcatgattagtggagtagtggtataggtgaaaagaatggaccaagtgaacttcacagaaaattattaatccatataggtagtaaagtgaatccaaaacaggggtggcagaatgggaattggagaagggcttgacttgtttgtataaaatcttagggagtaactaaagatgataaggttttgcaagtaaagtaatgaggcaattacaagcgaagtgaaaaacttggcaaagaagtggcagagaaatgttgagtttgaaattatgttatctttaacttttattgtattatcattttgggagagtagcctagacttcttattttagtgtgagaatttgatatactttcactgttttgttttggttttttttggctggtccttggtgatttccagaattttgttactgaatttatatttaaggtcattagtagctgtttggcattgtccatttattttctgtcagtgtttctcaaagtggtagctttttgggcagaataattctgtgggtttgtccagcacattgcaggatatttaatatccccgtctcccacctactaaatgcccatgttgcctcccctgtcagtgtggcaacccagaccctccaacacacttccaggtgcccctggttgagaaccactgcatttagcccaagttcttcaccagttaaataagaataataaccctacctagcttgtgaggttattgtcacgattaaatctaataaaatgtgtgtgtgtagcttttacgatcatgaagggatattgtggtggatacatgattattacattattattataatacatgattattattaatatgagagtttttctgtggctttaattttcaggtccttcatttctctcagcgaatactgagtggcaactgtgtaggaaggacttcatttcatttatttttgtagctaatacaaactttgaggaaaagatactgaaaagcactgttcttttctttgagtttgtttttaaaatggttgtgttcagcctggcacagaggctcacgcctgtaatcccagcactttgggaggccaaggcaggcggtcatgaggtcaggagtttgagaacagcctgaccaacgtggtggaaccccatctctactaaaaacacaaaaattagcctggcgtggtggtgcacgcctgtaatcccagctactcagaggctgaggcaggagaatcgcttgaacccgggaggcagaggttgcagtgagccaagattgtgccactgcattccagcctgggcaacagagcaagactctgtctcaaaaaaaaaaaaaaaaaaggttgtgttcttctcaaccacaagttttcaaaattgctacttagatgtaataataatgtatgtgaaagtttctcacatatggtaaatgctaaattgattaatgactttctgtactgtacttacaagatagcattagaatattttgacttgctacttaattttattatataaaacataattataccatggaaaaaaaatggaaatgattttcatttgaaataattaaaagtaaaataattagtttagaatttagccagtgtgttttgtttgtttgtttattttgagtcggggtcttactctgttaccctggcatgcagtggcaggattatagctcacttcagcctccaccttctaggctcaagcaatcctcctaccttggcctaccaagtatttgcgaccacaagtgtgtgccaccactattttgttttatttttggcggagacagagtttcaccatattgtccaggctggtcttgaactcctgagttcaacctcccaaaacgctgagattacaggcatgagccaccacgccagattttatccattcttctccctccccatcatttttgttcatagctactttcctcctcctccatccttttttgttcatggaagagttccggtcatttggaattgtagttgtgcaggagaaacaaggagcttgaaatactcagctcatatctcaactgttagctcctttagctcctcattcaagaggacattgcataaaaggaagaataagtgctgtatcagctgtaagttgtgattcttagcatggactaccgcagcaggaggaataggcacatttatttcagaacaaccagaaatggaatctgcttggaaacagtttatttcgcagtggatttcttgtggaaggaaacaaatgtgatagaaaccatggaattgaaaagaatatgttaactattggagattcaagtccgtgctttgtaagcctttctgctttaagtaagatgagtttttatctctgttggatattctttgttttctgtttggttttcagtatgattcatttgaaattacaacctaactttgccatcctaaaggaaaaagtaaaggcattttggaagaattgccttattattaggagattcttgttccaataatcttcagacttaccttgtataagtcaactaaaatctctgtgcttcagtttcctttcttgtaaaatgaggaaattgggatgtgttatttccaagaatccttccaacttttggaccttagaatttctttttctgtggggggatttaggaattctttggactgtgttcctgtagagggatcttctggttgattgctctgagttcctgttaaagagaatgaagtgttagactccataccattgcggctccctcagctttgtgtccattgactacattcataatccaagtcagtagaagcacaagtgtaaacctttgtttacagaagggaccaggaaagagcatgtgaatgaactaacacaaatgtctttccttgaaacagtagctcacattgaatactaagatggtggtttgtagcattttctgtgtataacagataaggtctcattatgaaataggaaaccaggacttttttttaataccattaacaaaattcaccttcttccttggttgttaaatgtcaggatgtaaaattaaaataaattaacttaaacaagaatattgagttcctaatcacatgatcttaataatctttagagatttattaatagagactgtctctcttgaattgctagtatgtaatttgagtactaaatttggtaattgtatagtgtaataacttggagtaataattgctgggcatgtacatgtaagtaactggactataggtttgagtatcactaaagataagcttaattgttggatcaatttggctttacctttatgcactggaagaggcaattatttacaagaagaattttttctttcttttttttttttgagatagggtttctttctggaatacagtggcacaatcacagctcgctgcagcctagacctcccgggctcaaacgatcttcctgcctcagcttgccaagtagttgggaccacagatgtgagccacctcacctggctcacataattttatatatgtgtgtgtgtgtgtgtgtgtgtgtgtgtgtgtgtgtgtgtgtgcgcgcgcatatatatattttttctttttcttttatttttttctttcttgcaaagatggggtcatactatgttgctgaggctggtcccctgggctcaagctgggattaaagattatgagctactgttcccagctacaagaagaaaattaataattaggatatcagtagtgtagcagtaataattagtaataatcagaatgtgtatttgttttcgatgtttaaatgaaagtttcctgacctgatttgctatattagcatcttcagaaggtatacttggtattttgggatggcagataaggaaatagtttttttggtttgacctaaacagatgtttatctgtttaagagtataacagattgatataaagaaaagggcatttcactattaataccttttagatttgaatttgaattaagatagattttaaacataatatagttctacagaagttcttgggaagcaaaacaaagtgattactgacatgatttttatgaaataaaccaagagttcataaaactataataataaaaaactgccaaaaggtacttgatacatttctcttcccttagtcatatgcagcacacattattctaaggagaagttatggtgctttctaatttagttacttagacttcctgtagagacattcaggtttctatacaatacaattattttgcactttaatttgaacgcatttctgatgtttattagcagtaataaaaataaggactttttcatgatcttctgtatatctgtattatcattcttaatatttctgaataagtatattgccatcatctactttcagatttagcaattctagttggttggtttaatctcttattttcctcatatttacttttaaataaattttggacaccagctctgtttaccatgtaacttatcttttttcttttggccatgagtggaaggtaagctgaggtgaaggaggtaggggtaagaattgttgacatagtttactgcttactagtgagtgttcctcaatggccatgtgtttagtgagtccttaagtctagaataaacttttctctgtttaaataattcttatgtttaaaacccaatgtctttgtgatatatgttttggtttgattccatcccaacttccatcctatttagccatctttttcttagttgagcctttaaaattttgatttccgcattgccatttctttataagtaatatgtgacattaaatgtctaaaaatagaccttttggaaattgtagctgtaatatggaatggcattttcttttaaaataaactacgaagaatgttacagggtatgaaaaaataccgtgcagtccaaagtaatgcaaatcagcaaaatcagccagtatcctctcctttatcaagagtccggaaattaagacagtaggagtgtataaattataaaatcaagatgagggaacacacagattcctaaatgatcaactttatgtccttcagtaaggatcatagggtggatgagtatgtgtgtgtgtgcagacacttaaagaagatctgagtctgtaggagtcagtgaacatttcctgtaaaagaccagatagcaaattatggtaggctttatggtctctgtgacggctactcaactctgcttctatattagcacaaatgcaaccataaacaatatctaatgaataagtgtgcgtcagtaaaactttatttataaaatcaagcagttggctggatttggcccacaggccaaagttttccaatctctgccttagtttatcagcctgacttgtttttaaaggatatacagagaagaatgttcagtaagaaatacatttttaaatttaaacttcattagtagcacttgttactagttgaaatttaaccttttgtcacaaataagagtcttaaaaagaatcagtaatttttttttgtttgtttgtttgttttgagacaaggtctggctctgtcgcccaggtggagtatagtggtgctatctcggctcactacaacctctgcctcccaggctcaagggatcctcccacctcagtcccccaagtagctgggactccaggtgcacgccaccacgcctggctaatttttgtatttttttgtagagcctgggttttgtcatgttgcttaggttggtctcgaactcgtgagctcaaaccatccgcccacctcagcctcctagagtacttgcattataggcgtgagccactgcgccgagccaattttttaatcagtaatttttaataatacatagtaactctatatatcaaggtaaattatttttataggttttttttaaatcttgtgagaggtgtgttatctctggaattatgattagtataataataaaggtagcttaattaggcatcctttgagggtagtttaatgattagctcaattattgaagtgtttagcttgacttcctaattttaattaaaaatatacttgcctttgtagctttttcttaatatctttcttaatatcatatacatatgtgtaggtacatttagatagatgcctttaaagataaaagtgaatgtaagcattttattaaaatattgtgacttctttgatgttacagatgtttgtcaaaaataaccgggaaaaaactacctgaaaaatgaataatgtattttttaaaaattcatggctgggcacggttgctcacgcctgtaatcccagcgctttgggaggctgaggcaggcggatcacttgaggtcaggagtttgagaccagcctgaccaacatggtgaaaccccgtctctactaaaaatataaaaatttgccgagcgtggtggcaggtgcctgtaatcccagctacttgggaggctgtggcaggagaatcacttgaacttgggaggcggaggttgccgtgagctgagactgcgccactgcactccagcctgagcgatagagtgagactccatgtcaaaaacaaaaaacaaaacaaaaaaattcataaggctcccagaataaaattcagattcttggccactttctttagaatcagatatattacatgcctcttgttggaaagaacatatatggtaatttcattggaaactgaaattttatctactttttgaaaatattttatagttgcccactgaccactctttgcattatccagtagcagtaaatatagatataattttatttagtaaatgaggctaatttttacttgattccatttctccaactagtattcttttggaagtatatgtaaaaatatatatatgacaaataaatgaaatgataacatgctgagcatatttctttatatttattggagctatgattttaacgtgagcattcacccagaaaggtttttaaataaaaaatagctgataatttttgttttatattaatcttcatttgaaaaataaggtttgctttatacagcttgttatttgtaagatatatgacgagtcctagaactcacatggtagctattgttaaacagcaagttttaaacaattggaggtgttttaataatagtgtttggtcttgttttttattttcaaataagtgcagtctggaactttgaagcttttccttgtgaagttgtttgttgagtgcttaatcctgctctttctttaaagtacgtaatcttttcttgtgatggcagtacctctgctgtttcacagcagctctctgtcaaaggtgactataaatctggccgcatcagctattgcagtactttctgctaaatggttttcctttgtgcgtttgtctctttttgtcttttgaaaaggaaaaaaaaaagtgttgaaacagatttttccatctgttcagtctttgtactgtatttttcataatgtgttgtatttttcttttaaaattcacttaacatacttgagaaaagaacttagccattaggcatctgggaatggatgctgggataaaaagctgtttttacttatatgtgagaatttacattctttcttgttcatttaacccagaccactattatttatgactacgtagtaaatagtagtttgagcaagtggttcctttaaaagtatatttatctatcaaaagccattctaaagaattgcctgtgatgacaaatataattcatttttgcctcttcaaaaacagtcctaactccaaaacagtgaatattaagaatgattgttttcaaccactctaatttgttcacaaataataaaaaatttcttactaaaaataatagtggaaggaggtaactagaggcttattccaacccagtgaatactataattatgtattagtctgaatgttgcaattacttttctgttttggtgcttgttttattcacattaaaacaaaaaagcagttgaccgacctaaattttcagatactgttggacatttgtaaaatgttacagttgtcttgacttaaagttttaaatgttgatgtgcacatttttcatggctattcttagcatcttgttaaatttttactgcagaaatagttcattttgtagtttttcttaaatgagattagcagaatataagcattgagtaagcagtaaaaattaattttgcctactcttatcatgatgatgtggctatcttcatttttaatatattttctaaatagacttcattttttagtgcagttttaggttcacagcaaaagtaagtggaaggtacagagatattatatatactccctgcctgtcccaaaacattcgtagcctcctccattatcagcagagtggtacattgaatctacattgacacatcattttcatccaaagtccatagtttatgatagggctcattctttgcacattttatgtgtttagacaaatataattacatgtctttcatcattataatatcatacagaatattctcactctgcagagttttgtgctgttcttcgtgtagatcttgtacatatttgttagatttatatttaagtatttcattttttggggtgctaatataaatttcaaataatttcaaattaattatttcaaattccactggttcttttctggtatataagaaaatgaatgactatgttttttggtttttttttcttttttagagacagtcttgctctgtttcccaggctggagtgcagtggtacaaacacagctcactgcagcctcgatctcctgggctcgagcaatccttccacctcagcctcctgagtaactgggaccacaggtgcacaccatcacacccaactaatttttaaatttgttgtagagacaaggtcctggcatgttggccaggcttgtcttgaactcctgggctgcagtgatctcacatcccaaagtgctggggtttactggcataagccactgtgcctgggtgtgaatgagttttgtatgttaaccttgcatatcctggccaccttgctataatcacatattggttgcaggagtttttctgttcattctttctgatagctgcatagttgatcatgttatcaatgaacaaagaaagttttctttctttcttcctaatctatgtgcataccttttatttcctttgctcattgcattagctggtgctcccattacagtgttgaaaggcgtgataagagggatatccttgccttgtttctgattgtagtggagaagctttgagtgttttgctattaagtgtgttagctgtagtttttatgtagatgttctttatcaagttgagcaacttcacctgtattcgtagtttaccgacagtgtttatctggaatgagtgttggattttctgcatcagttgatataatcatgtgatttttctttttttagaaaaatgttttctaaatgttttcaaatgttgaactagacttgcatacctggtataaatcccatttggtcatgctgtgtgattctttttatacactgttgaattcagtttggtaaaaattgtattgagaatttttgcatccatcttcatgagaaggattgatcttagttttcttttctcgtaatgcctttggtattcatattagtgtaatgctgggctcataaaatgagttaggatatatttcctctgcctttatcttctgaaagagactagaaacttgttataattcaccagtcaacccatctggtcctggtactttctattttgggaatctattaattgattcagtttctttaatgtatagaagcctattcagattgtttcttcttgtctgagttttggtagattgtattttttaaggagttggtcggtccatttcatctgtgtcatcaaaattgtgggcatagatttgtttttagtattcctttattcttttaatgtccatggaaattaaagtgatgtctgtctttcatttctgatgttagtaatttgtgtcccctctcctttttccttagcatggctagaagcttgtttttttttttttttttttttgaaggaagcagcttttagttttgttgatttttctcttttgatctcctgtattcagtttcactgatttcttccttaactgttattatttattttcttctgtttactttgggttcagtttcctcttctttttgtagtttcttaaagcagaagtgattgattttacctgtttcttctttaatatatatgaattcaatgctataaattccctttaagtactattttctgtgtttcccataaattttgataagttgttttcatttttatttagttcaaaacatttaaaaaattctctcttaatatcttttttgacccaagtgttaatagaattgttttgtttaatctctacatattttgggattttccagctctctttttgttatcgatttctagtttacttccattatgttccaagagcagacattgtatagtttctattctttcaaattttttgaggtatattttatggcccagaatatattctgtcttggttaatgttccatgtgagtttgagaagaatgtgtgttttgctgttattggataacgtagactgtagatgtccattatatctagttggtaaagaatggtgttgagttcagctctgttggcactttttttctgcctgctggatctgtccatttctgatagagggatgttaaagtttacaactgtaatagcggattcatatatttctccttgcagttttatgagtttttgtctcatatattttgacactctgttcttaggtgcatacaccttaaggattgttgtggttcttggagaattgactcttttttcattttgtaatgccccactttaatgactttccttggtctgaagtctgtgtctgaaattaatatagctactttgctttcttttgattagtgaaagcatggcatatctttcttcatctatttacttttattctatatgtgtctttatatttaaagtgaatttcttgcagacagcgtatagctgggtcttagttttagatccactttgacaatctgtcttttaattggtgcatttaggccattgaagtttaaagtgaatgttgatatacttcaaataatacctaccatatttgttactgttctctatttgttgcccttgtttttgtttctatttttgtttcccgttctttttatgcctcttgtggttttaattgaccattttatatggttccacattttctctcctttcttagcatatcagtttcttagcatatcagttatacttcttttatttttttaaatagttgctctagaatatgcagtatatatttactgttaatctgggtctactttgaaagaacactgtactgcttcacaggtcatatgagtaccttgtaataacaaaaagaaattgtaattctttactctgatcacttatgtcattgctgtcattcatttcacctatatataagcatatgtgtttatatatgtaaacatacataaactggatacattgttgctgttattattttgaagaaactattactactagatcagttaagaaacagaaaagtttttatttttgcctctatttctctgatgctgccttcctttatgtagagctgagtttctgatctatgtcattttctttaagaaaaaaacaactttgacattttttgcagcacaggtcattttgtcagtttttgtttgagcaagttttcattacttcttcagttttgaaggctaattttgcagtgtacagaattccagtttttttttttttaactttctgcactttaaatgttttatttctctctcttcttgcctgcatggtttcttgtgagaagtcagaaataatttttatctttgcacctctgttggtaaggggtttttttccaatggcttctttcaagatttttttttaatctttggatttctgcaatttgaatataatatgtctaggtgtagctttctttttttttttagcatttattctgcttggtattttcttagcttctcgaatttgtggttggtatccgacattgatttagaggaaattcacagtcattattgctttaaatatttctttctgttccctcttctcctggttttcctgttacatgtacgccttttgttgttgtctctctgttctcagatactctgttctgtttttttccagttttttttctctttgcttttcaattttggacatttctgttgaggtatcctcaggttaagagactatttccttagctgtgtccagactactatggagtctgtcaaaggcattctttacttctgttaaagtgtttttggattctagcatttctttttgactggttcttagaatttccatcgttctgcttatattgcccatctgttgtttggtattgtgtactttatccattagagcccttagcatataaatcatggttgttttaaattcctagtctgataattgcaacattactgccatttcgaagtctgattctgatgcttgctccatctcttccaactgtattttttgccttttaattttttcctgatatcgggacatgatgtactaagtaaaaggaactgctgcaaataggcctttggtaatggtgtggggggaagggaagtgtgctatagtcctgtcattaggtgtcagttttttagtgagtctgtgctcttggactgtgaacttcaggagtgcttcttaatctcttctccccacacttcctcccactcccttttaggtggaataagatggctaaagtgggctggagttgcgtacttctcttcctttacttggaaggcttgggcccactggagtgatttttcttctctcaggttagttggtccctgataaaaccccagcaggttaggctctcgtaaaagtgttatttctgaaggcagtccttgttgttaagaacagaatatgctcttgcatatttaaaaatggttgccttttctcttccctctgctggtagcatgagggaattttctccaatattcattgtgagaacctgctcaagctttagaggtaaaatttacaaagatgtggggacatctctatgactgggttcccctggagtttttgactttctgacttgcctattttgagcctccggctattcctcagttacagtgcttgcttccttacccggacacaggttttcacagaggtttgtgcttatgggtttctgctttcagcaagttgtgattctctgtatccacctgtctgtctttccagtttgggggcagtggtttttcttgtgtctcacttctcttacagatctttaagaagagttgttgattttccagtttgttcagctttttacttcttgttaagataaaatgatttccatgctccttacacactacactggaaaagagaagttgatattaacttttattggtgaaaacataggtggtcttcaaaaagaggttttaaaactgacgtttatcaagtaggtgcaactatggaatggggtactctaaaactgtaattaatcagttggcaaaggctttggattgcaagcacattcatagcccataatatacaaaatgaagtgctcttcattatgttcatctttggtaaagacttactaaactgttgttttgagcatatttctattaagtcagtcagaagctaatttagatgagagtagaaaattattaaacatttggaaaataagacctgggaggagatagggaattcatgattattcaattagaaaaaaaggaaatcagagaagttatttaatagattatatgtatataaatagattatttagggaaggtaatgcttaattatacttatgtccacaaggtttcccagtgtttctcaactatggctatacattagaataatttgtggagctgaaaaaaccaaaatgtacaaacaatgcccaaacatgcttggatttcttctttagagcttctgattcagtgagtatggcaaggggcatgacatctgtaattttttgttttttaaatctttgtggatgcttgtgatatagagccaaaattgagaaatactggtttaagtgtttgacaggctgggtagcagtattcttaggcagatggtagaaaagaaacatgttaattactgtatatagagaggatgtcgttttaaagcagtcataacatcttgagatctgtggtgtaaccatgaggaaatacactgcctttttgttctgccactgcctttggagacagggctgtgaaactgttacgtgaaatatttggaaaggaactggagttccaggtcttgagttatggtgtttttccttcctagcagtttatcactggtcaagagaacgagcaatataaaagaccttgaagtctaattatggttgaaaagtctattcttaaacatgcagggcttggccaggtgcgatggcacatgcctgtaatctcagcactttgggaggccaaggcaggcggatcatttgaggccaggagttcaagaccagcctggccaatatggtgaaaccctgtctctactaaaaataaagaaatttgccgggcatggtggtgcatgcctgtaatcccagctactgggaggctgaggcactagaatcactttcacagccgggaggcagaggtcgtagggaactgtgattgcaccactgaactccagcctgggagacagactgagactgtgtctccagataaataaaataaaataaaccgaactaaactaaactaaattaaaataaaatttaaaaattaagttgcaggtgatcctcacactgatcaggttaagaatgcaaatgacgtttcacagatgagaaaactacagcacagttagattgttttagttattacagatcatttaatgtattttcattttttcctggtaacctgctacttacagaaagtttatttttttatcattagtaggataaatgtatcatgtactgctgcttttatttattgactttcatttatcccccataacagtgtggatgaagaaatcaaaggtttctgatgatgctcaatttttttaaattgtttttatgttcacacaaaataaaggacagtattggtcctaatctaaagctcatcctcttttcacaaatgcttccatcaatattctttgatcccattacagtggtatttagattttaactttgttattgaaaaataatcacattatggttaaatctcttcaagacttaggccattaaaagtaaaaatcatctactgactttttattcagagtagtaaggcaattcagagtagcaacattttgaaggcatatcaaaatacttaaaaaggtttaaattaccctgtttgctgaaagtaaaagaatgtactgaaagaaatggtaagagaggttaaccttcagtgtttctgatgaattaaaattgtgctcttgggtttaccttttttactgtggtaagaaggaacagttttcccttaaattttttcttggtttagtaggagaatatctactcaaagaaatttactttcacagaatattatataattaaacatatactattataggataacttattgtcatttctaaatgtagttcatagaaaatatcatgatccttattcttatctttaaactttgcaagatataaatgtatttccagaaacctcaccggatatcacagttctccagttgctttctattttatgtgtactctagtcttccattcctaggttggaaattgaatatgtcccttctgtagagattagaataatatcattacttttctttgccttgttcctcattgaaaataattgaagaacagattctctgaaaagatatataatcttacaaaatattaacaatttataatgaatataccagttttgatactgtctcattcttcatataaaagtagaggttgtcagaatatgtgtgtcagacattttcataatacacagtggtagtgacggtagtgaaaacttgcccaggagcgatactctcagactttatcactgactgcgggcccatggcctgtttattttactattttttgtttctactttgctgacagtacaaatcccacagggaaaaataagcaataagaggaaatattgttgtgattgtaataacaacctacaaaagtcattgaagataaaatgaatgggctggaaatgtaatttatgggattttaagggctataatggatcctagagaaaatcgagtccaatttcctgatagtgacaggattagaacgtttttccactgttgtatactttttattggttttccgaaaagtgaactaatcttacctaagaagatatgactggagcggacatggtggctcatgcatgtaatctcagcattttgggaggcttgactccagaagttcaagaccagccaaggaaacatagcgagaccttggctctaccaaaacaaacaaacaaacaaaaaagccaggggtagtggcaagtgcctgtagtcccagctgctctggaggctgagacaggaggatcccttgagcccagaaggttgaggctgcagtgagccatgattgtgcctctgcactctaccctgggtgacagtgatacccttacaaaaaaaaaaaaaaagatattactggacataaaacatgtttcttaggttttaagaaaactcattcattcattgagtgtctgctatgtgtcatacggttttccagcctttgggagtaaaaagagcagattaccacgttcctattacctgagactgtttgaaggccttccacactctaggatggaagtatagcataggctgtcaaacatagttgtgtaattcagccaaagatggtcccaactgaaggaaaaggaagtaggtacagaattcagtatgactgtataataagcaaggagggaaagcaaagaatggcatgaacatataagaatagcataagacatgctaaaatttcaaatgaactgatgtttgtgagaataattgaaaaggtttttttccaagtaatattgttacctatgaaattcttatctacttggagtaactgaagacctaactgttatattgcttttataattctgttgctaaacttttgagatttgtaccctcagtgcctattaaagttctcaaataagaaaaattgatgagttaagcaaacatggttaaggaatatcattctatagctttgtatctttacctcctaggagctactaaatgagcgaacatggagggtaattaggatcattagtacaagaagctctgatttgtttccccttaatgtgcccatttttcttgccacacaagtctgtgtagtagtgaatgacagcaggtagggttagaaagaaaccagtggttatggggaagagagagagactaagtaagtggtttaaaattccagaatgtgagggatgaaaacaaggctctcctgttgtgtggatctagagagagatcttgattcagggtttctagtattaatggtataagtcagttagagggatacagtaacataatgaaataaacccactaattctatgtctgattctgtactgctacttttctccactttagaaacactctaaaggtaaccacctttccaaaggcatatacatggtgtaaagattaagtagtatagtgtagtgggggctgtgatgaaaagaacatgccctaccttgcccatgcctacccctgctccccagaaggatccatttaactgtttctggtcatgttgctaactctaaataaaatctcttgccaatgttttttgattcctcaactttggaaattatcagttgatttcctgccttgataaatgagcatttgcctcatatctcccctcccctgtagtcttgtccctatttttactttgtttccttgttacctttgtaaatttcaataagtatcttatagttaattctgtatttcttgctctgtcaattatgcatactagctcttggctccccactttgtaaatgagaaagttaacccatcacttttccatgtttgtttcctttttcttcctcctttcctttgcgaactgtagtcacgtgtaattaatataaacttttagtttgattctaaaagttgaaaatgggtgaacagtacgtattatacctttttttcttttcctgtgatgacttttttatttcaaagtcaagtgatatcttttgagtacatttcctttcttgtacagctgcttttcttccttctcccccacttcccttatgcattggctgctgtcatctcatgcttaaatgcctcaggcttctcaaggatggagtcacatctctggagccctcttgttctcatgaacctgcctccagtgaatacctccttgttcttctctaagctgggccagtgttgtttatgtcaactgtactgttttcctcctgggctttttcatcttttttctgagttgaattcagtgtttattagattccctgtcattgccttgttttgtgtgtgtgtgtgcatgtgtgtgtctatgtgtggtttactctttcactttattggagcatagtcttaaatgacttacaaaaagaatgataagatttttgaggcccatgaatatctaaaagtctttgttctataattagatcttgtcaggggtttgcttgaatatctttataactctggggacattacttcactgtttcctagcaactagcaatttgatcatttctttgcaagtggtcgcttgtttgtttttttttgtttctttttacctggaagtctgtaggaagccttaaggaacattttagagtggtgtatttaggtggggactaatttcgtttatcattctgtgtacttccatctaaggacccatgttcattagaagctgcgtaaaatctattttcttctattatttctttgatactttctcttcttcttttcctttgttttctcttgttggatgttacatgttctaaaatgatcctttatattgcttactttttcttttatattttctagtcctttattttttggctttacttttttaaagggatcttggaatgaaatgacagcatacatgtatgttcagtttggtatcttggaccaaagacttcttttcactacttttcagtcattataatatccaaaattgggatttcctgagcaattttcatcaacatattttaggaattaatgtagattttaaattattagtgagaaatacaaatgattttaatttacaagggaaagatatttttcttgggacttttacttacatgtatttctaagaccatactattctttacatgatcaacattcttatttgtttacaagaatattgaattttctttgttgtttctcatctgttaaatacgtcttgtttttaaatcgtggatgaaataaatttaaaaagtcaaatgcaggacagaaggaagtaagtagctcacttgcaaaaatgctaaacctttgtcttgtttttttctcctcctgtgctgcatttcatttaagttgctaaataggttaaattcattcactgcttatgaaaaatatttaaatgtttcagacaaaaacatatttaagaatatcgtatgttttaatttgttttcgtgaataattctagtgtttgcttgccttaaattcattgccttttttttattacctattcatatatggtgttagtatttatcattcatacaagctaattctttttttttaacagctttagtgagatatgcttacatataatgatatgtaagtaccagcttgtcaatttctataaacagctgggattctgatagagattgtttaggttctttatatcagtttggtgattactgccatcttaataatattgtctttgttccatggatataggatattttttcatttatttagggtttctttcagcagtactttgtagtttttaatgttacaggtcttgcatttcttcggataaatttatttttaaatattctattccttatgatgttattgtaagtggaattattttcttaatttcatttatagatcattcattgccagggtatgatttttatgtatattggtcttgtattatgcaaccttgctgaacttttttattcattccagttttttttagtggatttcttagaattttctatatatgagattatgtcacctatgaataaagatagttctactttttttctttctattctgaacactttttttttcttgcacatttccatggctagaacattagattccatgttgagtagatgagtggtgagaatggacatgctgtctttttccccatcttagtgggaaagcattcagtccttcaccactgggaaggatgttagctgtgagtttttcatagatgccctttgtcatgttgaggaaattcccttctatttctggttttattgagttgagagtttaatgataaaagggtgttgatttttgtcagatttttttctacacccgttgagatatgtggttgtgctctgtattctaacgtcgtgtatgccattgatcccgtatactttttaaagatgattgtttatttatttctatttcttatttaattttgccaagtattggtcctctcagtagctgtaggctttaaaatgttttttagctgatcattttatacgtggagatattcgtaaggaggttttctcaaaattacaactagaattagaatacagaattctagctttttgcttatcttgctgggccatattgcttcattattaaaattaatttttaaacatggtaccctaagctaacatgaaaaatgactgtagtatattattatttaaattagcatattgtttactatctaattggtgtatgatgttcatttactacaagttacatttggtctagttttatagaattagaccaatctgggtttattaagtacccagttgtgaaacgttgattataaatatatgttccttttccagttttaagatgatttataataaagcaggaaataacatttacatgtgaaaattggctcaatatattttgctgtgtgtgtgtgtgtgtatgtgtgtgtttgcttgcatgtatgctataagggttggtaatttatactgtgggttctggaattacactgccttggttcaaatctcagcttctttactaactaggtgagtggccttgggcaagttacttaaactttgcgcctgagtttccttatttgtaaaaacagagcttatcgtagagaactattgtgagataatacatatgtagtagtattgtaattgacacaacttaagtgttcagtaaatctcagcttccgtgatgatgctggtgatgatgatggtgatgatgatggtgatgtacttaaaggcctcccaattcttcatttattcctcccttctcaaccaatcaaccagaaaaagccatttaggcagttagagtgacgcttgttttgaatttgatatacactactgtaaaaaaaaataaatagataaggttttactggctctggcatttgtttctgttcatgtgtcctgtatacctcttcctgcttattcattaactgctagttttatcatgtttttttttcctgtgattatttctttttttcctattgcttacatagagggtcatgtctaaattacacagccttgtgttcaaagactgtgctcctgatctgttttaactttgtcacatacatcttctcttcataaatacgccagtgataatggtgcttgtctggacatggaccatgagtctagctgtgcagaaattatctgacatgtatcatgggtcagataaattaactgatttgctttaaaaacaagaattactagtgggattaggtagatatcatagctgttagtcaagcaatagaaaaatcgagagcagaaatgtatctgagataggaatattgtattatcttcaaaagaatacattgaagtttagagttacaagctaagatacagtgacagaaaaatatatttacctttcccttataattgatgcatacatatataaaaacaaatattagaatagtaagtgaatatttcctcacttaataaatttgcaagaatgttcagtgtataatcttttggtttttcttcattttagtttcagacgtttaatttttttcatttaattgtgaacatagccacagtaagtggaaatcacttactaagcagatcttcattatagtgtttgactatttcttaataaaaatgttaactcagaaatgtcagtattaggaagaatcatgtgtgcaaggaataataattatagatgtgaaaagatatgaatgttttgtgataaattcaatgttgacattttcttgtattataatggtatgtccactgtcagggaacatttagttctagccaacatagtgaataatacattgtcttaaataataatggataccatttggtaagtacactctatgtagtttaatcctcactgcagttctgcaagctagtctagataggtcttatatgcattttatagattagagagttaagacctgtagtaattctctccagatcacagcatctaatggcagagctggcatatgaactaacttgaaaatagaggtcttcaagtctcattgtgcctcagatggttcctgtggcacaaataagtaaataagtaataaataaatgaacaaataaacaaacaacctacccaggcatctcctctggaaatttgggtgtagcaagtttgcagtggggccagaattctgataaactaccaggatagggaactacttgctctgaaatttgtgtcctttctatgttagtatctcaagattatatgtaggcattatcaattctttaaaacttaattttaaattttttgttatggagtaataacttacgagtttttcttctactgcatagggcagttttggtggtaggaccccttggggctagctgcagctgtataataatactgccttatttacaggaaaagggaatgaaataagtaactttgagaaaaaatcatttctctgagccttagatatatcgcctgtaaaacatgaataataactacctttcagaattactgtgatgattaggtgcaattatgtatttaaggcacagtgcctaaccatttagtagctactcagtaagtggttcttattgtttattaagaaattatttttatcatgttagctagaagttaaggaactatgttatatcaatttaaaagtacatttttttgtttagagtagtgtcatacatagcccaagagtaaaacgtctcttgacctctgtgtaactgactccctgaatttatagacatttttcattctctttggagaaaacattgattgacgcccatggcaatttgaagtttcaacaccagtaaactacttcttagaaggctcaaattagtagacctgttgcttattctttacttaccaagaatcagtttttctgtattcccaatctgtttatgtctattgtattagatattcttatcaggtagatcaccttaatattctataaaatgatgaagtacaaatgccaaaagagacatttttaaacaaacatctaagatgaatgcgtttgaaagacttcatgaaggtcagtcacttaaaatttccctcctgatttggtgtgcatacctataaatgactggaaaagaaatagactgtatatgaatgctgcactcgtattggttgacattatctttaaagttccttttaagaagttaaactggaaatcttatacctggatagtcatagctatgttttactcaagaaaaacaactctgatttttagttaatagattcatacttaaagaaaatgtctttgcctaatatcaaaagattagcaatattatgtatgttttgtgataatattacagtaagtataatttttatgattttctacagtaactcacttaaaaaaatcaacttattcattgattccgatctggtctcagaagagaggtttgacattcatgtaaaatgggaattataaaatatgctgattggtgccagaaagaataatttagctgaagcgattagaattagactcactatactgggtagaagggcagtttctttttctgaaaaaataaatgggtgaacggagatacagacttttctttttttggcctatcacggtgtgatttgcacattgccaatactattaatttgaattctagtttcctgcagttgtatttgagcaactggtatagcaaaaatactactcctactactactactactattactattatgactactactactactactattactactactactattactactaacaataattctaggtgtttaaagagtaggatactatgagctaaacatactcaacctgttaatttataaaatatataattaattgctagtaataaatggaaaaaactcttgaaaatgaataccatctagaaaatttctagaaagccaaaggaagaaatcatagccaataagaattaaacctatggcacaattttttcattaagaactttgtggcatgtattaatagaatatagaaacagaccatacctgaatgtgaatttatatactggcaactataattttattaaatcccaccaaattttatttttacattttgctttttactttagggtaatagttaataactggcaaaatgagattagtttagcagccagttaaaatgactaccttcttgtttcaagtttatgaaggtaaaatgcatataacagtgcctggcacatagtgagttctacaaatgtacagtttttttttctgttctgttttgatgtttttactcagcatactttattaatttagagtgtagactctggagccagaaagcttatttatattctattttcgctacttctagttatgtgacttggggcaggttacttaatttctttgtacttcagtttccttatctgtttaagtgggggaaaataacattcttcgtgagttatgaggattaaatgagttgatataaataacattttcataataatgcctaatgtggaaaatgttatataaatatttgctgttattattgtatgccaattcattttaatcagtatccatgcctgtagtaaaagattgacacgttcatttggtgaaacaaaatcatgtttcaattagaaacatagttatgtggttcttcattatatttttagcgttacttaaaaattacactgcagaaatgaaaaatgacagtaaaatcattactattcctaaaagcaacattccaaaatgacatttgcctacttttcagatttgtttgctgacttcagcaaaattggatgttctatagatccaaccaccttttgtcttctttttgttattttaagatgaagaaaataatttgggccagcataaaatgtattacctatatattatcttgttttaatatgttgctgatgttaataattcattttcttctaatttgcttgttttgtttaaacctgtaatctctgagacttctcaacagaaactattagattgatgtgtaacaaacctaactctaaatctcaacttcagtaaatggcctgtattgaatatgaggtcattggaatatttatcagcctattatataacttaccagtttctcaaaaccgaacaaataccataaactccttaatggaattaattacagctttggtcgtccaggagtagaatgttattgccagcatgacagtggagctgcagtaatccagctccagttcctgattaatgaggttagtgaattgttttaatcatttctacttatatccaaaatagggccacttctagtctttcagatttcttacatgcattcacaatttatttacatatttgaacaaaaattaatttataatggatcagaaatagtagtaattcgttttaaggtaccgtcatggacagttacataaataatgtaaaatgttttctcaagacagtgttgtaaattgaaaggcctaaggtaaatgtttttggtaaaaggtgctgcatttaaattccagggatattgaatactgtgtaacatagaactctatattaaaatattttttaaaagattgagcttattacaaatcaaagagtgtgcttctttaatgaattgctttgaaatacaaccaagaaaccagcattcattcattagaaagtagtttctgcccagagttcttaaataacacccaaatgtgtcacttaattgctttaagtaattgatgttgcctttccttttgaaagtatagaaggagctagagaaaacagcattttatcggcataggaaacactgtttttgcatattttaagagcatacgagcagctcagacaatagatgttaactgcaagtattgatagagagggaaagctagtcgtagaaggaagaaagagaaattgcttcagaaaaggctctgatctccttagatatgaggatagattgtggacattattttagtccctaaacccttaggctccgtggaataatttcttaaatgtatgtgagagaaaataaattcctgaatacctctggcttttgataaatgttatattcataccagaggatttaagaaaggcatcatgggtgtaaaaagataattatgacaatgtaaaaacctccataaaactataatccaaataatttgcagttgtctagatttttcaaggtcagaggatgtgtttttaaaaacttcagtatcctgtatagaactgtatattaggcattttaagatgttaaattttttttaattaaaatgtagaaagttgtcgaagccatatatgaagactcagattatttttcctcctttaaataatgttttattatggaatcattatactcatggttaagtttaaaaatagtttcagagagagtctgtgtacccttcttttagcttctcccaatagttacattttatataacaatagtatgatagcaaaccaggaaaatgacatcaaaacaatactattaactagactatagacctttatttagattctctagttcatatatggactcatttgtgtgtgcatgtagttcagttttatcacatgtacagatgcatgtaaggactaccacatcaagatacaggtcagttccctcagcactaagggaaaataaagaagtgccttcagcactaagggaatccctttgtaattgaactcctgctcaccctcagtccctggcaactattaacctgttctgtcttttttttttttttttttgagatggagtcttactccgtcacccaggctggcatgcaatggcgtggtcttgactcactgcaacctccgcctcccgggttcaaatgattcttccacttcaacctcctgagtagctgggacgacaggtgcttgccaccacaccggccagtttttgtatttttagtagagacagggtttcactgtgttggccaggctggtctctaactcctgacctcgtgatctgcctgcctcagtctcccaaagtgttgggattgtaggtgtgagccaccacgcctgacctgttcttcatttttatacttgtgtt

SEQ ID NO: 727 - DNA, 32746 bp, Homo sapiens
  source 1..32746: mol_type = other DNA
ctgattatagttctgaggccctagctactcactttgcaaactccaggctccggtcgcgcacgggacgaactgcggggagtgagccgcgcgggccgccgtagtcagctgctaagagcaggaagagtccgagcggcgggcggagtctgcaggatggcaccggacccctggtgagtcccgggtgagggcggcggtgcgtggagggaccttcggggaggccgggcttccggagagcaggcaatcacttcgcattgccgctggtggcctttcgggatgaggggaggggcagcgagacctttcctttactgagggggctcagccacatcccgccacacttggtccttgcaagggtggcccgggaaggagaccaggtggtccgctggagagctgaggacttacgccaaatctctgaatattcctttagcttttctgggctgcatctcgttgcggggatttcccgcccatcctggttttggagctagctggctggtgcaggcttccctggactcctataaaagtgaagtcgaaataacgtttttgtagcatgtcagtccatcccggtaaacccccttatttcacaggtggagaaaccgaggttcagaatccatggccaccagccagttagtaaccagctggggctaagacctagatcttgggggcccttccagatacaggaacctgggagggaaattgtgcacttgtttataaggcattttgcactttcttgagttaatatcatgaagtcttttcctttagcagtagcttctgcagtaaaacaatagctgataagggtgatttatttagcagttaatcccaaggactgcatgatgaaagatgcaacttttgatcccaaggaacatattgtttgatcccaaggaacgtattgttattgaacatagacttgacctttctgcttaataattaaaaacatattacagctctataacgttcttgttggaatatgtgtcttatgttgttatttctaatatagtttataattgtttaagttgcccacatcctggatattagaagaatggattccaagaacaaagttgagttacctggaatctaggttatttgggccaattatttaatttagcatttacttttttaaacctaattttaggccggacgcggtggtggctcacgcctgtaatcccagtactttgggaggccgaggcaggcagatcacctgaggtcgggaggtcgagaccagcctgaccaacatggagaaaccccgtctctactaaaaatacaaaattagccgggcatggtagtacatgcctgtaatcccagctactcgggagactgaggcaggagaatcgcttgaacccgggaggtgtaggttgtggtgagctgagatcgtgccattgcactccagcctgggcaacacgagcgaaactccgtctcaaaaaaaaataaaaaaccccaaaatccctaattttaacagttatatacaccccttgatagagaatattcaatttagagaatattgaaaatttgcaaaaaggaaaataaatagcatctttaactctataatttggaaatagccattaatgatttttttacaatgaatttgttattttaatctatatttttatatatatatataatataaacagcatttctctatgtcattggacattctttgaaagcataactttcttttcttcttttttttttttttgagacggagtcttgctctgtctgtcacccaggctggagtgcaatggcgcgatcatggctcactgcaacctccacctcctgggcttaagcaactctcctgcctcagcctctggagtagctgggactacaggcgcacgcagccacgcccagctaattttttgtattttagtagagacagggttttaccgtgttgcctaggctgatcttgaactcctgagctcaggcaatctgcccgccttggcctcccaaagtgctgggattacaggtgtgagccaccgcacctggcctcataattgtcttatgttgcaaaataatgcatcacatgaatgaccataatttatttttctcctattagttttttgtttttctgatgttttgttttgttttatcattgcaaagggagtccctttgttctatctcttatttccttgggctccctgtctagaagtaggaattagaactgttgaaagtgaagcatttatactttttttgttattctcaatcagtttgactaagtggctttctcattagactgttgaaagtgaaatagaactgttgggctcaagggtataaacatttttaaggcccttgatactgtgaaccccaaagtatctgagacaggtctcagtcaatttagaaagtttattttgccaaggttaagaatgcacccatgacacagcctcaggaggttctgaagacctgtgcccaaggtggttggggaacagcttgcttttatacaatttagggagaataatacatgaattaatacatgtaagatttatgatggctcaatccagaagggagggacacctcgaagggcgtggggggcttccaggtcataagtagattgaaaaattttctgattggcaattggttgagttattatcaatagaaacgaatgtctgggttatgataaggggtagtggagaccaagattttattatgcaaatgaagcctctgggtagcaggctttagagagaatacattgtaagtgtttcttatcagacttaaggtctgtattgacgttaatgctggttggcttttcctgaattccaaaaaggaggagaggatatataatgaggcatgtctgatcccctcttcccatcatggcctgaaccagtgtttcaggttaactttggaatgcccttgccttagagtaggggtccgttcagatggttgcgggggtgggggggggtgttgggggtgggcttagaattttattttggtttacaatacatattcctaagttgccctccaccttctggaacctaaatccctcagtttacaaatcaagtaggaaataaaggtcaaagataagggacaggcccccagttatctatttagattggtggaagctatcactggaccccaagcttcttccgcagttaatgttgataaagcattgagactttttctgttatacttcattagtttgatgaagtggctttctcattggactattgagagtgaaacagtgagacactcagctgtgctcccaaagcacaaaatgggtcgctgattaggggggtagaaaggagtatgggaagggacttgaaaaacctataaaaggccaggtgtggtggctcacacctgtaatcctagcactttgggaggctgaggcaggcggatcataaggtcaggagttcgagaccagcctgaccaacatggtgaaaccccgtctctactaaaaacgcaaaaattagctgggcatgttggtgtgtacctgtaatcccagctactcaggaggctgaggcaggagaatcacttgaacccaggaggtggaggttgcagtgagccgagattgcgccactgcacttcagcctgggcgacagagcgagactccatgtcaaaacaaaacaaaacaaacaaacaaaaacaacctataaaaacagattcaactacagctttacctttgtgttgctaaaatcataggtcattggcacctccctcagtgtctagcaatggaatatagcagttactattttaatggcctatcaaagcaagtggtaagctcgctgtttaacagaaggagcccatgatcactgtctctgaactggctctttgctaatgttaattagctttacctccagggtaactaatttgttgatgatgtaccatttccagaaaaattacagttaaaccttaatagttttatatcctgattggactttttatgttggtagcatggtcttctttgtgttgaattgctttttaaaaactttattttggaaggtaaaagatacacaaactagaatagtataatgggcccctttcatactcaccacccaatttctgtgattatcaatattctgccattcttgtttcatctctaccctccacaccttttttttttttaattttgagatggagtcttgctccgtcgcccaggctggagtgcagtggcatgatcttggctcactgcaacctctgcctcctgagttcaagtgattctcctatctcagcctcccgagtagctgggattacaagcacccgccaccatgcccggctaatttttgtatttttagtagagatggggttttgccatgttggccaggctggtcttgaactcctgacctcaggtgatcacccgtcttggcctcccaaagtgctgggattacaggtgtgagccactacgcctatgcccggcccagattacttttttttttttttttttttgagacaaagtcttgctcttgtcccccaggctggagtgcgatggcacaatctcggcaaactgcaacctctgcctcccgggttccagcgattctcctgcctcagccaccccccgacccaattactttttctaaactagtacttcaggcacctgtgtgcttgatagtgtaatgaggttgtctattgccccaggccaagggttcccgcccggactttaccgcagattggaatcacttggagagcttttaaagctccccacgcacgcccaggacaaaccccataccagttgagtcagaatgctgaggttgggaccaggcattgttatttttttaaagattccccagtgattccaacttgtttcagaactattgctctttagggctaaaataacaacacaaggactggagtcaggacacctgggagtttgtgctagctgtgtgcatttctcataacctctttagggccactctctgtgtgtaaaagtgttctctatggctctgaaattctcctttaagtctaaccttgttagactggtgttcaaggctctgcagaaactagcttctactcatctctaccattttatacttaacaggcttccagggccaccacgcagccaaatgtgccgggcacgtttccttccattcatctttgctcgccctgtctttcactaagtctagaatgtgctcctccctcctgtctgaataagagacctgctttaacttcgtggtcatccagatgtaacctcatggaccctctccatctgagtgccttggtcagcagtaatctcttccacctctgaactccagacgtacttaccacttagatcccacatttggcaggaggcaaaacttaccatatgtggatgatttttatatgtatggtctggaccccagagccagacctaggctcctcttttcatgataatatggaggaaaaaaaagtgaaatgtggcaaagtttggaccaggacccaattttccttattagcctcctgttttcttaattctgtgttttcttgtatcactgctatttttccctacacacacaaatacatgaatatatatatatgaatgatatacatgtgacatatacgaatatatagtatatatgatataaacgataggtatgtgatatatatgaatatatgtatcagtgatatatatgatatatgtgaatgtgtgtgatatatatatgatatatacatgaatggtgctgctttacagtatagtggttagtggttcaggatcctctctcaggatccttatgaagtttacagtgtaaagctcttagtataggacctggctcaggtcaggtactcagctgttactattgctataattattctagtaagattcctaagggaattgatgggcgcattttccttcatttaaaaaaaaacacttatcaagttccctcagtgttcaaatgatatgtgggaattgaaaggttttaaaaaatatattgtttactcaagcaaaaattaggacattaggggcaacaggagtttctgatattttgtgatggactggtcctggaagataatgctggtcatgttagtccacagagtctctgctttttaggagcagactgtctgataggagaaatgaaatgtgtatgcatgcttaagtattttcgtttttttgttcgtttgtttttttgagatggagtctcacagtgtcgccgggctggagtgcaatggtgtgatctcagctcactgcaaccttcgcctcctgggttcaagcgattctcctgcctcagcctcccaagtagctgggattacaggcacccgccaccatgcctggctaattttttgtatttttagttgagacggggtttcactatgttggccaggctggtctcgaacttctgacctcatgatctgcccgcctcggcctcccaaagtgctgggattacaagcgtgagccaccgcatccggtctgcttaagtattttctatatgatagaaagtaaaaatgctctgagagaagcaaaacataaggggctattgggagttcaccgtgaacccttcaaagcctccaacgctgctgaatgacaactagaagcttattaaatgttttgagagaattctggcaagctcagatgtcaggtgggtgtgtggcctttgtccccggagcatttggttttaggctagacaatacttgctgttcctgcaccctagagccgcccccaggcatctgcaagcccagcttcttcaccttgcctcggtgtcacctgatcctaagtagcagctccttatcactctctgtccctttatcctgctgcgtttttcttcttagcacctatcaacacctgacatactatgtatttaattgttttatgactttctttccttaaaatatgagctccttgaaagagggactgtgttcattctgtttactgccgtcttctccagtgcccagaacagtgcccagtgcagcggagaccccccacatgctttctcattggcagaacagcacagttgttaagagccccggctctggggccagacggccttggtttgcagcaggcagaaccacttgggcaagtcactctaactctttgtgcctccttttctcatgtgtgagttggagatggtaatggtacccacttcatagcgttcctgttttgattaagtgagttattactaacgaagccttcaaaatagtgcctggcacatggtaaataacgctcagtccatgttgcttttactggtcatgttattattcttcccctctgtttgaattctttggctagaatgaaaatgtcaaacttagacaatgcaaaaatttcttttaaagaaccttaaggccaggtgcaggggctcacgcctgtaatcccagcactttgggaggccgagggggcggatcacgaggtcaggagatcgagaccatcttggctaacacggtgaaacctcatctctactaaaaatacaaaaaattagccaggcatgatagcgggcgcctgtagtcccagctactggggaggctgaggcaggagaatggtgcgaacccaggaggcagagcttgcagtgagctgagatcgtgccactgcactccagcctgggcgacagagcgagactccgtctcaaaaaaaaagaaccttaaacattttctctttttacgactttggtgcaggttctccacatacgattctacttgtcaaattgcccaagaaattgctgagaaaattcaacaacgaaatcaatatgaaagaaaaggtgaaaaggcaccaaaggtaataccatgaaggaattagtacccaatgatttgtttgagttttgaggcctgaaaaccctcctatctttctttgaggctgtctgtgcacatgtgtgtatgatgatctatctgcttacatatgttgaattgacataacacccaaccagttagtagtgatgtaatcattgagactaaatgaggcataacacatttaagttctcctgttttactttaaatatttctaacaattttatagtctagttcaggggttagtaaacttcctacagataataaatcttttagtctttgcaggccaagagataatgtcttcaagtctttgagtttccattctcaccacaagaatagttatagtttttacattttacattaaaaatgtaaaaacaggccaggcatagtggctcacacctgtaatcccagcactttgggaggctgaggcgggcagattgcttgaggtcaagaattcgagaccagcctgggcaacatggggaaaccccatctctactaaaaatataaaacctagccaggcgtggtggcacacacctgtagtccagctactcaggaggctgaggcaggagaattgcttgaacctgggaggtggaggctgcagtgagctaagatcgtgccactgcactcccgcctgggcaacagagtgagaccctgtctcaaaaaagaaaaaaatgtaaaaaccatctttagttttgggctgtataaaaacagtggtgggatttggctaagaaatagatttttgtgaaatcacaagtttatacttgtgactatgattgaaaatagaagcctctgattcaaatctaacaccacacctttcttccttattttccacattccaaatttgtattttctttctctcacactgagaatcctagtttccaaaagcatcagtatgtttttactcatttggtctattttacagtttacagaaaatggtttcaaaattactataaggtaccacgacaaacactgagttcaaaatttgagtctttttaagtgtagactaatctactaagaatgctgaggttattatgttccaaagttattagaattattttttaactttcaagttcaggggtacatatgtgggtttgttgtataggtaagcttgtgttatggggatttgttgtacacgttattttgtcacccaggtatgaagcctagcacttactatttttcctaatcctcttcctccttccagcttcctccctctgctaggccccagtgtgtgtcatgtccccctatgtatccatatgttctcaccagttagctctctcttatatcaacagagtgaacaaacaacctacagaatgtgagaacatgcggtatttggttttctgttcctgcattagtttgctaaggataatggccttcagctccattcatgttcctgcaaaggacatgatctcgatcttttttatggcggcataatattccatagtgtatatgtaccacattttctctgtctggtctaccattggtgggcatcaggttgattctatgtcttttgttattgtgaatagtgctgcagtgaacatacacatgcatgtgtctctttttttctctttttttttcgagacggagttttgctcttgttgcccaggctggagtgcagtggtgcaatctcggctcactgcatcctctgcctcccaggttcaagccattctcctgccccagcctccagagtagctgggattacaagtgcctgccaccatgcctggctaatttttgtatttttagtagagatggggtttcgccatgttggccaggcttgtctcgaacacctgacctcaggtgatccacccacctcggcctcccgaagtgctgagattacaggtgtgagccaccccacctggccacatgcatgtgtctttatggaagaatgatttctattccttcggggatatacccaataacgggattgctgaatcaaatagtatttctgtttttagtacgttgaggaattgccacaccgtcttccacaatgactgaactgatttacactcccactaacagtgtataagtgttccttttgctctgcaacctcccgagcatctgttattttttgactttttagtaataaccatgctgagtggtgtgagatggtatctcattgtggtttcgatttgcacctctctaatgatcagtgatgttgagctttttttcctgttttttttggcagcatgcctgtcttcctttgaaaagtgtctattcgtgtcctttgtctgctttttaatggggtggatttttcttgtaaatttgcttaagttccttatagatactggctattagatctttgtcagatggatagcttgcaaatattttctcacaatgtgtaggttgtttgttcactctgtggatagtttccttttctgtgcagaagctctttagttgattagatcctatttgtcaatttttgcttttgttgcaattgcttttgatgtctttgtcctgaaatctttgcctgttcttatgtccagaatagtattgcctaggttgtcttccagggtttttatagatttaggttttacagttaagtctttaatccatctgaagttaatttttgcatgtggtgtaaggaaggagttcaatttctatcttctgcacgtggtagccagttatcccagcaccacttattgaatagggaatccttcccccattgcttgtttttgtcagctttgtcaaagctcggatagttgtacgtgtggccttatttctgggtactctattttttttttttttttttttttgagacggtgtttcttctcacctaggctggagtgcagtgacatgatctcagctcactgcaacctctcccttctggcttcaagtgattcttgcatctcagctacccgagtagctgggattacaggtgtgtgccaccatgcccagctaatttttgtatttttattagagagagggtttcgccatgttggccaggctggtctcgaaatcctgacctcaagtgatctgcccgcctcggcctcccaaagtgctgggattataggcgtgagccactgtgcctggtcaactgagttctctattctgttccattggtctatgtctgttttggttactgtagccctgtagtatagtttgaagttgggtagcatgatgtttccagctatgttatttttattttattatttctttttgagacagagtcttgctctgtcgcccatgctggagtgcagtggcacgatcctggctcactgcaacctctgcctctcgggttcaagtgattcccgtgcctcagcctcccaggtagctgggattacaggcatgagccaccacttccagctaatttttgtagttttagtagagatgggctcttgtcatgttggccaggttgatctcgaactcctgacctcagatgatcctcccgccttggcttcccaaagtcctgggattacaggcatgagccactgcgcccggcccagctttgttctttttgcttaggattgccttggctatttgggctcttttttggttccatatgaattttaaaatacttttttctagttctgtgaagaatgtcaatggtagtttaataggaatggcattgaatctataaattgctttgggcagtatggccattttaacgatattgcttcttgctgtccatgagcatggaatgtttttccatttgtttgtgtcatctctgatttctttgagcagtgttttgtagttcttcttgtagagatctttacctcatggttagctgtcttcctaggtattttattttctgttggcaattgtaaataggagtgcattcctgatttggcccttggcttgactgttggtgtacaggaatgttagtgatgttttgcactttgattttgtatcctgagactttgctgaagttgtttataagcttaatgagcttttggactgggagtatgagatttcctagatataggatcatgttgtctgcaaacaggaatagtttgatttcctctcttcctatttggatgccttttcttttccttccttccttcctctctctctttcttttctttcttttccttcctttctctctttctctcccttccctttcctttttcctttcctttctcacctcttttctcctctcctctcctctttttctcctgcctaactgccctggtcaggacttccaatactatgttgaataggagtggtagcagagggcatccttgtcttgtgccagttttcaagtggaatgctgccagattttgcccattcagtatgatgttggctgtgggtttgtcatagatggctcttattattttgaggtatgttccttgaatacctagtttattgagtgtttttaacgtgaagtggtgttgaattttatcaaaagcctttcctgcttctattgagataatcatgtaagttttgtcttatttcagtttgtgtgatgaaacacattttttgttttgcatatgttgaaccaaccttgcatcccagggataaagcctacttgatcgtggtggataagctttttgatgtgctgctggattcggtttgccagtatttttttgaggacttttgcaataattgattctttttttttctgtcttatgttatcctttgtttctgtttttattcattttcaggagttgctttttccaactttttaatttaattttaaataagtaaaacatttacattgttcagaagtcaaaattatataaaagtgacactcaaagtcttgttcccattcctctcttttctaccttttcttaacctacttcttctaaataaccattttcattaatttctggtttattcttcctgtgttactttatgcagaaataagcctctatgcgtgtgtatgtgtgtgtctctgtgtgtctgtgtgttatgtttttccttttatataaaagatactctttcgggccaggcgcggtgactcacgcctgtaatcccagcactttgggaggcctaggcgggtggatcacctgaggtcaggagtttgggacaagcctggccaacatggtgaaaccccgtctctactaaaaatacaaaacattagccgggtgtggtggcgagcacctgtaatcccagctactcgggaggctgaggcaggagaatcacttgaactcaggaggcggaggttacagcgagccgagatcgtgccactgcactccatcctgggtgacaagaatgaaactctgtctcaataaataaataaataaataaataaataaataaataaataaataaatggatgaatgaatgaatgacagatactcttttgtatcttggtcttttcacttaataatatagaaacctctacatttcatttcatattccttgttcttctttagcgctgtatgggtactctattgcgtagatgtaacattctttatttaacctgtctcctaaggaaaggcagttaaattgcttccagtcttgagttgtgaataacaccgcagtaaataaccttgtcctttaaaaaaattatgtgcataggtgtcttttaaaggtgagttctcagaaccagggcatatgtaattttttttttaacctgatgtgaaatcccccctcaaaggggttgtcactcttgccaccccaccagcaatgtgtgagcacttctgtttcttcacagcctggccaacagagggtgtgtgaatcttctgaatttttgttaacctcataagtgagaaatggtgtttcagtgtcgttttaaatttgtatttctcatataatgagtcaagtggagtgtgttttcatatgcttaagggccatatatatatatatatatttttttttttttctgtgaactgtcttgtcttttgcccatttttctactggattattagcctttttagtcttgatcttttaagagctcctcacgtattatggagattagctcctcgtgataaattgtagttatttcctttcctttatcatttgacatttgacttgcttgtggtagttttgtcgtgtgaaagtttttttttttttttcctgagacggagtctcgctctgtcgcccaggctggagtgcggtggcgcgatctcggctcacttcaagctccgcctcccgggttcacgccattctcctgcctcagcctcccaagtagctggggctacaggcgcccgccaccatgcccggctaatttttttttgtatttttagtagagacggggtttcaccgtattagccaggatgatctcgatctcctgaccttgtgatccgcctgcctcagcctcccaaagtgctgggattacaggcgtgagccactgcgcccggccgaaagtttttttttttttaaatgaagttggctgtcaatctaattgcttccatatatttagtcatatctaagtttttgctgtttgcaggttataaaaaatttattcctgctttcttctattaaatatatggtttcatcttttacacgaagggctgctatctatttaactagtgtcatcttcttggacagttagattctttctaattacaaatgatttttcagtatagccaaattattgcccatgttgaaataaattcttcaatgtagactttctggatttgggttgtataacattttaagccttttgaacacatatattgcagaatgacatttctacaccaattttgattatcttttaaaaaaatctctactaggtaaaaatactatgttacagtagtttaatatgcattttttattaagtcttgaatatctattcttttttttttttttttttttttggccagatggagttttgcttttgttgcctaggctggagtgcaatggcacaatctcggctcactgcaacctccgagcctcccaggttcaagcgattctcctgccacagcgtcccaagtagctgggattacaggcacccgccaccacgcctggctaattattgtatttttagtagagatgaggtttcaccatgttggctaggctggtctcaaactcttggtctcaagagatcctcctgccttggcctcccaaagtgctgggattacaagcgtgacccaccgtgctcagccttgtttcttaatttcaaagttttctttttatatatgttaactatattaagctttgatctggtatatttagtataaatgctttctctattaacttgattttgtaagtgacattgtaaaacatgtaccggtttttaaattttatttgaaattatcagcatgtttgttggtgatcttttctaacgggggaggggatatcatgcttaaaaaggccttttacatgcagaggttttataaatacttaattatgtaaattttccttaagctttttttctgttattttgttttgtgtgtgtaaatctttgaaatacttggtgtttactttggtgtgtcatagctatctaattttattttttccccatttgttaaattatgaatttctttccctcatatgaaatagttcatatttaattcactggatttttatacagctacattgtttctgggccatttgttatgttgcactactgaagctgttggtgattgccagcatcagctattgtagttttttgtaatcactttatatctgattaaggcccctatgaacattatacatattcatggtttttattttccttcatttatccttctgtcagagtaattttctaaaacttcatttaaaaaaaaaaaaaccaaactgtgctgtgccttaattatcacctcttctgcaataaaagaattccaaatggaatttcaagtagacatgtatgtttatagatttaaattggggaaaacttacattttcacaatattgagcgtttccttttgtttcttcagcagtatttattgcacagttaactatgtgccaggcactgtgctagatattttttagattttgttggtattgttaatgaagttttaaaataacaatttaaaaaactctccctaggtattacttaaatttaggaatgcccttgattttttttcactttatgactaatgaccatattgaattcttctaccgttttttttttttttttttgagatggagtcttgctctgtcgcccaggctggaatacagtggcatcatctttgctcactgcaacctccgcttcctgggttcaagccattctcctgcctcagcctccccagtaactgagattacaggtgcgcaccaccatgcccagctaatttttgtatttttagtagtgacagggtttcaccatgttggccaggctggttttgaactcctgacctcgtgattctcccacctctgcctcccaaagtgctgtgattacaggtgtgagccaccacacctggcctctactgtttttaatagtctttcagcccggcctctactgtttttaataatctttcagtctgggcgcggtggctcatgcctgtaatcccagcattttgggaggctgaggtgggtggatcacctgaggtcaggagttcgagaccagcctgaccaatatggtgaaactctgtctctactaaaaatacaaaaattagctgggcatggtggtgggtgcctgtagtcccagctactcaggaggctgaggcaggagactcgcttaaaacgggaggcggaggttgtagtgagctgagatcactccattgcactccagcctgggcaacagagcaagactctgtctcaaaaaaaaaaaaaaaaaaaatatatatatatatatatatatatataaaataataataatctttcagttgattctcttaactcttccaagtagactattatcaatctgcaaataataataatctcatctttccttgtagtccttgtatttttctttaatttttcttattgtattggttagaacttctagagcaaagttaaataatattgtagttaaggcagtagtgttctattcttagtttttctttcttttttgtgtttcttttgtttataatttcccctgtactgtactaatcatatgtttattctgtttttaattattaacaccatgagctttattactagatttttctaacatcaaactgttcttaaattactagaataatttctacttgttgatagtatatggtcctttttaatgtaattctgaatttgctttgctaatattttttgaaaagatttttacatttataattcctaagtaagattgacatgtggttatctctgtcagtgcttgttacccaggttatggtagcttaaaatgtgaattaggctttccatctttttttgtgctctagaaagtgtctttaattatgataatgacattttttcctgattacaaaagtgatcattttcttataaaatattagaaaatcccactacttagatagaaccatggtgctttcatggtttcaatgtttgtatttagttcctgggttgttttttctctgtttgggtgatattttattttatgacttgatgtttttttcataagctgtgatggatatctttctatgtgaacaaatagagatttgagccataatttttaatggctacatactccgtctttcatctcccaaatgcttttgtctttgattttgtggactcctcttcgtaggcctggtgtgtgtggcgcctttttgtttgcttgttttgcccttttatcttttttttttttttgagacggagtctcgctctgtcgcccaggctggagtgcagtggcgcgatctcggctcactgcaagctccgcctccagggttcacgccgttctcctgcctcagcctcccgcgtagctgggactacaggcgcccgccaccgcgcccagctaattttttgtatttttagtagagacggggtttcaccgtcgtctggatctcctgaccttgtgatccaccctcctcggcctcccaaagtgctgggattacaggcgtgagccaccgcgcccggccgctcttttctctttgagtgtagagagatctgctttccttggtgtttccccacaacattgtaggtgattgttccttggttcccaggggtatggggatagttcaggttagacttttcttggctgctggtgccttggagggctgctggatgtgtgcagtctgggccagtctctgacacactggctggttttccttggtgtgattctgcaaatccaaggagggagtccgcttgagttatataattgctgcttttgacaaggtagcaaaggaaacctgtggtattctgtgtttttaacatatgtctgatttcatccgtggttgaatatgttttaacttacacaggcagttttttcacatttccaaattcctgagagactctcttctcgccctcttctccatcctttaatgtaacaggttagagtcacggacaaaaatttcctgtaggatgattggagaaaatgcgcaccctcctgggaaaagagtcatgtgtggttagcattcctcttgcataaaaagaacacattgccgtaaaacgtttcattgggttataaattttaccagttgttcagagagcctggtggggatggtaatgggactccatgctttgtcgtttgaagcctggttcagagaactgtgggtttttgctctcaaatgaagactcggggaacacaatttcctgcgtggttccaaggtagatacataggatcaatggggtagaagctcaggtgacaggattcagctgatggtgagagcacactgacagtttctagtcagtatcggggttccagtctggcttggctcaccacttggccaggttgtggagcgggtacaagctgtaggttggcagctgggccagggcaccactgagcctccttccagccctgagtttgtcgtgaggggctgagtatctatctcttccagcccttgcttggttgcatcatagcccgtgaagtagtgtttacgtgatgtaattttgtggattctacattctggactagaatacttaggatgtgttcttttcttttcagcttaccgtgacaatcagagctttgttgcagaacctgaaggaaaagatcgcccttttgaaggacttattgctaagagctgtgtcaacacatcagatgtatccatgtaaacatttccacctcttttctagagtgggaggaaaagcagtcgtattttaagaaaggaaggaatctgggccacccagattttcccacagcttgaggaagacctggtttccaaaatattgcctgtaatcttgatttctattttaagtgtctgttacatgttttacagtgaatatgctggcaaagcaagacctaccgagggaattaacttatttgggtataacctgtacagttcaggaagctaatgttttccgtcagtgcggtatttacggagccccacactgctctctgtctagaccgccttgaccatggctagctactgctccaacaggaaaacttccatgatcatcctaagctgtgattccgcttctgggagtttccagagtttttaatgatccatttattttcggagtgggcaataccagtagaaaccatacatctctcctctcaccacctgccccgtgtttatgtagatttgagatgtgccttatttttcctccagaggcacagacactgcctctagtatgggagtgtgaggggaaggggtgggatgggacttcttgaagcaagttatgccatcatcttaacctcctaccaagtgttaaaatatatatatatatatatgtatgtgtatatatatatatatatatatatatatatatatatatatatatattttagaaattcataatctgggccaggtgcaatggttcacgcctataatcccagcactttgggaggccaagcacttgaggccaggagttcgagaccagcctggtcaacatggtgaaaccccatctctactgaaaatataaaaattagctgggcgtggtggtgcacgcctgtactcccagctactcaggaggttgaggcaggagaatcacttgaacctgggaggcggaggttgcagtgagccgagatcgtgccaaagcactccagcttgggcaacagagtgtgaccctgtctcaaataataaaaaaagagaaattcataatctgatcaatttaggaaaatatacgtgacttgttacctacactaactttttacacccaagtgtatattggtttgaaaacttacctgaaactggtcttctctcatcatttctctaaattgtcagtaggtcatgccaaagacccaatttttggtatttcagggaatggatattgccagattttaaatataaggaaatacaggaatacagctttttagataaaaaaatggaaagtgttctaaaaaatattttcccccattgtaacacctttatatcaccaggaaagttggcttagttgcatggttttctagacattcaattacggatccactaaggtttcaaataaaagtttaatttcaaacaattacagccttatttttaacgcaattggaatattctgagatactttaccttccatctggtgtaatttgttacagcacagttggtctatcatataaagggtttttattttacccaaatcaacaagtcctaatatactcactgcaccattgtgcccagctaatttttttttttttttttgagacggagtcttgctctgttgcccaggctggagtgcagcggtgcgatctcagctcactgcaagctctgcctcccgggttcatgccattctcctgcctccacctcccaagtagctgggactacaggtgcctgccacctcgcctggctaattttttgtatttttagtagagacggggtttcaccatgttagctaggatggtctcgaactcctgacctcgtaatccgcccgcctcagcctcccaaagtggtgggattacaggcgtgagccaccgcgcccggcccaatttttgtatttttagtagtttcagatgggcaggactgtttcctctgctttcggtactaagcactgggaagtctacacatggcaaggtgtgtaaattcatgttagtgttacctaaaacacatatattagaaaggtaactacatattgtttcatgatataatatgcatttgcttccattaaggtaacattattagtcaccttatttatgtgctaaccctatagggcaagaaaaatatacaaattaagagcttttacttttttctattaataataatttctgctagttattagagagtactaagaataccacagttataattgactttgttctcctaaatgcttacagtctgaccatctgttgaaatcttgcagatttttggttttgtggtcgtcccagaattacttcccaaattactgaattaagcagtaagcatcaaaaacactgaacaagagttatttaaaacattacaaaaatatttaggggtcttaatgtggataatttagaatttaccaggagacatcaaaaattcaactggaatacaacaactttctttaaaattctatttattttttcaaataattgatctatttctactgtaacaacctgcagccagtactagggatggcatttagctaatccaccccatgagggcgctcataaacctgtttattttcagggaggccaactttttttttttttttttttttgagatggagtcttgctctgtcgcccagactggagtgcagtggcacgatctcagctcactgcaacctccacctcctgggttcaagcgattttcctgcctcaacctcctgagtagctgggattacaggcacacgccactgcgcccagataatttttgtatttttagtagagacaaggtttcactatgttggccaggctggtcttgaactcctgacctcaggtgatccaccctcctcagcctcccaaagtgctgggattacaggcgtgagccactgcgcctggccacggaggccacttttgatgtaagggaaaggaggtagcttgtatattatgaaggcctctttttaattctccttctgttcctcccatcttcccttcccctaacctccttcttcttcccaaacatttaaaataattctctggcagttatcttccagatttaagatagatagcaatctatgagtcctaataatctcatattattagatttttttggtgcttccttctcttctttacaaagaaagatactgaggccaagttaaactttacaccgaaagtcactgatgaagttggagagataacccggaattccagcagaggaggtttgttggtttgtttgttttttgtttttgtttgtttgtttgttttagacagagtctcgctctgtcacccaggctagagttcagtggcacaatctcggctcaccgcaacctccgcttcccaagttcaagcgattctcctgcctcagcctcccgagtagctgggattacaggcatgtgccaccatgcccggctaatttttatatttttagtagagacggggtttcatcatgttgtctaagctggtctcgaactcctgacctcatgatgcacccgctttggtctcccaaagtgctgagattacaggcatgagccactgtgcccggccccagcagaggagttttctacactgaggagaggattcttggagagctttagtcattacccaggaccccacaactaggaaatggaagagccaggttcaaacacaggctgtgtggccccaacgtgaattgtttaaaagctgaattatactttagtagaaataatacagtcagctgtcacctggcatgtcttcaactagaattctctatgaattgttgtgttactggactgccaagacaaatcttgtttataatacaaatcttcaagaaccgtcttaaccatccgaagattaaacagtgttcattgtggtttattaggtatactttatgatgttgagaaaaatgtttgttcataaatcaccaatggagtgactttttaatcctttttttgaggcataattaatgtttggtgacttttttaatgtgaatatttgaataccacatttccttactgtgctggatagttgagaatttatgatacttaataaattgatgcctttctacacttgtgaacttgtccaaagaacactaggagttgccagaaaagtcctgtgcaaatgctttctaaacaatgaaattcatggaattaaggcatgagatgttatgctctctcctgaaaaagtatttttctcctggcaagaataaaagtcaagttaaaatggaagttctgtgcttttgaatccattagcgtgcaattaataaaccgaagtcttgcagtcagagagtttaaatttctgaaagaccttaacatctgttcacagtgtttctttgagataggaactataattgtcttaccagctgagaagagggttatgctgtgggaggctgcatatgaaattccagatagtactaaagatacttagtaccatcttcttagagttggcttcacatgaaacttatccttttgttggcatttcacaggaggcagcacctttacttattttaaagagaataaagaaaatctctttacagaggggtttgatgtcaaaaagtactttggtgtcttgggagaaggcctttggaaataagttttaaaaatctataaataaattttctcatcccaggcactttgggaggccgaggcgtgcggatcacgaggtcaggagatcgagaccatcctggctaacatggtgaaaccccgtctctactaaaaatacaaaaaaaattagccgggcgtggtggcgggcgcctgtagtcccagctactcgggaggctgaggcaggagaatggcgtgaacccgggatgcggagcttgcagtgagccgagatcgcgccactgcactccagtctgggcaaaagagcgagactccgtctcaaaaaaaaaaaaaaaagaaaaatctataaataaattttctctactctattttttggaaaaacaaagataggtaagtagatagataagtgcatagacagatgtggtgattactacataacaaaccccaatggatgtggttgtggagaggctgactgaacagattttacaggtaacccctggtagctacagtggaggtgaagtggttttcaaacactgtccctgtctattggttttcactgatacttggtaacatgagaaaaataagaagaagatagtgtttgtgtagcagaagttttttgatttataagaactttttttctgactttttaaagacaggatctcactgtgttgcctaggatggggggcagtggcaaaatcctagctcagtgcagcctcaaattcctggcctcaagagatcctcctgcctcagcctcccaagtagctaggggtccaggtgtatgccaccatgcccagctaattttttgtagagatggggtctcgccatgttgcccaggctggtctcgaacttctagtctcaagcgatcctccaccttggcctgcaaaatgtttggattactggtgtgagccaccatatcaagcctgttttctgatttatacagaactgttacatggttctttctagtttttggtgttaaaatctccttgctttttcaccatgatagtaaaagtagatagttttgtttctttttttttttcttgaacatccatacctggcaaaatgtataattggtaattctatataagttacacccccccctagtttttttggacatattactggtccacgaaacctgaatgtctaggtgccattggtatcgtgggaacaacatcggctctgaaagcagacagaactgagattgaagaccagctctgccacttaccaaggccaaacagcagttcagcttttctggaccttagtttcattatctgtaatgtaggaataatcatactttgccaggttattgtacaagttgaagaaaatcttttttcttcacaggactagccccccataatggtgggtgttgaataaaaggtggttaccaacacccctggggaagttacttaacctctttgtgcctcatttgtggaatgggatgctagaagtccacctggcgtaaaggattgttgtgtaaggatgagattatatgcatacagggtgcttcacatatactaagtcctccttgaggattagctgctattgattattttatcattattgtaaagatttcagctaccattgagaatttacaggtcatcctttctttgtggagtttttaatcatgcatgatggttatgtcaaaactcacaaacaatgatggtattaaaatagtacttgcaaaatgtgatcagtgctttgaggaaggtaaggacttggcctggtacatcataaatatttattagagtttgttgacttaaaaaaagaaagccagaaaagtcttttgacctctagaaccttaaactgttcccttgcagttcttcttttttggcatggagaattaattatctgcaaacttcttccttcgccagagcagctctttcacaaaataaggcttacctaaattctatttttttttgagacggagtttcactcttgttgcccagtctggagcacaatggtgcgatctcagctcactgcaaccaccgcctcacaggttcaagcgattctcctaccccagcctcccaagtacctgggattacaggtgtgcaccactacacctggctaatttttgtgtttttggtagagatggggttttgccatgttggccaggctggtctcaaactcctgacctcaggtgattcacccacctcaacatcccaaagtgctgggattacaggtgtgagcgactgtgcccagcctaaattcttaagccttctaccaaatataagagaaaatccaggagctggagtgggattgggtgacctgtggatccagttgcatatttaccccgctccatctgtggttcaaatgctcaccaggctacagcagagaagctggacttatgcatgctggtagtaggtatcagtaatatgaaatcaggatccagttttatttttatttttatttatttattttttgagatggagtctcgctgtgtcacccaggctcgagtgcagtggcacgatcttggctcactgcaagctccacctcccgggttcacgccattctcctgccttagcctcccgagtagctgggactacaggggatccagttttatttacaaccttacatatccatgaattggctataattacatgtacaatcagcatagccaaggacaaagtactatgatagttagctcttctcttccttttctttatctgtctgttctcttatcttcttccttggctattcaccaggttggtggaagaggaggttccccagcactggccactgactgtgtgctgtactacttttttttttttttgagatggagtctcactttgttgcccaggctggagtgcagtggcacgatcttggctcactgcaacctctgcctcccgggttccagcgattctcctgcctcagcctcctgagtagctgggactacaggcgtgtgccaccacacccagctaatttttgtatttttttagtacagatggggtttcaccgtgttgtccaggctggtctcgaactcctgacctcatgatccgcctgcctcagccttccaaagtgctgggattacaggcttgagccaccgcgcttggcctgtgtgtcctactttctacttgtccttagcatcactcaggcacactgtttccccactaccctactttacccaactgctacgcacctgtccacatacatgctgtatagattgtttcctggatgatcctttgacctcttactaataacaacccttacatagcaagggtgctatgcagatggttcattaatcaatttattctcattccatctccctcctccccatctccttatgctctgttctctccgtagattaaaatataaaacaaagaggcagcatgttcctaattggattgttttccagatttacagagtctctgggaatattctgaattcgtactcccagtattgtttttatcaggattctaagaagtggcaaagttaagtcagcatctcaaggtggagaagtctgcagaatgtttggtggaaaagccatgagctagggttgaaagagctgtcacctagcatggctgttaacccaggcaagtgacttagccatgctcacccttaatttctggtcagcaaaacaagagaactgggatctttaaggcctcttctagcatcaactgtgtgggtttctgttctttggttactcatctacaaaacatagtcatcaagttttactgtttctgaaactgatgttctttgttagctccttcttgacgtaagtttaaatctgtaactagtatctgctgattttaaaatgtacctttattgtttttattacaaaaaatattatactttctactgatacatttctcattagttattaccaatgactcctctttctcttccttattctatcctgtctcatctcattctttatagttaagtgttaatggttggtagctagtatctcagacttttctaggcttgaaatatatgcatatgtaaacataaaattcctttgactataaagggattatattatacatatggttctgaagcttgtgtttttattaattagcagatgatagagacaaacattaggaaacaatattcagtgaaacatcagtctctcttatacccttaatcctcagttgtccttccttagaggcaatgtttatatatcagaaattttctgtgtgtatatacacacatatatagttaggatttttttttaacaaagtgggagcacactactcactgtttagctccttgctgctgctgtttttttcccctcctttggtttaatgttatattttgtagattattccatgtcaaataattcatgtaaacacttagtaagtgctcaaaaatgttaattatcattatcagccccctaaacagctttcctattctttttttaaggctgcaaaacattccattgtttacatacactagttacttattgatatttccaatgtggctattataaataatggttcagtggacatccttgcttctaagtccttgtaggactgtatctgaggaagaaatgtctgttgaaagactgtaccttttatattttgttaggtatttagaaggcagtctagcagttggttgaacctgtttgcattcctatcaagaatgtatgaggtggccgggtatggtggctcatgcctgtaatcccagcactttgggaggccgaggtgggtggatcacttgaggtcaggagttcgagaccagcctggacaacatggtgaaaccccatctctactgaaaacacaaaaattagctgggcatggtggcatgtgcatgtaatcccagctacttgggaggctgaggcaggagaattgcttaaactctggagctggaggttgcagtgagccaagatcatgccactgcactccaggctgggcgacagagggagacactgtctcaaaaaataataataataataaagaaagaatgtataaggtcaggtgaagtggctcatgcttgtaatcccagcactttgggaggcaggagggtcactttagattaggagtttgagaccagcctggccaacatggtgaaatcctgtctctcaaaaaaacccacaaaaattagctgggtgtggtggtggacacctgtaatccctgctacttggggagctgagaggagaattgcttgaacccaggtagtggaggttgcagtgagccaaggttgcaacactgcatttcagcctgggatgatagagcaagactccatcttaacaaaacaaaacaaaaaaaaaaaaaagaaaagaaaagaaaaggaaagaatgtatgagagtgtctggttccttgtccctttccaaaactgtcttctcagtttcctaatctgataggtggaagtggtatcttgttttagtgtgtatttcttttcttttcttttcttttttcttttttttttttgagacggagtcttgctctgtcacccaggctggagtgcagtggcacagtctcggctcactgcaacctccgcctcccgggttcaagtgattctcctgcctcagcctcctgcgtagctgcgattgtgcgccaccatgcccagctaatttttgtgtttttagtagagatggggtttcaccatattggtcaggctggtctcgaactcctgacctcgtgatccacctgccttgacctgctgggattacaggcgtaagccaccacacctggccagatatattttaaaagtgtttgttagctttctccactcattcattttatggcagaagttgtttccaaacatatcctttactgtgtttcttttttcttttttttttttttttttttgagacagagtctcgctctttcaccaggctggagcgcagtggcgcgatctcggctcactgcaacctccgcctcccgggttcaagcgattttcctgcctcagcctcccgagtagctgggactacaggcgcacgccaccacgcctggctagtttttatatttttagtagagacggggttttaccgtgtttgccaggatggtttccatctcttgaccttgtgatccgcccacttcagcctcccagagtgctgggattacaggcgttgagccaccgcgtccagcccttctgtgtttcttaacataccacacacatagacacagttcagcctaaaaacaaacaaacaaaaacttgtgtctgggcgcactggctcacacctgtaatcccagcactttgggaggctgaggtgaacggatcatgaggtcaagagatcgagaccatcctggccaacatggtgaaaacctgtctctaccaaaaatacaaaaaattagctgcgcgtggtggcacgtgcctgtagtcccagctactcaggaggctgaggcaggagaatcgcttgaacccgggtggcggaggttgcagtgagccgagatcgcgccactgcactccagcctgtagacagaacaaggctccgtctccaaaaaaaaaaaaaaaaaaaaaaaaccacttttgtagtttgcatcaagaaagctagtatataaaactttgtacttagtccaagggaagtggcgccggttgttgacagacgccacttccctttttgcttcatgcgcacgcgccgcattctcgtccacctattggtgaattgtaggtttctttccaaagactacatttcccagaaggatggttgtttggttttttttttttaaccatcacttatgaattgttgtggaaaagatgttagagactatttagtgttacatataaagaaagagagatcccaaaaggtgaaataactggttcaagagcatagatagtggaatagggctacaactctgcctctggggctcctagtctagcgtgtttgctagattcacacattaaaatgattctctttgtaattttctttacaaatcatgcaatgtatttaaatagtgaactgatggtaacaatttatagagcaaatctgttgcataaagtagcactttataaatatcctaggtgtgttaatagatattaacatggaagaaagagagcaatatagagaacttctctcccccagcgcccccacttttttaaacagagcatcttagggtattaatatgtaggaaaatgccctggaacactgacacacacatataactcaaaacctaaggaatcactgagccaggttgcaccattggcaggagaagtcatttaaatttggtcactggggctgggcgtggtgactcacgccttgtaattccagcactttgggaggccaaggcaggcagatcacctgaggtcatgagttcgagaccagcctggccagcatggcaaaaacccgtctctaataaaaatacaaaacttagccggttgtggtggtgcacgtctgtaagcccagctactcgggaggctgaggcaggagaactgcttgaacccgggaggcagaggttgcagtgggccgagatcgcgccattgcactccagcctgggcgacagagcgagactctgtctcaaaaataagtaaataagtttggtcacggggaggaaagtaatatttacctggtatatttctcaatgaaaaacttgtgtcatgatccacgtcagtgtttataagtgcctctgcgatggtcctgccaaggtcctttacctgacggcctggtgaaggtgaaggtcagagcaggaaaaacgcaagagtggtgcgcatcccttctgggtagtagtgattacagtctgtaaaagccacaactgacttgaagagctaacttaataatgtaatagttaaaacgaggtcatttattcaccattgaaccttaacaagatatctgcagaacacagcttgaaggggaccgaagacagaacctcttggatgatcttgtaactcgagagagactacttctggcatcctttaagaatgagggtgccgaaccagatctaatcaggtaggatgtttttatttacagggattacttggtgggcgaagacttctttgcagatactacagctgtttcctgaatggcttactttaggaattaatcaaaatctattctattcatttatggtgtttgactataattttctactcaatttagttttcgttaatttttgtttgtttgtttgagacagagtctcgctctgtcacccaggctggagtgcagtggcgtgatcttggctctctgcaagctccacctcccaggtttccaccattctactgcctcagcctcccaagtagttgggattacaggcgcccaccgccaccgtgcccgactaattttttgtatttttagtagagatggggtttcaccgtattagtcaggatggtctcgatctcctgacctcgtgatccgcccgccttggcctcccaaagtgctgggattacaggtgtgagccactgcgcccggccagttttcgttaattttctgggtttagtaaaccaggtatgttcagctgaatcccatcttgggtggaacatactaagggagactgtgggtgaagtcagaacatttctttggcattctttggttgagttttctgctttgttaactgccttctaaactcctgaggtcactacttctctgtgtgggcaaagcagttttttgtttttttttttaattggcatattgagaacatgagtcctaataagactggtccggggctcacagaggcaaaggagttggatcctcctccccattcttcgccagtgagtgattcacacttcaaagagctgacagctgctctgagcccggttctgctggaagacctggaggacgggtcgggctttccaaggctgaggttgatgaaccgtaaattgctacctctttagaattggcctccccctgtttctagaacttccttagcttcatcgtgggaaccatcacagaaggcaatgagcttgggtggaaacccgcctctcctcatcttccacgctagggttgatgcatttatcgtggagaggagcttgtttctagttggtttccagttaggaatagtgtggcttcccaagggcagtggttttggaccctagccgtgcattgtcagactccacctctgacaggtgaaccagagtgggattgcggtggaggggcagaggggcagggaggtctcaggtgattctaatatacaacccagattgcaaacaactgcctagaacaagctgaagaaaatgaaactgattttcctgtgggttccagtcttctcaggagcggcgatccaaggttccatgaagaaactgtgaaatacaggaaggtagatgaaatgttaagttgcttctgtgaagaaatgaacctaagagtcagttagggaggggtgatactctgttggcagtctcctgggcagggtttaaatgaagatagaagcctgtgctgggccaatctactgtggttcccaatatttccctggcatattcagtcccagggtacaggggtgaagtatgtggatgaaggtggtggtccaggttggtcaaagagaacaggtgagcaaaggaatcaaaggtgaaaagaaagtactgtcgcctgggtgcagtggctcacgcctgtaagcctagcactttgggaggccaaggtgggtggattgcctgagctcaggagtttgagaccagcctgggcaacaaggtgaaatgccatctctactaaaatacaacaacaacaacaaaaaagtagccgttgtggtggcgggcacctgtagtcccagctactcaggaggctgaggcaggagaattgcttgaacctgggaggtggaggttgcagtgagccgagatcacgccactgcactccagcctgggcgacagagcaagactccgtctcaaaaaaaaaaaccaaaaaactgtcttctagaaggggctttacactgaaggcagagtctttttagtcaagaaattaataaggacataggtaggacgggga

SEQ ID NO: 728 - DNA, 32746 bp, Homo sapiens
  source 1..32746: mol_type = other DNA
agctagccgcctcctgcaggggctcgggagagcaattcggcggcccctgcagggcagctgaagccatggaagcctccgcaggtgatgacaaggaccccggggatctccgggcccaccgcccagctgcacccgccgcagtccagagtgccgagtgccagggggtggggtgggggccgcgggccgcgaggaggaggggacggagcacccggcaggcagcctgccctccaagccttctggctgcagcggcccagctgtcagcggccgggggctcagctgcctgggtgttccccgcccgcgctcacccgccccggtctatctctttttcctaaccccgcaggtcgctgatcagggccaggcggctgcagcagcgactgcagaggcgctgcgccaagccgggccggagtggtgcgagccggcggggctgcggagggccagtggactcaggtgaggaggccgcggcggagcggggagctggccctgcgctgcaccgcggcaggtgggggccgcttgcaaccgctcgctgcggtagaatcccttggagggcaccagcctaagaggggttaatcgtgactcattcttaccctcccttcattcccctacatccctttaagcgcttccctccctccccctccctgaaatgtaagaattagagggtgctgattgcagcagagaagatgcccaaagtgggtgattaggaggcttttagggaacccaccccccaattttatttgtcttccccttctggcatttggcaaacatttaagcttctcttttccttcttggaggaggagcaggggtacctgggggtgggagaaggatgagaccccacccccaccccaaggtcaagtgccaatgactgcttccatcccatctttccctctgagaagcatcagggccctgcagtagatctggggaaaaaatgcccataagtcctagagtggacgatctgagcctccgtctccccggagcttccctgggatgtgaagccttccactccccagccgggatctgggctgtttgcaacacctactagcctggggagccccatattcccttccccaaccctgcagactgaaagagaggccggtcacatgctgcccgtttcctctgccttctctgcccatctggtggtgtcgggatgggctggaggagcttcttagaaaaaggtgatctctgcaggcagagtcgtgtaaggaaagtgccagagattggggttctaggcccttaacttgctagttggccacaagtagccattttaaaattctctaggcgtgggtgtctgtctgctcatctgttagatgcaggaattggattaaatgatgtgtataattttagtatatcactcaagcagcttttacatgtcagggggacccctctgctaaggcaatttaaatttagtttcatgaaataattggggtttcctcagttgatctctttcaactctgacttcttaagtgaaacattgaccttgtgggcctcaaggagctggaggtgccagacagtcctatgttgacatccctgagctgccaagtgacttcccttcccccagcctcagtttctccatctgtaaatctaggggtacagcccgcagagggctgatgtgaaaattaaatgagatgtatgtggaagcacctaaaatagtgcctgtgcctggcacatagtaggttctcaggaactcaggacttgggagataggctgggggaagagaggaagaggtgactgcttttagtcctgttctcctccccatcccctgcctgtctcttccacacccctgcagatggtgtccctgccaggggtaatgaatgctgaagtgtattgggtcaccaggctgagggcctaggcaggcagcaacatttccactgcaaaggttgtgacatcattctagcaaatgatggtcccaaggaggactgtagcccagcattgggtttggaaaatcctggcatccaagggcggagtctctgagggaacagaagcagcagattcttgtgtgctggcagcagggcagggatcaggtcttccggatctcacatgaatcccactgtggctctcttgccctccctggagtgtctccctagagtcaccctgaggccaggcagtcaagtttttggtgcttgtattttcgattctttatcttccttcctgctgtcattttcagcctagcactcaagcctttctcgctcctctttattccagatacctcctgccttttgacagcatgataaaggaggttctccatagggttgggtggggaattttgctgctgcaccatttgggccaaaagaagttgtcatgtccccccacccccaccctaaattcctatttggcagaggccctatcattttcctttctctatctccagcctctggcccatgagtaggcccaaagtaggtgctccgtaagtgttgaatgaaacaaacttgaggaaattatgtccctaagccaactaggttagggagaaactgtaggaatgtgttgattatgtaggtgaaagccctttttagtgtaggacatcgtccaggttgttggttgtcattattattgctattacagctactgttattattgctattgttggtgattaacagatgcttcgcctactcctctagggctcctgactagaccaaaaggggccagatgtgcctgggagggtggtgatgttggcaaaaagggatccagatggtgccagctggtgtgagatgactgtgaagggaggaggattgggaagggaatgattctagccattttctgtgtttgagggaggagagcaggtaattagaatcaagtgggacaacatggatatgcagtagaaagtcaggagacccaggtcccatgtcccattgaaccactgccttattatgtgaccttgggccagtcaggcctcccctcaaggcctctgtgtgcccatctatataatgatgggactggactaagtgatttctaagaccccttctgcttctgacattctgtcgagtggattttgttaaataaaaatcagacaactatgattaccctcaacgtcatttatgaagtcccagaccattaactgtctcaggtaatccttaaagaaaattatgaccatttcaaagatggggagactgaggcttggagagactaagtgacttgctgagggttgcgcggctagaactgctatccgacaccaggtctgtctgcatcgtccccttccaaaggtttcgctgcctcttcatgcataccttgctgatgctgtgagctgtgtgtgcacttgcaggtgggaacaggggtttggagaagaagaagctgtgaacaatttacggtgagagatcaggcatttctcccaggtgattggtgcagggtacttcctggttgaaaactgtgtgaaccaggaatggagagttttcctttcaccgtgagccctgctttgctgatgtttggtggatgcccctttaccgaggataatggttaggcctgaatgacagtcaggacagacacacttttttagtcttcttatgtgttgtgctctgttttacacaggttcaataatttactgctcagatcatcccattatgtaggcactatatataaatttacccatttttataagtgagaaagccagggcagagaggcgaagggtcttacccagagtcgtacaaccagtgtatcatagaacctagaaaatgtttagctggaagtgcactggactgggtgtccaaagggttgcttttagtctgagccctctcaataactgaataaccttgggtcagccagtttccctccaagagttcccatccctcaaatgatctgcatgcatctactggctccgaaaggcctacatgcacccttgttccagtattggaggtggaggggattccttaacttgctaaacattgaccagcatttgtccttatttattagctaggccctgggctaagtgcatagcatgcaggaaagagtaaattgtgagtcctagtttcaagaagctcatatctaacagagggagacagacacctaaacgtgtagatatgagaaaacatctggaagctataagacatactgatatgtgtgtgatggggtggggggacagagagaggggaatgatctttcctactgagtgggtcaggaaggctttagagagatgatgccattgtcatctctatttttggcattgagcttgtgaataataatttaataataatagtaaagggttctactcgatttagaatgtttccaaacagccctaaagacttgttggctcctgtcctcatcaatctagaaggtggacatggagtctaggggactatccaagctcacgctgtaacacaattttgatggaactatctgtttgtcccaggtagaccagaacctttcctgtccttaaagccttctagaagcaggattttgaaattcctctgacaaagactgtcttgtgcctataatcatctgataggcttggggaattcttcttcatgtctattctaggcatcccacctgtctggaggaacgcctaacacctgagaggtgaagtcatttgcctaagattactcagcagggcttggttcataactctggcctaacggggattgcatttctaagccacatggggtctttctacatctaggccaccagaagccccaggtgccagttctccatttgatgggcagctggtgctgtgggaagtctcgatgcaggtgatgtgaagctcaagccaagggccatggagaggctgaggcctgtgcaccccaggctgctttgcattaatggacagatatttatgacgtgtttgtcgcatactcagcactgtcctctgaattgaggggctgagccaaccaaaagggagtggctggaaagcagcctggcacagcaggaagagccagcaccgaggagtcagtagacttgggtcctcaccccagctctgccgttgacccactgggtggccttaggtcagaccctttgcttttccacacctgcaaaatgggagtcagaggtgatgatatctaagagcccttctagctctgagtggctaacaattcagaaactctttcttcttcttcttctttttgttttttggaggcagagtcttactctgtcacctaggctggagttcagtggcatgatcttggctcactgcaacctctgcctcccgggttcaaatgattctccttcctcagcctcctgagtagctgggactataggcatgcgccaccatgcccagaaaatttttgtatttttagtagagagggggtttcaccatgttagccaggctggtctcgaactcctgacctcaggcaatccatctgccttggcctcccaaagtgtctttcttctgttctgtaatgactttagggggtaaaagggtggataggatacatataattgttacttgaggaagaataagataaatataacaaaaggcatgaacaaatgctttgtggatttgctggagggagaggggttgggaaagactcagttcaaaagccacctcttcaaaaatagaatgatgcagacatggttagatgaagttatgagtttttgtttttttgttttaaccaagaggagtaacagaagattgctgtcatactgggacaggaagtctgtagcagagcagtgggtcttggacttagatttcacaaagaccagtgcatttgggaatccatcctcggttagctagctttttattttaccagacgaggacattcagatgacacttagggtcctctttaccatcactatcataaaataagagaaagaacattttaatatttctattcccccaagtaagaaggccatgttatcagggggaaaatggtattccttcaaattgaatacattttgctttgttaaaaactcactgcattgtctgtattttcctcatttttgccacagactcgtgttctcgtgtttggctctgcaattgggctgctggggtttgaattttggcccagttatttttttccctcagagcttctgtttcctcacctgtaaaactgggaaatgatgttgtctcctaaggtcattaggaagactttacaccaaaatgaaatatgttaagcaagggatgtcaaatgtagttgtctacaaaggtaaaacaggccagttgggctgtttggggattgtagcacattggaaagtgcttgcttgaaagaggcagctgctatcctgctctcaccattcttgcctacaagaacatgtgcccaatgttgtcagatcttctgatttataagacagaaatctgcatatttgtttgtgacatctcctaatttttaaaatgtagctgattaggcaatatttttaaatgcacatattaaaatgtgtatgtgaccggccatccgtctgtgacctcagatgtaaagttttagatgctgggcacatagtgctcagtcattattggctggcccacagatgaaggcagagaaaggaaggaaggctggaaaggcagcctaggccagggaatgccttgtttgcatggctagggcatttagcctgactttggcagcttgtgatcttctgcttctggctcccccagcttcaaaggccctgatggtgccccttcccttttggcagcactgtcaggattgagtctctggggactgaggcctccagatacctctgtaccccttgaagctggccctagccacgcctccctaccacagggtctctggaagcttggtcggcagcttcagaagagggaacttggctggtggcctgtgcagcctggcacagaagccacctttgagaaagaggggtgcagagagactcctggcaggtcctcagtgggtggggtagttcctgttctttggaagccacgccggccttgcagcagagcttctgccaccctctccttgggttgtgctgtggtctggacagcaagcagtctctctgtggacagctctgacacatggtccctgcagaggaaaagttgggatctggttgcaaagagagcctagagtgttcttagagaaggacctcagaggagctcttaattagcagaagaaaccctaccacggtttcagggccttctaggattcagattaaagccactgatgacagttcacattttttgtggctccagttaatcaaatattcatcaagcacctatcatggtaaggttctattctggccacggtgaaggaattcaaagaagtatttacaaccattcattcaaccaacatatactgaggatctgctgtacacacaggcaccaagatgtggtccctaccctcagggagctgtttaggttggttggagggaaggaatgtgggtggtgcacagggcctgacacatagaaatattaacaacagctgccatttgactgtgtgtcttctgagtatgaggtgctagccctcatagcacctgttttagagggtggatgggaactgaactgaatcttcatctgaagcactcagcactgtgcctgccacacagtgatatagctgcattattcgtagcctggaaaattgggcagatgcagaagaaaggcaacgtaaagatgggacggagaaaaaaagaagcagtcaaccaatccgggcccacttagcatatgttatccttgttttatagagaaagacactgagactcagagaggggaggaaatttgttcaaggttacacagcggctgtgtagcagagcctacacttagatgccagtctctttggcatcagagctgcgttcttccctctaagccatactgcctctaaagaagtgatcggtgaacaaaaaataaataactaccatttgttgaacacacacaacaggtgaggcactgtgctgcttgctaagataggaagttttttaatagttgaggaaactaggaccactagaaagaagaaactggcccaaagttatataagcacaagtggtggggtggggactctgacacaggtatacaggatgtagcttcccgcaccgtagtgacaggatagcagttttcaggggtaaaggtattcaaagtgcaggcatgggagagagtgtgggcttctgcatgccctgagagatagataccagaccagtccttgcaagtgccagcaaggaaggcaaattttggctcagttcaagggatgaaagggagaaaattctaaaaaaaaaaaaatctagtaacaaaacaatgtgttttgagagctggcacctcatctctgggctgctcacatagggctggatgttctaggaggaattcttgccataggatggagtttggaaaggctgtgcttgacagctgtaacccagaagatctggaatcctagtatagggctggtcacagatgaggcaagcagtgggtgctgctggcattcccaggagaaagaatagctgtaggttgagactatctgagaaggcttcccggaggaagaggaggaactagaaaggatctaaaggctggcactcgggaagggagcggaagaggactgtgtaaggactgtgagtctgaggacactgagctctctagtctggctaggccatcggtctggtgcccttcagcaaagggcagctccctgtcctttctggcttttaaaatggtggaagcagaggtacagtaaatcctgggtcctgcgtctttcccaaagcctcattaggcagccagtttggcaccacctcccccgtcttgcttcccacacatcccctctgtatgcattgtaagattcgcctcccttccagcctccctttcagaagtggcggactttggacgtgcagccccagagggagaaggggtgcgctaaacatcacctcttctgtgaggcaagtgtcatgaggcaaactacgtcttctggcagtggccacctgcctcacttttggggctcagagccaaagggggaggagccacagctccatccatttaagccaccctgggccttctgggagccactcgcttcctcagagccaggcctggctcatttccagttctgccacttgttagcctgggacttcagacaaattgtgttaccccctgggccattttctcatctgccaaagagaaatcgattattcctgcctgagaggagacgggatgatctgttgtggtcccctgtgggaaagagcctggtatatagcagatgtccccacgaacactgcttcctcctgtctctatgggcctcgattgcttttctgaccctctaagtcccgactcttgtccaggttaatgaaaacagctacactacatgtcgggcacaggggatatgtgaccttatagcatcttcctgacagcccaggtaaggaaagcattattatagaaaaggaagctgagttataggaaatttaagcaatttgtccatggcccacagctgttacatggtggctgagctaccaaatacctgattccagggcccaaactctccctgcccctcattttgctttctcattctcttcctctccccatttctgttctcttaggcctgtgaatgggcattccttcctcctcaaagcttagctgggctcttacaccaaggttgctagccctggacctgataggagtgaggtggtctaagagctagagaaggacattttgatagtttatgacttcagaaaagtccctgagtgacccttggacgtgttctaccccaagtcagcagtatttcctccctgccattcctttctacctcaattacttttacttgccctgtttcctctgcctgaaattttcttcctactactactgctatctcctcatgttcagatctgtctcaaggcccagctcaaacactgtctttcaggggacccacttccaactcccacagctccttcacagagcccaggctcttagtcaccagcctaagctctgtgctctcagaggatggagaggacctgacccctccacaccctcctgttccctgactgcagagaccagccctccctgggtggcacgcagggcccagattggagctgtagaccatttgagccaactgtctgtggcttccttctggagagccccttccccctccacaggaggggggctcctcactctggggccgtgtgtttgagagagaagccctcagaggttgttaggcctggtagaggtcagttttgtaaggaatccctgaggccagccatccagatgaaaaagcccaggatccaagcctaggcagcactggcccccttgccctgctctctgagtggttgggaacagagagcgcaggttggagttggatacacttggactgctgtctccgtctctgccgtggactgactttgtgactgggcaagtcacttaatttatctgacccttagtacctcaatagtaaaaatgggcatcataatcataacgtaggcctcctgacagcaaagctggcatgagaattaaactagattagaaatcttctatgtgtaaagcccctacctagcccaggggctttatttattaaacacagtaggtgcttaataaatgccagtaccctttcatccgtgttgtataggaatcactttataacttccctactttcccaaagtgccaacacatcttcatttggcagtgagctccctcctcactggaggtattcaaactgggtccgggtgactgcagaacaggaatgttattccgagaaacagaacttcagtcagatggatgttgggctttgaaaccttcagattctttcctgtccagaatttttgcgattctgtgaagacttgactcagatctcgttggtcaattattagaaatcagttggggttcggcttggatgtctgttttgcacagataaaagacagacttctgctggagttgtgaactaattgaaggctttctcccaagaggtggcaagggtagaaacaaaatcaggcccaggaggaaggactccaagggatcctggaaagggaatctggctgggatattaggggcatgtggcgaaatgtttaggttgaatttggggaaggctataccacggctgctagaaataatttcctggggcaaggattgtttgatttgtctctgaacccccgtacccagcacaaaccaggtacacagaaacattctagaaaaatgttgagtaaatgacaagaagctttggtgtccctatcagatggaatcctgggttgagggactccttgggactagaggccatgtgggagtttcatactctgtgtgtgtatgtgtatgtgcctgtgtctgtgtgtgtctgtgtctatgtgtgtgtatgtctgtgtctgtgtgtctgtgtatgtgtgcctgtgtgtgtgtccatgtgtatgcctgtgtgtgtgtctgtctgtgcctgtgtatctgtatgtgtgtccgtgtgtgtgcctgtgtgtctgtctgtgcatgtgtgtctgtgtgtgtatctgtgtgtgtgtcgtgtgtctgtgtgtgtgtgtcagtgtctgtctctgtgtgtgtctgtgtatgtgtgcctgtgtgtgtgtgtctgtgcctgtgtgtctgtgtatctgtgtgtgtccgtgtgtgtccatgtgtgtgcctgtgtgtctgtctgtgcctgtgtgtctgtgtgtgtatctgtgtgtgtcgtgtgtctgtgtgtgtgtgtgtcagtgtctgtctctgtgtgtgcctgtgtatgtgtgcctgtgtgtgtctgtgcctgtgtgtctgtgtatctgtgtgtgtcagtgtgtgtgtccgtgtgtgtgcctgtgtgtctgtctgtgccgatgtgtctgtgtatgtatctgtgtgtgtgtgtgcctgtgtgtgtctgcgtgtgtgcctgtgtgtgtctgtgcctgtatgtctgtgtgtatctgtgtgtgtggcgtgtctgtgtgtctgtgtgtgtgtcagtgtctatgtatgtgtgtctgtgtatgtgtgcctgtgtgtgtgtgtctgtgtgtgtatctgtgtgtgtctctgtgtgtgcctatgtgtgtgtctgtttgtgtgtgtatctgtgtgtgtctctgtgtgtgcctatgtgtgtgtgtctgtgccggtgtgtctgtgtgtgtgtatctgtgtctctgtgtcagtgtctgtgtgtgtgtttgtgtgtcagtgtctgtgtgtgtgtatctgtgtatgtgtgtcagtgtctgtgtgtatgtgtgttgtttgtgttgtttgcctggcttcctaagacaactcctgtttgctatgctttctgttttctttcctccactctttcccatcctcctccttctagctttattgaaatatagttgatatacaagcttcacatatctaaagtacagtgtggtaaattctgacatatttctatactgatgaaaccatcaccacaattaggatagtgaacatctccatcgtccccaaaagtttcctcccccttcatcctcaggcaattactgatctgctttctgtcagtacagattacttcacattttctagtagtttatataaatggaataatataatatgcacatttttggtttggctttttcactcagcataattattttgagattgatgttgtgtataccaatagtttattccttttttttcttttttgttgagacagagtctcactctgtcacccaggctggagtgcagtggtgcgatcttggctcactgcaacctccgcctcccgggttcaagcaattctcctgcctcagcctcctgcgtagctgagattacaggcatgcgccaccatgcccagctaattttttctagttttagtagagacagggtttcaccatcctggtcaggctggtctcgaactcatattccatagtatggagaaaggataaatcatcatttgtttatacattcatctgtttgttgatggacatctagttttttccagttttttggctattacaagtaaagctgttataaatgtatgtgtataaatctttcaatggacatacactttcctattttcttgggtaagttcctagaagaagaatggttgtatcatttggtaaatatatatgtaactttttactgcccaagtgtttccaaagcatctgtaccatttgacatttctactcgcggcattatgggagtttcagttcctctacatcctcatcagtacatggtatggttagtcttttaaatcttagccactctaataggttcgtaatggtatctccttatggctttaattggcattttcctaataactaatgatgtcgagcatctttttgtgtctatttgacagccacatatcctctttggtgaggtatcagttcaagtattttgcccattaatttttaaaaactgggctgttggccttcttattgagttgtatgagagtactttatacattctggatataagttctttgttaaatatatattttgcaaatacattctcccagtgtgtagggcttgccccagagggcctcgtggaagtttcttgctcagtgtgtatgagtgagtgagagagacactgatagaaagactggtttcctgagagactccggcttctttttttttttttttttttgagacagggtctgactctgtcagtctgtcaccaagcctggagtgcagtggcaccatcacagctcactgcaacctccacctcctgggctcaggtcttattttgcaaacagggagcctaagtcccttagatgccatgaaggtttagtgtcagagcccacaaacagctctgatgtccagagaggcctggctggcccttgatgccttttattcctgtgaccctgggtgagtaaggtaacttagcatccttcatcttgtgaagatgggcacagctgtgccttcctgtgggtgagagactggagtagagctctccagccgaccctcccaacagcaagggcgaggagcgtgtgtcagtgccaatgccatcaaaaggccttttggaggcagagatggagaggcgaactattcagtaaggaaggtttgttgagctccacactgaccagattggggcatggactggccggagcggtgcccacagcttttctgcgttgctctgagctgtgtggagcctggacgaggacctcgtgacttcttctgccagacctctttctcagctcatcagcatcacacacacatgtgtgtgtgtgcatgcacatatacatgtaggctcagtaactcccaaagggtgggagactggtctacaggtggggatgtgtgtaaacagcctgtatcttactggtgcacgatgtgctctagctgtgaattctgtctcccttgaggctacacacaagcattcaggcctggattgaacttggaaaataagtaggctgaagaggcttgggagagctttccaggaagacagcactgcataggcagaagtccagtgaattttcaagatgaattgcaaaggaggtgtgtgggaaatgaggctgacaaggcagaggtcgggttgtcacaactgctgtatgaggtgggatgtgttatctccactttatacatgggcagactgagggacccagaggtcaagagaggtatgccttaggtctgagtcatactgagtggcagagctgagtgtcctggccccaagtaccgtggtctccatactgtaccaggctttgtcccaagagagtgagaggatggagctccctcaggggccctcttcctggttcctggattgatggaatggggttctcagaactgtcaggtcatctgtttggctgcctgacttccctcagcaggtgtttactaagcctcgatttcgaatccagctctgttcctagcacctgggaagactccaagcctctgaaggcatgatgcccattcctcttttagcccttgcaggatagcagacacctagccaggttcccaagcccagggtgctgctgttcacaactcacaggccagaactgtctctgcaactctgggtggagtggggggtgtgtttgtatgttttaaggtgggtatattgccacccctgaataaggttctattattgagggaggagggatagaatattgagtaggcagcgaagctaacccacacagaggcctgggcgtcatcacaattcttccctttccgtcattccctacagcctatctcttctggggaccctcaagagtctacttcctaaatttctcttgaagccacctttacttctgtcacctcctcacctccactctcattttaacctctatagccttcgttaaaacgtcgtcatccctgacctgtcctggtgcttctcttcatctcttcccagtccatacttggcagagctcgtacagggttatcttctgtaatataaatctgaccttgagccttaggcctgccttgaccttgaactgtaaacctgactttgaccttaaatttgatcagaacttttttctgtaagctcaaaaggcttttttctgctggctcagcccttctctctactctccctatgcccctacactgtgtggtctagcagtacccagccccctgtagctctcttactcttcatgactctgtaaatgctaacccctattcctgcacagaatgtggaatgctcctccacaggcagctcctgggtacctggagaacaactatgcacctgtcctccagagctctgctcaagggcaccagcttctgagttctgcagagaagcccctctctcttctgcccaacccctcagtgacacgtgcttcgattatgggactattggcagaggaggaagtggcacacaatagacacttggtaaatattgactgaaacagccatgccagagctgccacacagataggaaatgctgtaattagaagggggagtagctttgggaggcttgctttcaatctgggagctaggccatttctgagcttggcctcagttccccgcctgcattgccatggggcagagggtggagggtggagggtgggggtgaagatacttgccacagggccggagagacatggaaaaatcatcttggatgatttgtatgtctgagcttgaacactttgccttttaaggctttggctaagtgctggtggtttgatcaagtagaaaacccagctaataggtatacattatgggtaggagaaacaataggcaacctagcccttcgggaaagcagtttggcagcacattcatacttttcgaccctataaatccattatcagggaaccagcctaaagaaataattctaaatataggaaaataattattcacaaagatacctattgtaacattatttttgatagaaagtctaaatgttcaacagagagggaggctaaatgaaccatgacagacccatcaaatggaatactatgcagcccataaaatactttttataaaggatatgccatatgggcgattcttaaactatggtacattttgaaaatatacaagttatatttttgccacggctataactgtgtaaacataacaaccccttgccccctaaaaatatctgtgcttagaaaaaggcctgagaaggggcagcaatcaaattaatcagtggtttgagtagcaaaactggaactggaaggcttttaaatgggtatgtactacttttacaactatatttaaaacttaaaaattacccagttggagctaagggagcccattttagttcagtacctttctggtataagttattcatttgtctctgggccttggtttataacatacgggaaagaaattactgttcatccagcagtgtgtgtgccaggctctttgcatgcaccactcagttcagtcttcacaactgaaaccccattttacagatgaagttaaagctcgtggtcagccctatgctaagaactaggtttccagcttgattctgccctaggacaaagcccctgctctttacatcctatcaggggcccctaggatgcctgctctcgggaaaggggagtgagagggacacctgagagtgctatgtccacagagccagtgtaggctgagcctttcccctgagtttattttacaaggtcggggagatcagtgtttgccagcaagtgggaagaagagaggctttagctgcatgcagccagagatggtgctctctgctttacctccctggccccaccagccttttcctgaaaaggatttccccctcagcccaagtagcccattcttcttacctgacagctgggaaccaaccaaaagaacattgcaaggctgcattctcagcctccttgtacatcccagtgccctggattcagagccgtaagcctggggttgcagtcctggccccactcctgatttactgggggccttgggcaagtgccacccacccccacgctgacctcagatcttctacctataaaatgagactcgaccagaaaagagactccaagctccaatgccgtgccactaacaaacaacacagaccagttataagagcaagagctctgttaagaactctgacagaaaggagcaacttctcagtctcagacaatcactgccatgcaggaatgcaggcacagagctgaaagatcttttaatttgtttgagacaagccagaaaacatggattttaaaaaaatatgaaatctcttagtttataaatatcgactgaattggaatacatatacatgcaggtctttaagcatgatacggccgtgggctgccagtttggaatctccgtagtcacctgtctctgagcaccttcctaccccgaaggtaggcaccttctgatacctggactcctggtctacaaacacttgctagggccagtgctgggcagaataggacccggggctgtgatagcaagaaggtcaatctgctgagaaggaggagaaggccctaagtttgcttttctggacccccaggctcgcctttgcccaatacttagccttcaaaggctctgtccagctaccttctagaaatcctatcccagctgtgacatgcaccgtgtaccaagggcttgctgtatatgctcagcagcacaacctcccttcgttgtcatggcagtgattaacctcatgtacacacaaggaaattggtcctgatactgatgggcctgagggcacacagctcccagctgagctcttgcatatagtcattacagcccttagaggggaccctctggtgctattttttcaaagatgaataaaactcttccagctcataacctagcaggagagacaagctcactaaatagaacactgtgtgtagaaaggactataataatataaacaaagtaccacaaagctttcttcccccccttttgttgacttgctaagaggcctacacttacttgggtggtgacatcaacccagatcagtgcacacccccttattcattcagcaaagatttattgagggcctgtggtggcctgacactagtctaggcataagggactaaataaagcataaaatgggcatccatccttacctctctggagcttatattctaaagacataaaataaatacatacataaatatgttagctgttgctaaggacggtggagaaaaacgaagcatgggaagaaagaggagtgctgtaggaggaggggttgtattttaaacacagtggtcagagaagattcactgagagggtgaccttggagcaaagacctgaagcaggagagagaatacacggggcagagatctgggagaagagcattccaggcagaaggaacagcatgtgcagaggccctgatgaggggatgtgcaagaaggcagggtggctagagcagagtgaatgagggggagaggtgatgaggtcaaagagataagcgggggtcaggggagggatgcacagaactttacatcagccgaagaaaaggctttagcctctattgaaaggaaggaccgttggaggggttttgagtagaggaatgacctgatccaatttgtgttctaaaaggatccctttggctgctgggcagagtttgtaggagataatgagacctgcatcatccaggagagagatggtggcttggaccagggatggagcagtgaagatgccgaaaggtgtcagattctgtgactgtgtcgcctcagtttccttatctgtaaaatgcatacactgtgcagggaataaaagctgacaggcttttctgatagacgtgagagtgttggcctacccgactggaatgatgggattgccattaactgaaatgagggaagctgcagaaaaacagatttttaaggcaaaatcagaaattcatattttggatgtgttaattttgagatactctgttagaccaaagtggcggtgtcctgaaatcctgttgtttggtagacaatgaccggtttagggtttttctttccttttctttttttgcaagtagacttaagaaagcataaaatgaatctgtagtcaggaacctctcagatacaaacgagtatagtatttcagattaagattttggacagggagaaagatgtaatatacatgaataacattgagaataagaatatattcaggcgaataaataattactgctatttacggagtgctgtccctatgccaggtccttgctaggcatttcacacgtgttattgctcattgtgattatactcatgcacaactgtaattagccccatttgagagataaggagaatgaggcttagaggagtaaagtggcattcccactgtcataaagatggtgggtggtggagtttggaattcagagttccaaatccagtcatattggatctaaaattcagttacatttgatgttcaagccgtggtttctttctgtcgggttagtctgcctgtcagcaaaaggggaaaactcgttctgagatagataaagggtggccgggtgcagtggctcatgcctgtaatcccagcactttgggaggccaaggcaggtggatcacaaggtcaggagtttgagaccatcctggccaatatggtgaaaccccgtctctactaaaaatacaaaaattagccaggggtggtggcaggcacctgtagtcccagctactggctgaggcaggagaattgcttgaaccctggaggcggaggttgcagtgagccgagattgcgccactgcactctagcctgagcgacagagcgagactccatcttaaaaaaaaaaaaaaaaaaaaaaaagataaagggcctttaaaataggacatagtagtttgtagaatctcccttttaaaacattttagaatgcttcactttggctaaattaagaggtagggcagcttctccagagaaggaaaacttattaggagaggcatttattaatcacccaccctcttccagcaagtgtgagccacactgggcattgttgaggccctggatcttattgaaggtgaaagaattcagcatggcatgggaagtaccacggggaatcaggtggacagggatcagctgctgaggacagcagggcagctgcagctggagagggagaagggagctgggaggagagatgaaggagctgctgtgagataggctcctgggctaaaacaggcacagttgggtgcgctgggctccatgtctccctgctgagcccctgggagctgcaggaagatagatgaaccttggcttccaacaggagcggcatgcctggaactgttggtgggattagaatgagctggccctgcttctatggctccattgtggcctttggcaagtcttcacttttctatctagaaaatgtggcagttgggactcgattgtcatgaaatgccaggagagcaagagagagtgtgtgtgcacaagtgacagggagagaatgcaagtgcaagagacagcgtgagtggttttatgtggtttcttgttttgtattaccaggaacgaggaagctctctgatctcaggctgggtgggggctttgtctgtggaaaggggctgtcgtcgcaggcagagcagatgacatctccacatccctttagtcctttggtctgtgtgttccatgtgttcttcagtctgacatgagcaaagcacagcacacacagggcaactttggggagctctgagggcaccatctttccttgggacccactttgccgactcccagtggaccatcatcttgccctgcagccaaccccatgcaaaagtgttccttttaacattccttttagggagatctttatttctcccaaagaaccaattttcttcctgccctcccataaccatgagaacaataagactgagcatactttcccttttggcatcagtggccaggaagcttggaattgaatctcaatgtcattattgccaccatgtatttgtggtcagcatggatattcccttcttccctgggcctctgtttcaatgcatattttattgcatgtcatttatgagctgccttaaaatggtcaggacttctcctgtcatacccgtaggccttccttccaagatttctttacttgaaaaggttccctttgttcttttttttttcttaatttttgccctggtgagggcaagggttgtggtacagaagcttcactgatagattcaggagtctagccccaagcccaggctctgtccctgactttctgggtaacctcaggcaactaacatgctttttctgggtttcagtttctttctctatagaatgataggttgtgatgaggtctactccagatcctttccattctgattctgagagtgtgttagtccctgttggtacctggggtaaatgccaggggattaggcatttacctaatcttacatccaggatccaaagaatcaaggcagaaatctggaaaaaatgagaatttttagggatggaagtctcaccattttcctcatcctgtgatgctttagagttggaagcttgggagaagggggaagggagagaagccggactgaggcttgacagctctatcagtcaggaagcccagggaagcatatgctgtggccaaggttgctgaagggcctccatctgccaggagccactagccaggcagccaccaagctggggctggcaccactgcccctccgttcctcacatttctccatgggtgtctgcagaggggcagccgtggagcagctgggatggtggaagcatgggaaccagtgttccccctactactccctacccagacgggaggcctgccagacattgccctggaaagccagcccaggtcacttggcctagcagagtttgccagtcatttcagagtcactcatgcctgggcctgctgatgtccgctgaggtgataaagcaagaattatttctgaagaagggaaaaagagagatctccttcgacaggtaatagtgatagcaagaaatgttcagtcctctaatttcccaagaactacccccatccctccattcattaccttggttggatcccaaagagacagcagggccaggaaggtggcgccttcctgagtgaatgcatgagacagctgagacgaacagaggtcaaagacccaaggtcaccaagatggacgatgtgatatggctcagaggagctgagggtctctcagtggtgggcttgcacagcagctgggctgctgggtgggacgcagcagttgttggaagaggaaagagcagtgctcctcatggaaagggcttctcctttgcctgcgaggctgattcttagaggaacagggaaagtcactagttagggagaaggcacatgaggaatttctttttctttttttctttttttttttgagatggagtctccactctgtcgcccaggctggagtgcaatgtcgtgatctcggctgactacaacctctgcctcccaggctcaagatattctcctgtctcagcatcccgagtaactgagattacaggcacccaccacctcgtccagctaatttttctatttttaatagagacaggtttttgccatgttggccaggctggtcttgaaatcctgacctcaggtgatccgcccacctcggcctcccaaagtgctgggattacaggtgtgagccaccgtgtctggccaagaatttctttttaaacgactctctgtagtatgcttacctcttatgtctgtgatgccctgcttttatggaagtatgaccagcccaaaatgcaggtatatacctgctcatctccattgtggtatcttagagtctcatggaaaagtaggttttttcttttatgcagcagaatgataagtgtcccaggtctactgtattatgagaccttcatgatgcagtagaaatgcaggtgcccatgacctggaaatccagggtccagcccttggtgactcttgtaacctctgaggcttcaggtttcccatagatcagatggactagtctctacctggcctccctctatggggaatttgtgtgaggattcaacgaagttgtgaatatgcaagagctttaggggcagcctcagctaccagtctcctccaggctgacccaaagtctagggaagcatcctgggcccagctacctgaagtcaggtagagggggggcactggctcttgctccccttctgctgcaacttgctgagccattctggaagagtctctacccctttctggaccatgcctgtctttttattaatgcaacggttcatttaaatacacacacacacacacacacacacacacacacacacacacacacaatggagtcaggggcatggtggctcacacctgtaatcccagcaactcaggaggtgacgctggtggatggcttgaggccaggagattgagaccaccaagagcaacatagtgagaccccacctttaaaaaaagtaaaaaatagattagccaggtgaggtggctactggaaaggctgaggcagaaggatcgcatgagctcaggagtttgaggctgcagtgagctatgattttgtcactgcactccaagcctaggtgacagagtaagaccctggctctaaaaaaaaattaaatatatatcacatgtatttttaaaaatttgttttttattgagatataatttacattccataaaatttatccttttaatagccagatgcagtggctcacacctgtaatcccagcactttgggagcagggaggccaaggtgggtggattgcttgaggccaggggttcaagaccaacctggccaatatggagaaaccccatctctactaaaatatacaaaaattagccaggtgtggttgtgcgtgcctgtaatcccagctactcgatagggtgagtcatgagaatcacttgaacccgggaggcggaggttgcagtgagctgagatcgtgccactgcactctagcctgggcgacacagtgagactctgtctcaaaaaaaaaaaaattaagtttttaaaatgtacaattcagggattttaggatactcacaaaattatataaccatcaccactagctacttctaaaacgttttttatcttcccaaaaaagaaactccattcccattaccagtcattccctgttccttcttcccttccagtgtgttttctgtctgtgtgcatttgcctgtgctggatatttcatataaatggaatcatgcaatatgcggcctttcgtatctggcttctttcatttagcataatgttgtcaaggttcatctgtgttgtagcatggatcagtaatacttcattccttttatagctaaatattccattgcatagacgcatcacattttgtttatccattcttctattggtggacatttgggttatttccacctcttagctattaagaatagtgctactgtgaagtacacttcttatacaagtttttgtttgagcatctattttccattctttggggtatatacctagcagtggaattgctggttcttatggcaattctatgtttaacttttcgaggaaccaccaaactgttttccatagcagcagcgtcattttacatccccaccagcaatacatgagagttccaacttctccacatccttgacaacgcttgttattgtccatcttttttatgctagccatcctagtgaatgtgaaacaatatctcattgtggaaaataagtattccatagatttttaacctgaaaaatcctttttaaaaagtagtcttacttcacaccttccatatgtaaaacacatacgagaggagcctcttcaggtgaaatgggggaggaggcccaagccacccctcccagtaggtgcagaggcaagtcctcttgggtggtttgaagacctaggcttgatgcccttcagctctggaatctgagtctaatcactggagacacatcctgtgtagcagctgcctcagccctcaacctatgctggttgcctggggaagcttctcacagcatttggccaagttgtgggtctgccttgccgctgtgttggggttgccacaacagtgagaagaagtcggatggcgcctcatgtgtggtcccagctttgagggtggcttgtgtgggaaacaggaagcaagctggagaaatgccagcaagtcctggaaggaagatcctaggttttgttgacaaaggaggagcagaggcacatagtggctgatgaggccatagccagtgcagggtttactgaactcctcagctgtgaatagccctggtagtgctaatcttctgagatctagagtgtggctgctggaacactcccaggcctgtcttctattcccacctctctgcattagcattctaggagcaccaggcactctgctgtctgatgggtggaatgttctgcgttctagtgttaccttggcaaagagaggatccctcccaagttctgctctgttgattgcaatgctctgctttccacagctgtcagtggtttgagtcatcagacacagattgttctgttccctcggattttaggatagctttcttcttgtatcaatggctaattctttgaaagaagataaattatagtacatacagggacttttgcttagctggaatattagattaacccaagcacctggtttttcccccatgactgttgattggggaaaatgctatcatgtctctttgaagaatggagcttcctaattttacatatgtggaaactgagacccgaaagtcctagtaatgaaggagaaagaagcatcaattagaagcccataatttcattgacagctctagaattagagaatgttagatccagagcaccttagagaccatctaatctgactctttggtctattcaatgtgcttgtttaaaccattgtattaccaacagttgtgtgttgattgtgtttgtttttatgaagtttcccaggggatggtgttccctgagttttagtctaaggcatagcatcctaagtggtcaagacagtaagtgataggagaagtcactggtggaaaggctgtgggtgggacctaaagaaagagtgcaatgtatgcctgaggacaggcagggaagatgctgcagatgggacaaacagcccatgtagagatgcagatttgggagtgactagccgaggtctcctggatgtatcagagagccagttggaaaggttgtagatgagagggccttaagcacccacatcaagagctttgctctgatttttacctaatctgggacttccaaggaattttgaacagggtccaggcccttttctccattgttcctgccatgaccctggcccaggccctcctaatttctcccctggttggtaacctcctaactggtatctggtatccctccctctccacacaggctccttatcaggaactttctaaaatgcaaatatgattgtgcccctttcctataaagcacttgcatggcttcctgttgcccacaggacaagatcctggcttaagtggctctgtgtggcctgcccccctccttctgcagcctcactcccactgtacttctgccctcaacaggctccctagtttctgagcagccagctgtcactcactgcctgtgtccagacttctccttccctcccattttctgctgccacctggtgaactcttattcatccctcaagacccagtgcaaatttcttgtgtagagaagcgttcctggatcctcctgaagacactattatggcttgaatgtgtttctgttttgaagctcacttcatgttacttccaaaatactggctgcccccatgttttagtgtttattgtgtgataggcactgacctaagccccatactcacattattttatgttattctcacagtaaccatatgaggtgcattcattagagccccagttattacagatatgggcagtgaggctcagagaagtgggtgacttgcccaaggcatgcagctgaagggtgccagagctggcatttgagcccagatcagttcatattgacttctgcagtcattagtctcatgctccctggacccccattgtcgggggggttaggaagtgttgagcatttgagggagcagtcaaaggagtggatgcagcagggttgctatggtgtggacaagatggggaagtggagggaagttcagtgagggcaggggctgggtttactctggggttaaagtgatgagagactatcagcccagcttcccacagttaagggttttctttctaccttcctttccaagtggcagcctctggccacctggggagaggcctgcgggactccaggctaagcaggtggcatggtgacaaacaccatggcaacctgcctccttgctagggcctagaagggagggaggacctgagagagcacaggatgcacactgagttttctgagtaggatcctgagaggtggctccctttgggcctgggtggcttctgccctcccatgagggaccctgcctgcaaggtcccatcccagcaggggaaatgcgtcttccacctttgtccctaatgaatacctggctctgggtgcccaggagactgttagctatacgcaggtacaagtgccacccccttccctcccccaggccagggaggaaggaagagggaactcaagaggaggcaggtgtggggtagccaagcaagatagtggcagggacagctgggacaaggccctcattgtagcaaggccacacgcagctccaagacaaaccaggcattttgcctgcctcccaggactgggcctagcactctgcctggactttcctggctccttagaacactcactcacactggcttggaagagcccatcctcagatctgagtcctgcctctgctggaaagtcctcctgaaggctcagcctcctttttgcatcctcccaaaagccagaagggcagggatgatggtgggaaagttgttggtgaagccaggccgacctgggccagaagccagagcatgtcacacctgcagctgtgtgaccttgggcccaaatgcagtaacaaagccggccttgaaggattgctgcttcaagtaatgggccaaggcagacgagagcactcagcatggccaccttaccactgaaggattcaggcaatggcaggtgatccttggagcccttgcccatgtgcccctctgcaccctaagctgttcctggtcaagatcctcctgtgcccaggaggcagtgagccatttatggccatcctcacaagcatggaggagcactgatgtcctcttacccccaaatcgcccctcctccatggttcctgctctaggggccagccctacagttccaggaggccctgcctgggtgactggggcataatgagtgggaagcattgccaagctggggcaagaagctcaggtgacaggtgtggtgtcggcaggtcctgcagcccagcacccgacacctccaggcagacaatgctggctgtgtccagaccctccaggggaacaggctgtgttctatgtccccgccaggaaacaggccatctgagtagtgcctttgtccactcaggaggcagccccgccgctggctgggatgaccaggctccggggaggccctgacatgggaagggggtggtccccgggccagagactctggggtttgagatccagcccctcagcatctgatgttgacctggtttcgatattggctctgccacacacctgggatgtgacttggccaagtcccttccctctcggtggctcgattcctcatctgtaaaaggggactaatcacagcacttcctcatagggttgttgagaggagtcaatggcataatgtacgtagcgtggttggcacgaggtctggtgtggcgtggggctcggtgaatgcttccctccagcatggggagaggtccaggcatgacatcctcagccaagtctcctgtaacccaggctgctgtcctcagtccctgctgttaatgtggaaggaggggactgaggtctctggagctggcacaggaccagcacattggctgcaaagagcccaggttccccactctgccccagactccggtaactttgggctaatacccagtatagccctcctcacgacagccaaaatccagcccagcatggggcctctcccctccttaaatcctggaaaggctgcccttggaacccaagcctctacccaggaaagaagcctaaggactcgggggcaggaaccaggggcttgagtctacctgcccacttagcaagaggcccagtgatgggtctctctaggcacgaacgcttcctcctgggtccacccactgggacacccccagcggagggcctctgctcccacccaccccagtgctcatctgctttaagtctgtgcccctacattcctggtagatgccaaaaccagcatgcgcattacatgggtgggtgcggacatgcctgtgtgccgcatgggtgcgggaggacctggctgcatgtcctgcgtcatgggctggctgcctgagcacgttcatggagacgcgtgtggcatgtcttggaatggcagggacatggtaccttctcgtgttggtgtgtatccgtatgtctttctacacatgtgctggtacgttggtctgtcttgtctcccctgtagacgggaagccccgaaccacgggccaactgggaagttgatggtcggcgagaccagcccatcctaatttggggttcctggtcctgctccaggagtcctacagcctgcagcccctaccagagagggaggactgaacagcaagggggtgtgtgggtctgagtatcagggtcctggggaagaagcaggcctggctcgtagagtagaagactcggtgccggcagtcaggaggccctgctcctgaagcctctgtgaccttgggcacggccttcactctgtctggggcacattcactcatctggagaacacagggttggactgattacttttagccactcctgacagttgtggttttaagttgggtggtgggaacctgtgcaccagccctattcaattcactggtggaggcagccgtggtctgccaggccctcgctcctggggtgtcctgccgaagggtgagaagagaagccatgccgggcagcggccccagcgagaggatgacgtggcctggcccggccctttctgcgggccccccaacccgccctctctcctcagcccccgggataccgcccatcccaccccttactcggacccacagcctcatggccatgtccctgccaggaagtagacggacctctgctggatcacgcaggtgagtctccccctcgctcacagcctaggcttcggagggcgggaggagggcgcacgggcctctctctacctgccaccaacttgcagtatgtgtttgagcaaatcatttcccattcccatctttaaaatgagcttgctaacacctgcctcctcctggaactatttaatggctcaaatgacacagtggatgtgagagttctcggaaggtgtaaaccactggattcctaccagcagtagcctcatcaatattgtttgattttcacaacgactggaggggaatcgtgcagtcatccactcagactcacttggtgtcccttggtttttacccccgaggctcctcctcctgtccccacccctgtctgccccattcttctccacctctgtctcagtctatgcagggatctcctctcctgggtttggggaaccccagaagttgaggaccttgataagagcatatgaggccccacccttgccctgcagccctgccggcccccattcttgtccctggggagccaggaggaccagccttcttctggttttccatcttgatttgcactgtctgttctgtcacccctgtctgtgcgtctctctctccctgcttctctcccctgtggtgaccccaaagcgggggcactttgggccgcagcggcctggcagtgttcgcccagtgtccgcagctgcccgccagccagaacgagcacctgcctcttcttcctgcctccaggcgcacctctccacctgtgagcgtgcgggatgcctacggcacctcttcgctcagcagcagcagcaattctggctcctacaagggcagtgacagcagtcccacgccaaggtaattggcccctcctctctgggcctggccctgctggctgggaacaggttgtcctggggtgggagaggtaagggagcagggtcgtgttctaaccacccctgacgccagcatagccgctggccgtgtgaccttgagcagatcatttctcctttctgagcctcagttcctgtctgtaagatggatatgataatatacagctggacataaaaaaatacagtggcctaaacaaactaggggtgatacttgcagaacaaggagccaggggtcagcagctccctgaagtgtcagggaccctgtgtcttctcccgctgctccaccatccttggtgtacagcttttgtctttgtcatcacaggtggcttctgtacctccaggcatcaggcctgccctccaggaaggaacaggtggaaaggaccaaagcccttctcagagattgtttttctgagagggacagcttgcccccaaatcctgccagttcttgctggccagaactgggtcatgtgaataactctagctgcagggccagttagtgtcttccccacaacagtaccaccccagacaaaatgggggttccgctaggaagaaagcaagatgagtattgggaagcagcctgcagtgtctaccatcatgcacttctcaggggaacactttgagagtggcagaggtggaactggcttggaaggcgaaatgttacgaatgcagcagatgccaagttgtagtcttgagtgaggtgaactcggactcacaaagcaggatcatgttggagaagcaggtgtaggggagctgtaggtccttgaagaccaggaaggaagagctgtcatggtaggccttgtcctgcttccccagcattgaaatacaagtgggaggttggggcgtgtagggaacgagcataggctctggatttggtctcttcctgtcttgagcctccatttcctttctttaaagtggagctaataactcggaagcttcggtgacttgatatctacacaccgcctgtgcatcctagttggccaataactgatacctcctgttgttagagctttgatctgacttaaggccaggagatgcccagcctgtggctcccatggctggagcacctcctgggaggactcagtggagaggatgtcatttgtgtgaagcgatgtccagagccactgaaacagcagctgttagatttctatcgtgacacacatgatgggtaacacccatgtgcaggactcatgccccagcatcctggctgtaacaccaccccagagactgggggacataggagtaaagcattaatttacattttgaaaactatataattggcaactttaatcttttctattagtaacagattttgtaacacacctcgtaactgcagcccatggaggtgatcccaaccccagggctgagaattgctcccagcaaagggtcttcttccccacaacaagggttgctgcccctgggtgagcagtggggccacagttaggtcccctctgcaaatagccaggctttccaaggcaggaacagctgagaaacatgcgtcacagcgtattttttttctaatttgtgtgtgtgtgtgtgtgtgtgtgtgtgtgtgtgtgtgtgtatacatatttttttttttacaaagagctagtgactaaaaatgtacacgtgttaaattttatatcggggaaaatattcatgaaagcaaaatgaaaagaatgtaaaatagttacttcctctctaatcctcaatccttactagtttagctaaccttgggtcccccactcctaccaccccttgccaaggggtgactcctccgccccttgccaagcagagag

SEQ ID NO: 729 - DNA, 32749 bp, Homo sapiens
  source 1..32749: mol_type = other DNA
attgacttaagtcccagtgattcagctcctcatctggaacacctcgggtcacccccgacaacggtggtgggagggagagcggcctcctcctccctggtggggcctgtctgggtgaagcccctctgttcccggtaggtgtttcggggtctcatggctccaaggacattggaagatgcctctgttttcctggagtcaggggcccagttcatgcaggggttttcacagaactttgctaacttccggggaaaaggtttgtgtctttgctgggagagcgtctggttaatcgttgactggaaacttgcttttccaggctgccccaggtcctgctgcttctaaagaagaggcagccggggctggagaacagcctcgtgccgcaggtcctgctgcttctaaagaagaggcagccggggctggagaacagcctcatgccccgctggtgcctccgttgctctttctgtgtggtcctttgaaacaccccagtggacagagatggatttgggggagtggggcagaggggttgtgcgctagcagcagatgggcctggggtcaggcagagaatgggggccacgcatcggagcagaccagagcgtgctgttggagagctgtttgtattgcgtgttatgctgcgtgcaagactggctcaggggctgcagcaggctctgtgctccctaccctgggatactcacatttggtgacaagtccccagataactgtgagatggggccgaaaaacccaggggccacaaagaaagcagaacataaagtgccaaggccacgcgtcttagagcaggaggggatttttgaagattttggaaggccgcgtggccagttgacttggtcaggagcagttgaagttgtcaggatgtaagcacggcctgtacgcacatgcaggggcccgtttcgggacccttgtccctcgaggtgctgttccatttacaacctgtatataggtttacctcgtcaggcacatggacaagcatttaaaaatgttttcctgatgatttattttcatgtgtattagagcataacttgttttttttcatctgccttctatttgtggcatatggcatggtttttctatttatggtggagatatacagtttcctttgaaaataaatttgttcaagtaaaagagtgggttgatttaaagggaaatattaagtaaagaatcgtacgggagccacgtggggatggctggtggcgtgtggaggcctgtgctttggaaattgcatgctggaggaattcagagacaagaaaaagagaggctcatggaagagacaggcggggtgcaggaggagtgagactcagctaggtggagatgggaggtgggtctgtacttacaggtccagacatgtgggtacgattcttggtgtaatctattttggttgcagcaggtgagtcctgtagggaacagagggtaggtgtgggactatattgtggaggaccgtcagtctcagggtgtggcctctgaacttttcaggaggcagtgggagctattgagggtgcttgaggaggggagtgtttcttgacagtccttgaagagtctcgtttatgtgtagtggataccaggactggaggcagatgaccagttaagggcccaggtaaagagggtttaagaagccaaactagggccatagccaaggacaagcaacccagccacccaggacatctcttactggcttggggggcagcctagagacgttggagagaggtaggtcggaggtggacaagctgagccttggccctctgtggggaggccgtgggtgatgggcaggggtacagttcagaagttgtacatggagtcctagaaggggggagcatcttctcctggctgggctgggaggagatgctaagagctactcagtgacctcttcctggagtctcctggcctatcatggaatgttctggaatgttgtcggggaagtgggtgcggccagctgaaggaagctcctctctgggccagagttcagacaggaggaggaagcctgctgtttcctgccctatggtttggcccagatggccttggctgacagcccaggccaagatttcatccatcatcagggcctgcggtcagagggtcacagtttttttaattcccatttcatccttttagtgcagagaagttcaccagcattcagggaccagcttggtttaaaaaacgggtttgttttgttttgttttgtgagggcctgctaggtaccagatactgtgtttggaacttttttttctttttttgagatggggtcttgctctgtcaccagctagagtgcactggtgcgatctcggctcactgcaacctccgcctcctcggttcaagcgattcccctgcctcagcctcctgagtagctgggattacaggcatgcaccaccatgcccagctaatttttgtatttttagtggagatggtgtttcacccatgttggccaggctggtcttgatctcttgacctcatgatctgcccacctcggcctcccaaagtgcttggattacaagtgcgtgccaccacgtccagataatttttgtatttttagtagagatgaggtttaactatgttggccaggctggtctcaatgttgtgatccgtctgcctcagcctcccaaagtgctaggattacaggcgtgagccaccgcgcccagcctggaacttttactctgttaccacaattcactctggaaaaaacctgttgaggaatgcattacttattacctctgttgtacagaggaagaaatggagtgtagggaaatgtaacaagccccaaattaaaccgctggttagctgtagagtccaattgcaaacctacacctctgaaagggagatcgcatctgcagtagtgagactgtggacacactatttaacttggaggaatctaattggcctctgtgctcctctgtgtgggtgtgtgctgtccctgtggtgtgctgggcacagcagtaatatcagggtgctgatggccctcgatgggattgcagtggagattgtgagtgatgatatagataaggtgttacagaaatgtcagctgctgctgctattactacataaaactagagttgcataatcctggactcgattttactggaagacatttttggaaggttatgtcttaaggtggaggagaagcattattttaattaaattgaattaattagttaatttttaacatttatttttattaaaaagtttttttatagagatggggtcttgctacattgcccaggttggtctcgaactcctggcctcaagcaatcctcccaccttggcctcccaaagtgttgggattacaggcatggtccactgtgcccagtcattttaatttttgaaataatcaatatgtggtgggatagaacgtgcatttaaccttagagccgttttgagtttgagctggtaatttctgggcacgctcctggcccctggatgttgggagatgtgggtgaaatggggagggtgtgttcactttcctctcttctcagcctgacttcagtgaaagctcaaggtgcacttggctgtttctacagcttcggagttcccagctctgcccaagttggtgccagcgagctgtgacctcagggcagtcactaacctgcccaggcgagtttccctcctgcccaattaccctagttctctgagtgagtttcctcttcctttgtggcacttctgggaggaccattctctccctggaatgccgccttctgcctgccaagtccctccttttccctctgagccctgcaccacattcttctctttgaagccctccaggactgccacagagcaagatcttcactgcgccttctcttcactcccagtgttctttgcatggcctcagcatttattggagccgctgtctgattcattttggattcatctcgtgcactgtgcaatatgcagtggctcttcagagccagcacaatggaggtgacccttctccccgtgcaccttccagagattaacacgtaaacaaagaaataaacacagattccaactgtgatgcatgtggtgaagaaagaactggggcccagtatttgttgacctttcagtgttctgcactcccaagggagggccacgtggtggggatggaacacaggcatggacagtacgtaccttcctcctttagcaaacagggatgatgggcgcctgtgattagtccacacaaaagcattcgggagggtataacactcaaatgtaatattagtggcgtggcaagattcttccgcattgatgaccattagtgtgctatttttgttttctctatgaagaagaaaattaaaatttttttcattgcatttggtagcactttacttttttttttttttcttgaacagtgttaggtttacagaaaaaattgaacaaaaagtacagagttcccgtctaacctcttacctctttcaatttcccatgattaacatcttgctttggtgaggtacatttgttacaataaatgtggtaatactgatacattattattaactgaaacgtgtagtgtacacttagggttggatcttggaggtgtaggtagtgtggacttcaaccaatgtgtaaggacatgtggggagaataatggctttgctgccttcaaaatcccctgcaatccatgtcctcatccttcctgttccacgcccaaatccctggtctttttactgtctccatagtttggccttttccagaatgtcatagatgtagttggaaccctgcagtaagtagccctttcagactggtttccttccctttgccagctctgtttttttttttttttttaactgctccttgcagagaagggttgccccataggcagggtgcccagagtagcctcatttttcttttaattaatttaatttttttttttttggtagagatgggatttcactattttgctcaggctggccttgaactcctagcctcaagtaatccttccacctcggtctcctaaaatgctgggattacaggcatgagccatcctgcccagccttactagctcattttttttatcactgaattctgttccatcgtatgaatatatggtaccatattttgtttattcacctgatgaaggacatcttggttgtgtccaagtttttgcaattatgaataaatatttagtcaacatgagtgtgccggttcttgaatagagataactgttcagtttatttgcataaatgttcagttcatttgcatataccaaggaatgtgattgctggatcctttggtaagagtatagtcaactttgtaacaaactaccttccaaagtggctgggctggttttttttttgaacagagtcttgctctgtcacccaggctggagtgtggttgtacagtcacggctccctgccaccctgagctctggggctcaagccatcctcccatctcagcctctcgaggagctgggactgtgggcatgtgccctcacgcctggctaaacatgtttttatttttcatagatacaaagtcccactgtgctacccaggttggctgtactgttttgcagtgcttgagggttccctgttgaaaattttttatttttcatagatacagagtcccactgtgctgcccaggttggctttatttttatttatttatttatttttttaaaatctgggacggagtctcgctctgttgcctaggctggagcacagtggcatgatcctggctcactgcaacctctgcctcccgggttcacgccattctcctgcctcagcctcctgaatagctgggactacaggtgcctgccaccatgcctggctaattttttgtatttttagtagagacggggtttcaccatgttagccaggatggtctcgatctcctgacctcgtgatcctcccgcctcggcctcccaaagtgctgggattacaggcgtgagccaccgcgcctggccggctgggccattttacagtgtttgaggttcctgttgccgcacatcctcactagcatttggtgttgtcagtgttttggatctgggctgttctaacaggtgtgtagtagtatcttgttgttttaatttgcaattccctaattacatatcatgttggacatcttttcattggcttgtttgccatttgtatatcttcagtgaagtgtctgttgtttgttttcttatattttacaaaatagtgtttttctatttataatcttatttattgtctctgacttatctgaaaggagaaggaaaaaagattatgtgcgtacatgggatgactgatgatatggtttggctgtgtccccacccaaatctcatcttgcattcccacctgttgtgggagagacccggtggaggtcattgaatcatgggggcgggtctttcccgtgctgttctcatgagagtgaataagtctcacgagagctgatggttctgtaagggggagttttcctgcacaagctctctctttgcctgctgccgtttatgtaagacgtgacttgctcctccttgccttccaccatgattgtgaggcttccccagccacgtggaactgtaagtccattaaacctctttcttttgtaaattgcccagtcttgggtatgccttatcagcagcgtgaaaacggactaacacaactgggacgggaaaaggccccaaacacacatagttctgtctagcaaagagtactatgaagtgttgagaagttggactatgcttgtggttaagagcttatgcttggagttcaaatcctgggcctttgtcgcttaccagctgtcatttacctctctgagcctcagtttgctcacctgtacaatggggttgttaaaacctgcctcatagggttactttgaaagataaaggagatgattccataagcacttggaactaaaccttgcaaatggtaagccctcaatggtggttctcctaattgatcattgacagacaaacctttcacctcccccatgtgacattttgtgtttcccttatgtcctggtcttcgagactcagagcccactggcatcccatttgtccttacagtgcaaagtcggggtgtgtgtgcaggtggggagcaggcatgccccagcagggtgtgcgggcagatggggcagttggggagcacgcttgcctcagcagggtgtgcatgcagatggggagcacgcgtgccccagcagggtgtgcacgcagatggggagcacgcgtgccccagtagggtatgcacgcagatggggagcacgcgtgccccagcagggtgtgcgcgcagatggggagcacgcgtgccccagcagggtgtgcgtgcagatggggagcacgcgtgccccagcaggcacccacttctcagcctcagggcactgctcctagcctcctctcacttgccccaggactcagttctctagccagtcctgggtggctgtttctgtttctccaagcctggctatacaggcgtagaaaccccagggattcccccttccagcttctctgaggatgaaccccccggtggttttgtttgaggaagttcctgctaatggcaatgagaagttagagaggtgggaaagtgaccaggcagatggagtcctcacagcagtggctgtagacttgccagctactgccacctttgcagatgggatttagggtgttctgtttgtttgtttgcctttgagacagggtctcactctgtagcccagcctggagtgcagtggcacgatcatggctcactgcaggcttaacctccccaggctcaggtgaccctcctacctcagcctcccaagtagctgggattacaggtgtgtgtcactgagcccagctaattttttctgtgtgtgtgtgtgttttcagagacaaggtttcaccatgttgcccaggctggattcaaactcctgggctcaatcgatcctcccgccttggcctcccaaaatgctgggattacaggccaggatggtttttgatttggcctcaccaacgggcctcctgcctctctcagcaaggccaggtggcctttcccctcatgctgattcctcttcccagtatatacactttctattcatcaggtctcctgcccagatatgagcccctctgggcatttcccccaatacagaagaggatgatgatgagaatagtgatgactgatggtgacaatgtctgatggaggtgaatatgatgatgtaacagtgattgtgatgatagtgatgatggtgatggtgattgacaatgatggtgatgattatagtgatggtggtaactgagatgacagtgatggtggtgatgatgactgatggaggtgaacatggtgatgatgtaacagtgattgtgatgatagtgatgatggtgatgctgattgacaatgatggtgatgatgagggcgatgatagtggtgttggtgatgatgatggtgatcatgatgatggtgatgatgatagtgatgatggtggtggtgacacagatgacagtgatggtgatgatgatgtgggtgatggtcatgatagtggtgatgatgtctgatggtggtgatggtgatgatgatgtgggtgatgatggtgatgatgtctgatggtggtgatggttatgatagtggtgttggtgatgatgatggtaataatgatgacggtgatggtgatggtgatgattatagtgatggtggtggtaaccgagatgacagtgatggtggtgatggtgactgatggaggtgaatatgatgatgatgtaacagtgatggtgatgatagtgatgatggtgatgatgatgagggtgattatagtggtgttggtgatcatgatggtaaaaatgatgatggtgatgatgacaatgtctgatggtgatgatgactggaggtgaatatgatggtgacaatgatggtgatagtgatgacgatgatgacagtggtgacgatgatgatggtgatgatgggggtgatgatagtgatgatggtggtgatgacagagatgacagtgatggtgatggtaatgatgatgactgatggtgatgatggtgaatattatgatgatgatggtgatgatgaggatggccatgatggccctaccctgagaatgcacactgtgacaggctttgtgctggttgtgttacctacaccacctctatcaggttttctcaactccagtgctttggcgtttaggctggataactctgtcatgggggctgttttgtgcctcagggatgtttagcagcattcctggcctctacccactggatggatagtagtcaatagcacccgcaactatgtctccagatatttccaaatgtctcttgggggacaaaatcactccgattcagaaccaccggttgaatttattcttcccaatagccccaggaggcagctactcatttatagatgatgcacccaagccttagagaaatgaaggaagttgcccaaggtcaccaagctcataattcgcagccagaatgcaaacctcagatacgcgaccctgagcccagacctgtaaccactgccctttgtcacctgtcagaagaagagaattcatcagcctgctggcagggctacctggagtgcgtgacagggttgagcgcctgctttgtcagtcccagcatcccttgccagattcatttggagctaataaaagcagtggctctgcccattttctgacttggtttgaactcagagagctgaatgtgtttacgtagagactgactccacagccctcagtcctgtgccacgatagggaagtcctgcatcttctgcttccctgaggcagccatgtcacctggtgtgtcgcctgtggacacctgtggggagcaggaacaggcatggatgtgtttttttgcaagtgggaccttgcaaggtcattgtctgtgtcctcctaatgttgtgaacctggtttctacaggttgaatgcccaaaatacctacttgtaattttacttttataataatttattatgaataattaaaaacatgcagcaaagtggaacaaatgttatagtgaaacttacatgcctgacatttggattccatcactaacaatttccttgatctgtcgtggtgtttcttgtttttggaacccagattagcatcatgtctggctggttggtcaatgagactctataaattctctatgaggagaataaattaataacatattaatttgggatagatggtcttcattcaccagagtaatgggggatgtcatggatgaccttctaatcaccatcaccaatcatcaccacatacagaaaccctattcccttttgctgtcccccttccctgaccccaacaagccctaggcaaccactaatctactttctgtctctataaatttgtctattctgaacattttacataaatgggatcatatatgtggttttttgtgactggcttcttttaacagattttcaaggtttgtctgtgttgtagcatgaatcgatacttcattcctttttatagccaaataatatccttttgtgtggatacaccatattttgtttgtccttttcccagttgatggacatttgagttgtttccccctttggctattgtgaatggtgctgctatgagcattggtgtacaggttttaatttgaacacttgctttcaattcttttgggtctatacctgggagcgaaattgttgggtcagatgataattgtgtgttaacttgttgaggaactaaactgtcttccatagtggctgcaccatctccattcccaccaacaagatacaagtgttccagtttctccacatcctcacgaacacttgttatttttcatattttttagtgtagccatcctagtggatgtgaagtggtatctcatggtggttttgatttgtattttcctgatggttaacaatattgagtcttttttcatgtgatttttgggcatttgcgtatcttctttggggaaatgtcttttcaaatcctttgcccatgtttaaatggaattgtcattttgttgttgagttgtgagaattatttatatagtgtagatactagacccttatgagatatatggtttgcaaatatcttctcccattctatgggctgtcttttcaccttctcgatagtgtcctttgatggacaaagttgtaaattatgacagatttacaaattacgataaagtcagccaggcacagtggtgtatgcctgtcatctcagctatctggggggccgaggtgggaggacaacttgagcccaggagtttgagatgaacctaaacagcacggcattaccccgtctcaaaaaaattatgataaaaaatccaatttgtctcttttttcttttggtgtgtatggtgtcatctaagaaatcattgccaaatcttagatgacaccaaaatgtagatgacacctattttttggtgtcctctaagaaatcactgccaaatctgaagtcatgaaaatttaccctgacattccttatacgaatttcatagttttagctcttgcattaggttttgatccgtttgagttaaattttgcaatggtgtgatgtcagggtccacgtcatccttctgcaggtggctctgcacttgtcccagcagatgttgttggaaggactgttctttctccgtcgtatggtctcggcatccttgttgaaagtcagttgaccacggatgtatgggtttatttctgggctctcagttctattccagtgccacagttttcagtaccatatgggcaggaggcatcctgctctgagggagtgtttggtccagtaggagaggtcagacacgttcaccagaaactgcgaagttctgggaagaggtaaaaacagtgtgcttatgaggacgaggcagcgattgcttcagccctgggcagtaagtgtggatgtggggagacctgggcaggggcagtgagtgtggatgtggggaggcctgggagggggcagtgagtgtggatgtggggagacctgggcaggggcagtgagtgtggatgtggggaggcctgggagggggcagtgagtgtggatgtggggaggcctgggtggggggcagtgagtgtggatgtggggaggcctgggagggggcagtgagtgtggatgtggggaggcctgggtggggggcagtgagtgtggatgtggggaggcctgggtggggggcagtgagtgtggatgtggggaggcctgggaggggggcagtgagtgtggatgtggggaggcctgggtggggggcagtgagtgtggatgtggggaggcctgggtgggaggcagtgagtgtggatgtggggaggcctgggtggggggcagtgagtgtggatgtggggaggcctgggcccagggcagtgagtgtggacgtggggaggcctgggtggggggcagtgagtgtggatgtggggaggcctgggaggggggcagtgagtgtggatgtggggaggcctgggtggggggcagtgagtgtggatgtggggaggcctgggtggggggcagtgagtgtggacgtggggaggcctgggtggggggcagtgagtgtggacgtggggaggcctgggtggggggcagtgagtgtggatgtggggaggcctgggtggggggcagtgagtatggatgtggggaggcctgagcccggggcagtgagtgtggatgtggggaggcctgagcccagggcagtgagtgtggatgtggggaggcctgggcctgggcatgaggtatgacaccaggtgtgtgtttgtctggagacaaatttggcaaggcacggtggagtctgtggatggccatgaactcccagctgaggaccctgggcttgattttgaggtgtttgggtggagcggggcctttggagagcctgtctgatggcaggattggccgggtctgagctggggagcctggagccagggggaccccttaggactatggggtgactgaggaggtctgggtgacacctggttcaggcagtgggtctggtggggagcaggggctgtctttgaaaatgccccagggctcagacaccagctcctttgtgcctctgctctgagggcctaggctgggacaacagtggcactgagggctggtgactgaggtcccacaggtcccagcccctgcctgctccgggaaacagccagcccgtctcctctgcaatccccttcaggctgccccggcccagttcttctcagaactcccgtttggccaattactgcgcgacttacagtttctgggaactctgtgctccccgctgctgggtgtgtggcaggtgctcggagaatacccggctcattgctttcgttaggcacctgtaggcaccgcacctgcaacccgacgccttgggaggaggagggggatagaaagcacctgggctcagcccagctccgttgggccaaactgggcacctggtgccagcttatggggccttgggcacgtggctgcccctctcgagctggtttcttcttttctgaaaggagtgatgatcacgtcgtcctctggggcttgtgatgattccagttggtcagccagtggcgggcacctggcaggtgggcagcacccatggaggcggcttcttcctctcccagtttggtagtgcagggtcaggctgggcacgtgtagggatgtttgttaacttgggggcccctcctagaggccctgaaaactcctagctaagtgccagtggttctgtctgacccttccccctgcctgtcttctctgtagcaagccatgttctggggtggcccccactgttgcctgagccctccgctggccctcttatgggcattctcacttatttggggtcttagcctctgccaggagaatgggtagtgtgcagagaaccggacagcttgttcccaggcagggcagtgcctaaccctggagttgcaacagagaaacgcctgtttgtgtttctgtgagcaagaggagacagctgggcccacagatagcaggcgaggtcagccggggatggccttggctgctggctgtaagcaaaccctggctctggtgaggtgaggggaggaaggttggagaagtacctggcaggacccgcggagagccacctgggagctggagtctgggctgggccgtgcagaagctgctggcggaggcaggggtgtgggacgctgccccccggggcctggagcaccgccctcagcacacctgaggactgggccttttccaagcgggtgaggagggttgaggcttctttttccctagaagcttctctgcttcatggagaggtttctcttgggctccttcaacaagcagttcccaggtgggagccgaaatcaggtttcctctgcaaagattctgcctgcctgggactttccagacccacatacatcacgtaaatggaagcaggcctgcgtttctgcattaaaagacaaatagcatgaatgctcgatactgcccgtcccaagccaggtgcccggcagcctgggagcacttgggcattttctgggcagagagtgctcaggggccacaggtacctacgtattattctggtcacgtttgcagtaagtttgaatttcattttctcttctctctttctctctctctctgtgtggttaccctgtaaattttttttttttttttgagacagggtcttgctctgttacccagctggagggcagtggtgcaatcatggctcactgcagcctccgtctcctgggctcaagtgatccttctcagcctcctgagtatctgagactacaggtatgtgccaccatgcccagctaagttttaaattttttgtagagacagggtcttgctctgttgcccaggctggtctcgaactcctgagctcaaacgatcctcctgccttggcttcccaaagtgctggggttacaggtgtgagccaccacgcccagcctggtttccctgctgtcaccaccttcagctctgtgactgccttgatacagcagttccacctacactgtttcaggcctttcagaaaagacaaaagcaagctatgcctctggggacacgtaggcagagctgtggctgttaaaatctgagggctggcacttgagatgggggagaagtaggttatttcacatctcatttgcattggaggctttgcagagtgtttctgcctgggaatgagaacagcgtcagatgaagagacgagcagggatttggggtccactggagcgggagttgccagtcattaaagatgcccaaggatttactttccaaggttaaaaaagacccacaggattaagtgaaacctcctacgtgtgccccatgaggggccttgccggggtacaaaaaaaacccctgcccagccctcgagcagcgagactgagcggctgggcacgggcctggtgcctcgtcagcacccagcgtgtgtgtgttgaatgaacgaggccaaggaaactgagaggtgccgctgttggtcctgccgaggacaggagcagacgcttagctctgtgaccaagttggggtgcctcctggacggggtcctgggtggcatgtccaggattgctgctcctcaaagcacacaggcaagaaaggctgcaggagtcttagcaggggctggagggtccgtagagagcccgtgtgtggcagagggaaagaggcaggttaaggaggccagcgaggctgagccttatgccgtgaggcggtttttaagataaaattttgttggcaggctgggtgtcgtggcgtactcccatagtcccagctacttgggaggctgaggcaggaggatcatttgagcccaggagtttgagaccagcctggacaacagagcaagaccctgtctttaccaaaaaattaaaaaattagccaggcgtgtagttctagcgacttgggaggctgatgcgaggatcacgggagccgaggagttggaggctgcagtgaactgtgactgtgccactgcactccagcctgggcaacggagcaagaccctgtctcaaaaaaaaaaattattggtgcgtaaccgatgtacgtagttccagtgagtggcaaactcttgacggttaaattagtcccctgaaggggtactggacccaccatgtctgggcatcggggtaacaggtaaatgcccccgaggatgcgggcggaatgaaatgctgacgggagggcggtgggctcaagccgaatgggagcctgatgggaggagctggagaattcccaggggaggtggtgctgggccacccccaggtggaggaggtagacagcgtgaaccaaaggcgttccaggtgagagggtgccggagacaaggctgggcggctgcaatgcctcaaggtcctggtggctggagcaccagttttgcagaggggtggctggcagaatgcaagggtggtttgtgccagatcatggacggccttgagggcagctagggcttgtttccttagtagtggggagccaccgaaggtttctgagcaggggaatcacacggcctgacctgggctgtaaggatggtctctctggctgtacgtgaagaggggcaacggggagccccagcaggttccaaggcagatgaggaagatttgccacggtctgggcaagagaggaggagcatcggagctgggaggagggggagccgccccgagcaggcagacctggcagggtgcccgggggcggtggagtttgagggaggtttgtcaggcactggtttccccggggctcctgcttcaactctggaatccactcgagcccgcttggtgcatagtcagcctgcaacgcttccgagtgagtggttctttgggcgtttagacaggcctttgaggctccctctctgagtctttaatcctcccagcgccgcctgacaggtggaggaaatgttgacgtctgggctcaccttatcttgctgccctcctcgtgtttcccgtgtcatagtaacagagcagatgtcagagctgttgctaagggtcccctcggatattaataccttgtgttggacgaagggctcccacacagtgtcttcgaggcctcgggaagcaccggctcggtggcaagtattcttttatgtttgtcccagcttcttttccctcctctaaaccccatctcctccctgtcgccctggcctaggcacagcgcccagtgggatggcacactctgcagcagcaaatgtgcagccgttctccctccacgccgggggcagacgtgactaacagatcacagcatgctttcctacggaggctggaggcagcctccagccccttttcaacccagccctctgggcgccagctcagatttagcacttgggatgaagcctctcttccagccctgcaggcgccacctgcgaagcctccaggccctctccacggggtacttcctctggcacctgggaggggaggggagtgggttttgcttgcctcttgtgtctcctgtttgcctccctcgtctggtcttttggcctttccaccacaagtggaaaatcaaactgaatagttctggacattgaggtcagggttgggattttatcagccagatgccatttttatccgttatatattgctggggtaacactgcatgacaagcatacctgtccaaacgtgggggctcacgaccaccatttattacccctcctcagtctacgggccggccgggcggttctgccactcttggccgggccgtgcatttcattctaagcatcgtgatgcagcggctcagagggcaccagccacccctggtgtggaaaatgcacttgagccctctctctgtggccgacaccaactggcgtcctgcagcgctggtgttggccttcgcacgtgggtgtcctaggcacagcgacttcccccagcccctccgtccgccgcctccttcccactgttcaccctgcatcatttcctttattctcaccatagagatagtctcacccggacacctgcaccctcatacccgggccccctttgtcacagtcgctcgggggtcacagtgtggctgtgctcttgggaatgcgtccccagccaagcatatctgctggtctcaggagctcgggtatgctgcccacgctcaccgtgggtcggaccctgtggctggatgaaagcgcgctcgttcgtgccacaccctaggagtctgaagcctcagttatatcagtgaacgtgtccctgaaacaagatcgaagaggtgaaaatgccagggtgtaaggtggggagcgatcacagccctggaagaaggaggagccgcacttgctggggtggttgccttgtccctgtccctgtccctccgcagtggatgggctggccctgggggaaggcgtggggagaaggagccgcacttgctgggggtggttgccttgtccctgtccttgtccctgtccctccacagtggatgggctggccctgggggaaggcgtggggagaaggagccgcacttgctgggggtggttgccttgtccctgtccttgtccctgtccctccacagtggacgggctggccctgggggaaggcgtggggagaaggagctgcactgggtggggtggttgccttgtccctgtccttgtccctgtccctccacagtggatgggctggccctgggggaaggcgtggggagaaggagctgcactgggtggggtggttgccttgtccctgtccttgttcctgtccctccgcagtggatgggctggccctcggagaaggcgtggggagaaggagctgcacttgctggggtggttgccttgtccctgtccccccgcagtggacgggctagagactccgtgggtgtttgccgggcttctctgaggcaggttgttttgcctccggatatgtttttcaaagtctgatacgtgttagagacagacagctgcgggcggctgttgtttttctcactgtgctgtggctgctgagagttttggaaggtcagggtcgagccgcggttctcctggagtgatgactatgcgcactgcttcctagcctgtacggggatgagctcccaaggcccgtttacgggaccctgtagtcggggcggggaacagtcggctggaggggtgtcatgtgaccggccccagccactggtcactcagggctctcaagccagtgctggctttaccagcttctgagcccacaaatgctgttaaggagatagaagccttcttttaagtagatgcaactgtttgcaaagaagaggccctttattttattttatttatttatttttttgcgaatagaggatcgtctgccttattgaaaccatctaattggagatccgcagattaggctaccaagacacagctgcctccagcagaatttgtgtagtggacacttgtacgtgcactttggagacagcaagcatgaggcctgcagctgacagctttgagtggctgtgaacctgactatggaaaaggtatctcaaaaaatacactgaaaaaatgcacttcatttcccttttgggaacttatcctaaggcagtcgtcagagatttatctgccaggatgtccatttcagtgctgcatataatcgagcaaaattggaaacaatccatgtgctcccaaacaggaagatggtaaaacgtattgtattcagaatactaagttatagtttaaaatcatatttttaaagaactttaatactgtgggaaagcacaaggtggtttaaaaaaccagcaagcagcatatatagtaagaacccaattttatttagaaaccagcaagcagcgtatgcagtaagaacccaattttattacaatttgtacataaatgcccaggaaaagttggaaggtgctacattaaggtgttaagagtcgccatgggggtggctgatgtgagaatttaaggtgttttctctttaggataaaatatcctaccgcccccaggagtgaccacgtgaggctgcataatggccgtctctgtgtctgcagtgatgtctgcagtgacgaacgcccggggtggtgagctctaatggccttctctgtgtctgcagtgatgtctgcagtgacgaacgcccggggtggtgagctctaatggccgtctctgtgtctgcagtgatgtctgcagtgacgaacgcccggggtggtgagctctcgactttagagagagaattgcatcctcctggaagaaggggttgtttttaccgatctgtctcaggaagttgcctggggctgatgagcctctgtcccctaggaatttttcgggaaattatcaccggcaactcctgttccgttccctgtacccctcgggtcctcctagtccctgtactgcggggttttacaagggttccggaacatctgcctgctgggccggccagcccgagtgctgcctctgctcagcgtgtgtcgcccggcggggtcgaggtggcaccaggaggtctcagcttcccagaggaggctcctgggggcaccagcccctcagcaaggagcgagctcagccgtcaggtggagctgccttgaggccgactaccccgtggggaatcttgagggacaaacggcctgtgagtcagcaagtcgcagagcctggttagagtccagctgtctgctctgagcatgtctgggctgttttctgaattcttccttgtctgggaaagccacatctctctgatgaaatacagttgaattaaatggatattccctgagcacctactttgcagcaggctctgtgtgggcatcaggaagggagggaaggaggaggatgtagggaccctctagggcacccaaggtccagcagggaaggagaaatggaaatttcatgtcgatagaactgaacacttctgggcgggctcctgggtggatgcccaccctctccacgaggggcttgccttccccatcagcagccttgacctatgtgctcattgaatatgctcctgtacacacacacgcgcacacacacacgctcctccttccccagcctcttacctgtcccagctggtaggacctcagagacagacctggccctggggatcacgtctctagtttacggaggaagtggccagagctccaccagccctgtccacagaacctcctgtgtctgctccccgcagagctccaccagccctgtccacaaaatctcctccgtcttctccccgcagaggtccatcaaccatgtccacaaaacctcctgcctctgctccccccagagctccaccagccctgtccacagaacctcctgcctctgctccccaggccaattccatcctccctcctgaatttgggggtttgccttccctgcttttccactcaccttctataaggccctattttgttccctcatcagtttaatttttgtccaggacaaatggtcatacctgagtacaagggcgcagtctgtgtttaatgcacagggcactgctctctggagttttcaggaccctgcttttaagagagaagggtcagactttctgccctctgagcccaagaggtgagtgctgagtggtggcgagcatagtttacccactggtgaagggggtgccgggcatgggggtcggctgatgaggccctccttgctgccgagtcagggagcctctgcatgctgacgaggtttggagaatcgaaactggctccgtgggcagtttcctaaaatgtgcctcctcgagttgcccttcctctcccaccatctgtcccgaggttgctccgtgcgagtgaaggacagctgtgccttctgaggtgccagccacggccagggtgggggtgcacagccgtcccagagccggggcctgaattctcctgggtcctcatgtccgacctttgctcagggccacccctgtgaacgtggtcagccacagacttgccatcagtgatgaacctgccctggcgctgcccgtggccccagctctggaggcgacatccttccgtctcccttgatctctgcagcatttggctctttccgtctcccttcatctctgcagcatttggctctgtggctcttctgccctgaagctacagcagtgagaggggtggggacatgtaggaagcagttctcgcggcctcctcctctctgtcctgtggactgggctggggagggctcagttcccacctcccacgtgggagcagccagcagcctgcctgctggctgcctgcctcccttgcctccctcgcttgcctccctcgcctccctcatgtaactcagcagggtccaaatcaggcattgaaattgcaggaggcggttgctccggcctgtctcaagctctgttgggtgccgatggggaaactgaggctcaggaagacagttgacttgttcctggacttctagtaagtttacataaaagccaaaatttcacagatcttttttttttttttgagattatgtctcgctctgtcacccaggctggagtgtagtggcgcgatctcagctcactgcaacctccaccccccaggttcaagcgattatcctgcctcggcctcccgaatagctgggattacaggtgcgcgccatcacgcctggctaatttttgcatttttagtggagacggggtttctccatgttgcccaggctggtctcaaactcctgagctcaagggatccacccacctgagtctcccgaagtgctgagattacaggcgtgagccaccccgtgtgggctgtagtatattttagtgtttactttgaaaagaataatgctttgtacacccatgtggagcagtgtgactgcacaagataactgaagtttttaaaaagcaaagcaaaccatagtgctctaaaggctgggatggggcactgatttaaagttgtttgaggacggtatcatttttgacctgtctttccttgcttgtccattagcctcatctgggagaagattgagcctccatctgaggaggtcctgggtgatctgggcccggccatgggatttccacgcttggctgtttggggtctggggctgcccaggtctctttgctgaggcagctcactggggagggtcaggtctgatctggaagagcaggtgcctggacatgtgcatggggtagagcgaccagtgtggttaaggttgtggcctggaccctgtgtggtcaggcggaggcggtctgcatgttacctctgctggtcatcatagaaatgggtggcactggccgagaaaagcagttctccaagctgggcccaggcctctctgggggtcccccaacaccctccggagatccacaggtcaaaagtgtttccataagaatagtcataggactctgggttttatcctgtcacaaatgtacagaaaaggagaagttcattgatgtggtttcagatgccacatttgaactaatctttaagaaattaccatctgttgagtttgggtgcaatatcaaagaaaaatatttacaatttctggaaagtaaaaaaagtcctcctcttttcagccatcatacgtatttgtgagggtctggatgtccttcaaggacttcagcgaaacaacctgccacaaatgcgtgaatgaaaaatcagatatgaaggtccagctgttttttgtgaagtcaaacattaaaaagagttgtaaaaatgtaaaacagtgtcatttgtctaattgctttgtaagtgtagtttttcataaaatatgtaaattatgtgaacgtctaatgggtttattatttttaatgaattaacaacattttaaagattttctcagttttaatttctagtgtggtaactagcaatggtcatagcccatgtattttggagttctcaagaatatatgtatatctatatattttttgagacggagtttcgctctttttgcccaggctggagtgcaatggcttgatctcggctcactgcaacctccacctccagggttcaagcaattctcctgcctcagcctcctcagtagctgggattacaggcactcgccaccacacccagctaattttttttgtatttttagtagaggcggggtttcaccatattggccaggctggtcttgaactcctgacctcaagcaatcctcctgccttggcctcccaaagtgctgggattacaggcctcagccaccatgtctggcctgtgaatgagttataattcattttttttttcatggtctgtgtttgtgctgaagttgtaattcacatgccataaaattcacacttttaaagggtgcgattcagtggttttagtgtattcttgaaatgtgtgaccatcaccactgtctaatccagaacatttttacgaccccaaaaagaagtcctgaacccactgggagtctgttcccctcttcctgcaacccctgacaaccactcctcaccttccgtctctctagatttgcttattctggacacactgtataaacggaatcatacaatacgtggtcttttatgactggcttttcttacttaggatgttttaaagattcatccatgttgtagctggtattagcacttcattcctttttacggccaaataataatccattgtaaatcatactccattgtaaataataataatccattgtaaataataatccattgtaaatcataatccattgtaaataataatcatcgtatggatatagcacattttcctcattcatcagttgatggatattttcgttgtttctgcttttggcggtcatgaatagtgctgctaagaacgtttgtgtacaggttttggtgaggacgtatgttttgggtactcttgggtgtgtaactaggagtagagtttctgggtcatatggtaagtctgtgttcaacattttgaggaagtgtcaaacggatttcgaacctggatcttttttaagagtgtaaaggggccctgggtttgagaaccactggcctagctgggattagaccaggagagtgtggatggctcaggagagcccctcctccttgctctgggattcagataccctcggcctcatcccacactcccttcagaatgcacgcgtggcatcctcagaccaccaaagacaatcctgtcctgggaggcagggagaaagccggcacactagacagtgcacaggtgaagccctcagggggtcctggagcagggccacctccctgggggatccccaggtgccattttcatggcagtgtctatggacggctccccttggcatggtgctgggtggcaatcctggctgtagctgccaccccctgccctcttgcctgccctcgagggcattgtgatcatcggtgtgagtctgttgggaaggagagccaggtccccaggtttgggaaaggagtagggtttcccagcctgtctggccatcaccccccagcccagcccctcctgctgggtgacgtgctcagttcggcccctgctgtactgggagggggcagggagcagatggcctccagggttgagttgaaaactgctaagggtgagcctcctctctcctttctgactctaaccttttgatgccctgccagtcatgttcactcttgtcactcggccacatgatccacctggtcaccctcctagaatcatgagccttctgaagaggagccttgagggaagagtgttttgctggagagatggttcccacagtgagattccaggcatcagtggggatcgtgcatggagatggtgtggaggggcctgagggcacagagaacctgtctgccatctgtaccccagccaatgatgcacactctttcgtcttccctccttcatctcagatgtgactccccacccccagccgggtgctccgagccatggccgacaccatcttcggcagcgggaatgatcagtgggtttgccccaatgaccggcagcttgcccttcgagccaagtgagtacctctggggccccccaggccgtcccttccttctgcctccctgctcctctcctgtcttcagcaagattcattcccaggggcccagaaagagatgtttggagagaggtgcctgtcggatgcatgccacactccaggccctggacacagccattcactcatttaactaccatgcagaatttatccccatttccctgatgagcaaagtgaggctgagctccttgcccacatcacttaacttgtgggtggcagggctgcaacccacacctgggtccagctgactccttagcctgtgtgtcctttctatcaacaggctgtaagggacccacaccacctcgtgtgccttctctcctgtcactgagctgtaggactgcaagtcccttaagacagggagattttgatctctggatgcccagtcatagcccagtgcttggcactgtcagacgggggaacaaaagtctgttgcagtggacgaggcgctgcccctgaggctgaagcacaaccagccccaagctgccccagggccttctctgtgctctcctgagaatctcgctagttccttgcttccagtttcttcccttgggggtcctggctttcttttttcttgtcgcccaggctggagtgcaatggcacgatcttagctcactgcagcctctgcctccctggtttaagcaattctcctgcctcccgagtagctgggattacaggtgcccactaccacaatgggctaatttttgtatttttagtagagacgggggttttaccatgttggccaggctggtctcgaactcctgacctcaagtgatccacccgccttggtctcccaaagtgctgggattacaggcgtgagccaccgcgcctggccctggttttcctgctgtccctcagcctagtgacctctcagctctgggtaggtcaggccatctccaccgactgtgcactgtggctggagatgggggttctcagatgccttgcctgccttccagtccctcgctgtccctcagaggggctgggcgtctctggcatgtgataagtccaaaagggccccttcatccttcaacccatgccaattacgggagcaagcatttcccaagtgggaccaaattaaaaaaaattgcaattagatgttatgagcctgcaggggacagagctgaaacatcaaagggggatggaaagattaattcgaaacgccccaggagagcggagtcatgcgtgatttgcaggaatctgcaccacagttaactggtccccttcgccaggagggctcggctccttcatgcggcccccgcagtgggtgaggtcggtccgtctccctctctgtcctctgacgccaggcagatgaagtgtcctcccgggcagggtaggagtttccaaggagagctccgccactgtgctctcgacagggcccagcaggactcctgaccctccagggttcccttcagctctccctgaccttctctctctctcagcagcagccaaatgctgtcgtagcccctttggaagagagaatgcttttatcccctcccctggggtgcactgccttgtagtacctggcacagtctctggaaaggagaggcgtactaaactccagccgcagagctgggagctgtgtcccgtgggaccctcagggatatctgggctgcagctcggggctcccctcagtcctccagctgccaccagatgttttctaaacccctactatgtgccaggcactgactgcacagcagtgaacaggaccaacacagtccctggtcttaaagcacaggtgggcagaggtgagcattatttgaatagttacccaggtaagttgctttgacggtgataacaggcggtggggacgtgggtgaaggtgtgacttactctggggatcaggaggggctgagagtgtgctgcctacactgggacccagaagatgggccaatgttagatgggagtaggggggaagcgcttccaggcagaaggaacagcatgtgcaaaggccctgaggtagaaggaacagggcatgtggaggccctggccggaggtcagtgtgttgtgagtgcaaaatgtgaagggtggacagtgtggaaggaagatggagaggtaggcaggggccaggggcagggcctggtcctccagagactcatgttccggaggggagatggagggtttcatgttgtctcgtaataatgtgtcagcccaatgaaggacgtatacccaggccttccaggaactctgagagtagattctttacctgttttggaggggatcaaggaaaagcctccaggtgaaggtcatgtgtaaagaagtctttaaaaagaataggccggtcgcggtggctcacgcctgtaatcccagcactttgggaggctgaggcgggcggatcacctgaggccaggagttctcaagaccagcctgaccaacgcggtgaaaccctgtctctcctaaaaatacaaaaattagccggtcgtgttggcacacacctgtaatcccagcactttgggaggctgaggcaggtggatcataggtcaggcatttgagaccagcctggccaacatagtgaaaccctgtctctactaaaaatacaaaaaattagccgggtgtagtggcacatgcctgtgatcccagctgctcaggaggctgaggcaggagaattgcttgcacctgggaggcggatgttgcagtgagctgagattgtgccattgcactccagcctgggcgacagaccgagactctgtctcaaaatagacatagatagatagatagatagataggtacatagctagctagctagatagatagaaagatagaaagaaagaataggagtgagaggtggacagaaggtttagggagagagacaggggccccaggtgaagggtgcagcatgagcaaaggcctggggactgcacgaagcctagaacacaagggagccactggtgagctgagagacgagggcgccgtgcggggaacgtgcaggggaaggacaggtggggctcccagacgtgcaggttcttcctggaggttgcagcccatcgatgtcaggtgccctcaagtcggcctccgtcagctgcatggaggggacattgcaagggggtgggcagcatgctcagtggagctatggccgcaggcgggcatcagggcctggcctggcagcaggtgagatgagaggacgtggatgactggggcccggaggcggagcaggtggaggcaggaacgtgggtgcggaggcggccctgggggagactgaaatgctcccaagcagggctgtcagcagctgctggatacgaactcggcaggtcagggctcaggccttgagtcagcggtggaggccaacccgagattcctgctagctagctacgttccgcacctcgtttcctctgagaaatggggcggggtgcctcagggtccgggcctgcctcgccgcgtggctgagggtctgggccttacagggcgactctgagggtctgggcctgccttgcagggtgactgagggtctaggcctgccttgtgggatgactgtgagggtccaggcctgcctctcggggtgactgagggtctgggcccacctcaccgggtgactgtaagggtctgggcctgccttggggggtgactgagggtccaggcctgcctcgcaaggtgactgagggtctggactgtctcgcggggtgatggagggtccgggcctgcctcggggtgactgtgagggtccgatggaagacatctgtagtgtcctgtgccatcaccagccccagaacaagctcgtgggacccgtgtccatcaggacaggcagtggtggcggtgctgatgcttctgtccctccttctgtgtgttcctgggacccttcctttctctacattagctggagggtggagggagtggtgattccctgaacctgggggccctggcttccaactcccttcccctggcccgggaaccacacgaagtgtgtcctggcccatcactgacccctggagcctccgaaatgctcagatggaacaaaccagtaggtaggggttgtggaggggatattgctttttggggcctgaacccctgcatgtgtgcagttcataggagcaaggcaggtagtccaggcagaggctgcccactctactggccttgccccccttccagccctgccctgctgccccggtattttccttccccagcaccgtgagcactgcttggaaagcgttggtctagggcattgcagtttttttttttttaaattggaaaaaccggcagtgtagaagtatggatccctgaaacaccacacaccacccatgccccctgcctttcgtgtgtgatctcctctgcctgaacccgcctccctccttccatggggaagcacctgttcatcctgcaaaagctcacacatggtaaagccatgcctgacagccctccccatgataattacagttatcactattaacgaccatttgcaggcaattgggaatttgctatgtaaaagcaccttatctaccctgcctcattaattctcatggcatcccttaaagagacagatcagaaaaccaagggtgagagcctcatccgaggtctcgcatctgggaagggacgggaccagaagataagactgtccagtggactccaaaccctagatcttcacattcatcagcccccagctccccctgacagagaaaggatatgcgtattagctttccaaactcctattgtgtcggccacagagaaccgttagctgcaacagccgggaccaggcaggacatgagaccaccggggcccatcttgtgtcagggggcccccaggaaagggtccgcctccctcagcctgctgccctaggtcctgcctccaggactcttgccttctgacacttccctaaagaaagcgagcctttccagagcctcatcccctccctgctgggtaattctcttatttatccacttcctgaccccacctgcacgtcccaccaagcagcctgtcccgggcacctaagaggccaggcgtcccagcgggtacttggtaatgcgtagaatgaaaacgccttagacctgttagttaaataggtatctgtgtcattgattggcatctgccacccccaccatattgtagttcttcagggtgcagtggcttttcccgtctcgttcatctctgcacacagcaatgtcacaggcacggaatgtctcagggaagctggcacccacccagggcaggggctccggggtttgatctgctgctgccactctctccctgtccagaaaaatagaaggagtttgagtccttcccccgccccatttgcagcctcaggaggcgtcagtcccgcagcccagtggagcagagacagctcaacctccggacccagtcccagccctgcctcgccgttgcccgccctcacctgccctcaccacggctcctcttctgtaactcgcttcccccccgcctcgaacctgctagttttcaaagtgttcatatcaacgctgtgtcttcaccctaattacatggctttcctgtcccctggtgaactccgtctcactaccttacggagctccgagctccctttttcttctcttgataatctctcatgctcctcccttgacacctctcgtgctgtgaccttggccttctctgtgtacgtgagcgtcacattctgtgtttctggctcccgggctaaggtggtgctgccgtctttgccaaggcccaggagctggcggatggcagggctggcgcttggagcctgtgtctgccccgtctctgttgcccgcgtgccttgccccctgcacacggcacctgggccgtctctgttgcccatgtgccttgtccccggcacacagcacctgccccgtctctgttgcccgcaatcccaaccccggcacacggaacctgggccgtctctgttgccacctgggccgtctctgttgccacctgggccatctctgttgccacctgggccatctctgctgcccgcgctcgtcgtcccggcacgcggcacctgggccgtccactgactgttctcgggggggcttggtggatgtggtaggggctgccggagtttgcaccggggaggcctccacgccgtctgtgctgttccctctcgaggctgcagacgggctggtccgtgcacacctaccagacggagaagcagaggaggaagcagcacctcagcccggcggaggtggaggccatcctgcaggtcatccagagggcagagcggctcgacgtcctggagcagcagagaatcgggtgaggcggggccggggccagctcagtgggaggacagcaagggctttggcgcaagcgcaggggactgggaggccggcactccgggtcctggttttgctatttacctctgggagtgggtgaggaggtccctgactccagcccttgctgaagggtgctctgtctgaactctgggagtgtaacccagcccgctgaggcctcaggacacccctctgtgagacggggctgctagctgagctgtgcgccccatgctgagggcgtgaatgagcctggtgaagcctcccaggagctgttcggctgtgcacacctgcaggtcagctgtggttcagccaagggaggggttcaggtggaggccaagccacaggtcgcccctgaaaggctccagcaggagccgctccccgcctggctctacgtgcctctcctggcctccgcctccagcgccgaccacagctcagtcttccagcacttccatcgtgtccagtgtttaattacgaaagcaattcatatttcctagaaaatctgaaaaacacagaaaagcacaagtaggaagacacaaatgcactgggcaggaattgatttcattctggcctcctatgtatctttgatctttcttttccttttcttttttttttgggggggacagggtctcactctgcagtgtagattagaatgcagtggtgctatcacagatcactgcagcctcaacttcctgggctcaagcgacctccccacctcagccttaagtagctaggaccgtgcgtgggcaccaccacacccagctattttttattttattttttttgtagagatggggtctcactatgttacccaggctgctctcgaacttctgggctcaagcgatccgcctgcctcagcctcacaaagggctgggatgtcaggcatgagccaccctgcccggccttatctttacagtgggaaagacaggccagatggcatggctcattcttcagctgtgagtccacgtgttctccgagagccttcgctggtcccatggaacatgcccctgtccctcaatgtccctccccctccctcccctcaatgtccctccccctccctcccctcaatgtccctccccctccctcccctcaatgtccctccccctccctcccctcaatgtccctccccctccctcccctcaatgtccctccccctctctcccc

SEQ ID NO: 730 - DNA, 32744 bp, Homo sapiens
  source 1..32744: mol_type = other DNA
acgccgctctgcgttgacagtgccgggcgacacccgggccgtgccgccagcgtccgtcgggagagtgaaggctcgcaacgccttgcccgggggaaggtaacgcgccgcgcccggggctgcgcggtttgcaccgccaggccgagggctgggggccagaagacaagagagacggcgaggcgcgctccctgcccggcagcgactcggaggtgcgcactcgggttccagtctctacttggcccactcgctgtgttacctcgggcaactttgtttccctctcttggtctctgcttcctcctctgttaagtgagggaggtggtgtagaatgttgttccttagtctaaccagttctaaaatgggaactgcgttttggcacggggaaagctcctttcctcagtttcccacctactccagagccacctccgctgcccaggcggccaggaagctgggatgcccgggtaggcgagggttctgctgagctatcgcgttttctagggctttcagggactgacctgggcttggggctgggtgctggggagacctggctgcagagtaactgcccccagattgctcaggtgcagaaaggtaggagcgtcagcacctgtttacaggtggggtgttgggaagggccggccaggggatgatgatttctcctttgaaaataagacgtgttttggaattctcttccatacccacacctcgtcccacggcgagctataaactacacgagtgggctttatcatcctttgaagtggaaaagcgactgtttttagcgtctaagacacagggctccaccagcatataggaagtgggtctctctttctctgcacccatcctgccgcgtcttccctttctttcctcctctctttataaatcccctttgaccttgaggggctccacttcctgccttaatgaaaagttcttcttttcatttagtgctggtttgtgaccagcagcctccagggctttgggcgcagggttgagatagaagcctagataagaacaggctatgaatcaccctgtcagccccctgagccacacagcccggcagggatgtgcagaggaagcccggtggggcttcagacagatagaccctggaaggtggggtggatgcaaactgccatccagcttcccgtccccttgttggcagccattccccaccaggatggtgacccctgctgtctgctggatggagcagccagatagagtaggatgattgaaaggagctgaggacttggctggatttctatggaaggtctccagcatttcccttccctcactttcctccacccctgaagttctgccccttctcacccttagtgtggtatccaggtgaaatcagattgcagaacccatcaagagcagctaggaaggagaagaggtgtggggacggcagcagggcaatgttgactgctgtttagtgggcacttactatgggccagacacttctttgtatgtaatatatccttaattctcacaaagccacatgaggggtgatgtactataccctattttataggtgagaaacaggctcagaaagattgcttcctttagtcacttagctaggaagtagcatagctggaattcaaatccaatctctgattctaaaacctgtgttctttacactgtctttgtgctccttaagtaagagcaagctggaataaggagagcaaaaatgtctaacattgtgttctcaccaggtgtcaggcactatgcaaaacatcttagagctattatgtcatttatggtgcaggagtttccgttattctggaggtaatctgtgactgccttagcctctcagcagcagtactgttctagaaggcctaccctaatcctgcccagctgctagtgcgtgggtggggcagggccctgtttgctttatcctagaggtggtttggggtctaatgaaagattgattgtccacatctgacccgttagccctaaccgttggctggtgaatgattccactgtcccctaagaggcctttttcaggttttgctcaataaacatttgtggaatgaatgaattagcaccttgtgcagagtggtctgctgccttgtagaaatgtgaggcagcctaggggaagcccaggttccaccatcttcaaaacccagatgctagtctaggtgtttctcctctttgggcaagggaggtagggtgaactgtgcctgtataggcttccagagctccctggaaatatgtttgcttgtcacctgttttacaaagaatttttaaacatacagtagatgaagaaaaatgtggctttttttttttttaaattaagaggaaaacttacttggtattaatgaggttgtcactctctcaaaagttggggggataagattataatgtttgtcttagggcttaccaaacttttccatagaagatcctgcaatggaaaagaagaccaacacatgctcctgtgcttatgcaatttttttcatttgatttcataatatatggactttgatttaaaaatataaagttttttcttcaaaatatctgaataaaactggtgtcctggcagattgttatatattcttaggggcttcgagtacccagatggagaagtaggaccaaggttctagagggcttagactactgtttgaattttccactctctggttcacagtaatagagcttctctagtccctggggagacatccacttttttcccatttttcagaatgaagaatgttttaaaaataaaaatatcctttattttcttattaccaaaactaaacatattcattgtagaaaaaaatataagatccagattaacattaataataatatcaggccgggtgcagtggctaatgcctggaatcccagcactttgggaggccgaggcaggtggatcacaaggtcaggagttcgagaccagcctggccaatatagtgaaaccccatctctactaaaaatacaaaacttagctgcgcgtggtggcatgcgcctgtagtcccagctgctcaggaggctaaggcaggagaatctcttgaacccgggaggcggaggttgcagtgagctgagatcatgccactgtactccagcctgggtgacagagcaagactccatctcaaataataataataataataatgatataaatacatctatactcaaataattaaagcaaaacttgggatatagcgttccaaatctttttctttgcatctatattaacaaattttaaaaacacacacacaaatacagcccttttgactgaattattgtcagagctaagagccatctcagattgtttttgacagaatgtagagaaaaaatcatgaataattaaaagcatcatgaaggttaatcttgtttgtgagccccgaagttcacccctcataatttccctgtatttatcttgtgggagagatgagtgctgggccatggggctgctgttgaaaatgcagggtcaagctgtactcttgctaaacatctcaaatataacagaaaaggtagctctttagtgttgctgatgtgcaaaatttgagcagaaaattaaaaaactaatttgcacagtaatttgcagaaaattcaggagggtcctggagaaagtcattgccccagcattgcattttattacctgtgtgaccttgggcaagacagatggcttctctgagctggtttccacttttataaattgatgataataaacaaattctatcctcacttaccagaatcactataaggatcaagtgtcaggtgttattgtttgttacttggattgcatgcatgtgtgtatgctattaatattttaaaaatgtttaaacatagaggcaataaaacattatcagtctttataaaatcctggaatccaactcttggtattagtaggacttaatcatgatgtaaatgctctattgggactcaagttttcttcaaagaatgtaggtttccttggtggctagtatctcattgatcctcatcacaatcctgaacagaagaggacagaagatagtcccattttatagaatgaaagcaggcttgccactcaagggaattgttcagttacacagggagtctcagagctcctgggagctgtcttgacttgccctaagcaaggcagaggcttgctaagaggaagcaatgagagccactggaaaggcagtgtacccatgggggcatgtgagtgccagtagccattgcctcaaggactgctctcaggcatacgccgtgctcctggatgctctgaggaaacaatgggccctgcactgggaggcaggtggcttggtttcaacttctgcatctggcaaagacaatctgtgcaatctgggtttagtcacactttctccctgagccttggtttccttataaagttagagaattggaccagatgagggtccttcttgtcttaaaagtctgattctgggttgttttctattcatggtttcccaagttgaagtctggtagagaatttccacatccagatgaatgagatatgagaaaatgtttctactttctgttgcttcaagcttttgacgcctcctcctgattttctaagggcctcctctattgactgccttcatgcagaacacatgatccacagatcattgagaggagagtggtttctgcttatttattttttattattaatctataacctcttgagattgttaggaaaactgctttaagggaattttggggaaggtaggttgacagaaatacagtataatgaaagcaggtttaaaaaatggtaataaagccatgtgtttcactaagtatttgcctctaaagtcactacatacagtatttttgcctagtgcccatttgggcacttggacctgtgctaggacttttgcagaatgtgggagaagcacatgacctcactcttaagtggctcagaactggagagggggagaaagagaaggaaaaagggagcaaagacatgtgcagctatgattggaataggatggagatgaaaagaacaatttaggaaaagattgagcccctgagggctcagactttgtggtttatttctgtatccacatagcctggcactgttcctggcactcaatgggaacttagtataagtaatttaaattaattaataaatgaacaaataaaagaatgaatgaatcactctgctgaaatgtggtgcagtgtcctcagattactgcagtgacttcttcacctatgtgaactacctgcaacctacaaaaccactttcctatgtgttatcccttgtattgatgattgagataaaagaaggccaaaataagagcatttcctaatcttatactttctaaacagtttgtagctactagtatagatttggtttattattccgagataagttgtcctctttctataaatgcatcagtaaatatttgggggtaggtagatataagacgtagcaaacaattccacgtatttgccttctgagttagagggggaaagaaaggtatcagttgatttctgagtgaatataagtttctttttttcccttgcagaagcattgttttactgtaagtcttgacagaatggatgccagcaccactagcttctgattagacagatgtgttttgtgctgccatccctcccggccacaggagcctggactctcctgcctctggctgagtcacttgattaaaacacagggctttgaggctgagggcattagctggatcccaggcaagctaagttcctcagtcaaatctattgcctgacaattcccattccctttgccagtgatctgtgttgggaggaaggctgagctgtattgtgttagatttcttagggcagattctttaccactgttggttttagactagcatttgagttttataagtaaaaggtttaggttttcagtttttttgtttttttttttttgtagagatgggatctcactgtgttgctcaggctggtcttgaactcctgggctcaagcagtcttcccaccttggccacccaaaacactggggttacaggcatgagccaccacactcggccctttttcttttagttatagtctagggttgtttcagttatgccattttgggacacgttcagggttttcatcctgagacctttgctatccccaagactgcaactattgtcatagcatgtaattccctccatgtgtctataaaatgagaatgatcagatttgtttgacaagattgtttagaggattaaatgaggtcctgtatttaatgaaaaccagcaaaagcagattgagatgctgtgctgggtggttgaccaaagacttaccagccaaggactcacgacttcattcctttctggtgctactgttgatttagctacaatttctacatgacgtcttcaaggtaagttatgaatagttggagccaccggcattcaaatgcaaatatgatagatctactgctgttatggcacctagaggtagtaactggttatgtaggattcattttattcagttattttaaaggtattttacctgatctggtatttttggttgctaatgtaacatactatatcacgtctaattgcttcagactgaaaaacagtctgaagcaagtgaatgatgaagatgtctgacatttattgagcacttactatgtaccaggcagtattccaagcactatacctacatcaatttatttaatcctcacaataatctattattgatactatttttggtactatgattgtttctattttatgatgaggaaattgaggcccatataatttaaataagttgcccaaggtgacacagccaataagaacaacaacagagatttgaatccaggcagtttgactccagagcccatgccttggatctttggaagataatctgatataattgtacgctatctgtaccctacttgtattctgctctactgttcatgaaattacgtacgaagctgcaaactgagttctagatgcagaatgagggtacatagcttgcgatagtgttttgactacacaggataacccttgaaaatgggcttgttgcaaaaatttagaaaattttgttacacagagatagtaataattaataaagtttaagtatttcaggaaatattagggggtgacaccagactacaaagtgatgagtcagcaacttagtatactatttaagaatcaacactacctggaatgtagtaactgaagtgttgtgtttaggaagttgaatacaggtaaatcacataatttatagtcctttacttagaaaagcaaaaatagtatctttcttttccattccttttagggatgctacaaataacaacaacataataaacagaatgtctgttatctatctagtgcatactctgtgtcagtccctttgctatgtccttgttcctctaattggcaggactactctctaaagtaggtgataattatccactttactgatgaggaaatggaagcacagacaagtcctttgcccaaggtcacagaggtggtaaatggccaaacaaacaattgatcccaggttactttgactggaaaacctgtactcttttcacaacccagtattgcctctttggggggagttctctaaaggaaagatgttatattcatgcttactgaatcctgtgttaagacatatgtttgtcactagtcttgaaacagattataaatattcaaaactaggactgttccagaaaacctaggatatttctgttaccatagagatgtaatgatgggcttaacataatcttccaggaaaaacaactgggttctcccagcgctccatggcctaaggagtcagccacttattcctgcagttatgaagcagcaccacccaggactagagcaactgaaatactatggagaactggcaagaagaccttaattacagtttattttggggcatcacaacttgataagtgagagggaatatactgaagaacttgagtagaaatgaagttgattttcatgttgtgcatgatatgaggattttataaagataaagaatttttatatgagttgtcctagcaggaccacttagatatgacacatttttacagttttataatatgcattcttgaacctttttgaaatagtatcatactacctttctgcaaatgtattcactgtgttcttgccagattcctagcaacaccttgccatctgatggttatagcagatgattttgaggtgcaatcataggtggaaggtcagaagccagagttatgaagcatagtggccaacaaggtgatgggagaggggtcatggttaagaagatgtttctggctagtgtccatgtttcccatagaggccactttgtagtggaaataaacttggctttggaataagataagcttgaatttaaacatgaatgcacttactagttgtgttataaagcaactaatttaactgtggttagcagcttttgagtttctttgggataggactctcaacttccttttctgcaaaaattgcattcattttctcacaagatggggtaataaatatattaaagcctctgactttgtgtcttgcatagagtcactattcaataaatgtcagttctattcattttccttttcttcctttcctttctctcttcccttctctttctttcctctctttccttctctttccttcccttcctcttggctattgaaggtgacaatggtgaagtagtacttacagtacagtgtggtaagtgttctagttagaaatgcatacagcttattgtgagattgctgagagagcaactgccagggaaagtaggaaggtgacagataagctagacctatggctgagtaggagtttgctaggttaagaagagactgagggctgggtgcattggctcatgcctgtaatcctagcactttgggaggctgggcctggtggtgggcacctgtaattccagctacttgggaggctgaggcaggagaattgcttgaacctgggaggcagaggttgcagtgagctgagatcatgccactgcactccagcctgggtgacagagcaaggctccggctcacaaaaaaaaaaaaaaaaagaaaagaaaaagaagaaaagagagtgtggtggggaggaaacgttgaaggatgtttcaagttcaaagccatggaggcagggagagaagggataccaggagaatggggaggccaggcacggtggcccatgcctgtattcccagcactttgggagcctgaggcgtgtggatcacaaggtcatgagttcaagaccagcctggctaacatagtaaaaccccatctctactaaaaatacaaaaacttagccgggcatggtggtgggtgcctgtaatcccagctactctggaggctgaggcaggagtatcgcttgaacctgggaggtggagtttgcagtgagccgagatcgcgccattgcactccagcgacagtgtaagactccatctgaaaaaaaaaaaaaaaagaacggggaagagactactgagttggcacacaggacaggtaaattatggttggtggcgctgctaatgtagtggagtttcaccaaagaccaaaggtgaaatgaggctacaatctgaccctttatcttggaggctgccctttatctttgaagtttctcaatattgtaagtgagataatgaaatttctctttaggataataacactgctcacagtatgaaagatgggtttggggttgattggcatacttgtttgcacttgtgtgtacagaggagataacatatattaaagcttttttggtaaaaggtaatggtacttgtagagatggtgctgctattcaagacttctataggagagtacataatgtgttggaaaatggtgactccatatgctaatttatggactggatcacattggagccaaattgttccaaaaatataaatatgtcttaccttgagttaagcatgtttaccacttttcaacaaaggaccaggtgtgtttctggcaaaatgattgaagcttgaatccagaaaaaaaaagtttaaggcccctttttgtatttccaaaattgagtttaaggttctagggatagtagatacctaatgcatgctgaatttggttagtgctttgtagaatttcttgtgcttagcatgcactattgtggttagcagctgttgagtttcttagagggaggagcagagaggctcagactacaaaactatcatctatgggaaatggcaagaagctaggtggcccttctccctaagcagtcaggatcagacccaggtacacacagatgtgtgtttctgtgtttctagccctgtgtttatgttttccggatagttgcctgctttatctatgctggagggaaaacccgacattacctgggttccttggggaaagccactggggagattagccttggttactagaggtgcctcaatgtgaagacagtcacctgcatctgcacttgaactattaataatgtgtggccaggagccaagggtgtggaggagacgtggctctaccggtcagattctgcaggggacagatgtgaccctgttgtggaactgagcacaggtatttgcttggtgtgtgaggaagtgaggagggagtggatgtgtttgtttttttccttctctggcatactttttccaagtccactctctcagcagccaggaactaaaagcaagtcttgggctgacattcagtgcatagggagtaagttgtaccttttaaattcctgggggccaggcatagtggctcattcctgtaatctcagcagtttgggaggctgaggtgggaggattgcttgaacccaggagtttgagaccagcctgagcaacatagcaagaccccatctctacagaaaaatagaaaaaaattagcagggcatgttggtgcacacctgtagtcccagctactcaggaggctgaagtgggaggatcacttgagcctgggatatcaagggtgcagtgagccatgattgtgctgctgaactccagcctgggcggcagaaacccaggaaactcttggagacatcctacattggggttttggaatactagacctttgaacctggactctttcatgtgccaatccccaagccctttcactgtgttagtcaagtctcagtctagtcctttgatagattctggtttggtctctttactttgagaccaaagcaccaaaactgatgaactgtgtgtgggaatggttaggtccttgagggtgtgtttgtgtgcatcactacctgtagatgcagtgaccaagggtgtgagcttagtttaatacttaagtatggtatgattgatctttacagaaaatctcttgctattctctttaaactattattaaacagtgaacatttgttgataaaagggtcagcatgctgtagtgggaagaatatcagatttagaggcaagagttaatttatttgatagatactcactgagtgttttctatgtttgtgtgccaaattgttttaggctcagagtccagtggggaaaatagatatctgtaattaccactcagtgtgatgttcatagtcagatgtgagcacagaggaaggaggtggggtggtaagagggaagggagatcaagtgccaaggtagggcttcctggaagaggtggcatttgagaggcgatctgggtgaataagaatcagaaggtcaaaaggctgggaaatagcatggcaagcatggtttcatgttcaaggtaaggctggcaggagctgaggccagtgaagtaggtagtgggctgatcatgaagagtgtagtacatgttattaaggagattggatgctttttatggacttttagtcccttttgttgagctcttcctaaccctgtttctaactctgaaatcctagctgttcttaaaactgcagctctatgctaattcttcctgaaatcttcctggttcatcatggcaggaagttttctttccctcctctaactggtttagtgttcggcttatacctcttttatggccatcatcacataccactgtgtgttatcattctttatgtcctcatcttatcttcccttttgttccaaaagttcttagagcgctgggactaaagggacttactatttccttaatgcccaaagcccagaaggctgagatagtacaagtgtgttaaatgaatatattttgaagtgctaagttatgttccctgtctttttaaggtttttagtacattgatgggctttaagaatttagtggtcaatgggcagttatcaattaattagatatttggctttttattctcatgtgtgcagaaaagaattaacatagtgggtgtgaaactgcctgtccatagaaaggcctgcttgcaagttggcctttggctggcattagggaacttggatttcaggaggattcccacaaatctaaatgattgagtagctcactgtgcctaaactgtttgtgcaagcaatatggtttatgccgagcacctgcttttcttctgggagtctggaatttgggtacatgccagggaaggggtgcctacatgacttgtccccattaaaaactctgggcactgaatctctaatgaacagtctggttggtaacatttcagatgcattgtcacaacttgtgtgtccagtgtgactcctcttggagaagacccgtgggagctcccacccagttttatgcagacttcaccccacgcacctttttccattgttgagtttgctttgtatcttttcactgtaataagtcatagctgtgaatatgactgtatgttgtcctgttgagttatcctagtgaatcatcaaacctgggactggacttggagatcccttcaacgcaccatgaaatgccacatatgtgaagccaattgttttttatttttggtttgtttttggctaagactctgaagatattaaagactctgagaagttattggtctttacataagagaagggcccatttctcaagacgctatgtatttaggcatgtgaagaaggtgcttaagaaagtttcacgggtttctcttgtcattccgtaaaccaaatcacatttcaccttttagaaataagtgtcaagctttaaaatttcaaactttgagagtgtcagaagctgtgatgatccgtttgtttgaaaatgaacagggaatgggagggctgacaaaaaaactgaacttgagatcagtgggtataggctgggtgcagtggctcacgcctgtaatcccagcactttgggaagctgaggcaggtggatcacttgaggtcaggagtttgaaaccagtctggccaacatggtgaaaccccatctctattgaaaatgaaaaaaaaaaaaatagctggcatagtggtgtgcacctgtaatcccagctactcgggaggctgaggcaggagaatctcttgaacctgggaggtaaaggttgcagtgagccgacattgcaccactgcactccagcctgggtgacagagtgagactccttctcaagcagcaagaacaacaacaacaacaacaacaaaaactttgtggtcttgagatcagtgggtatagactaaggtatggtatgagatagatgagtggccaggtggggtatggccagctggggaagctgtgtataaacacagacttcttaagattttattagatcacataggctgtagctgacaaaagggacaataataataaagactaatgttttctttttctttttcttttcttttttttttttttgagaaggagtctcgctctgtctcccaggctggagtacagtggctgatctcagctcactgcaatgtctgcctcctaggttcaaatgattcttgtgcctcagcttcccaagtaactgggattacagatgcctgccaccatgcccagctaatttttgtattttcagtagagacggggtttcaccatgttggccaggctggtctcgaattcctgacctcaagggatcctcccacctcagcctcccaaagtgctgggattacaggtgtgagccactgctcctggccaaaaaagactaacattttctaatataacatttgtatagaactttacagttttcaaaatgttttcacatacaatatcatttaatgctaaaataatcctataaggtaggaagtattattagtttccacagctagggaaactataattcagaagaactgaatagcttgcccagagtaatatggtcggtttgagctgcacacctgtagtcctagctattcagccttgacctcctgggctcgagcaatcctcctgcctcagccttctgagtagctaggactacaggtgcatgccactgcacctggatcatttaaaatttttttttatagagatggggtattgctatgttgcccaggctgctcttgaatgcctgggcccaagcgatcctccagccttggcctcctaaggtgctgggattgcaggcgtgagcccaaattcaatccttttgattttaaacctagatcctgggaaatataagaactataaagtctcttagcttcctgatatatttaagtttatttaaaagtatatatcagtcaagtctcagacctgacagatattactgaatgaatgaaaagaagttgaggcaaattgcctactttcactctgtgccatcctgtgtatagattgtggggaaacagttgatctttctttttagaagctgcatttgggatttggatagaaagagactagaacagaggagctgggaggatgtgggctccagttccaaagctcatggtactctgcaggagaaagttgaagccttcttgattgcccactgtaagatctgggtgacaaagagctattggagaaggtttggttgcatttttcataatatctcagatactgtcagagtcctaaaaatatcacttatcagaattagactcttagaaaaatgaggggcaatatttgcctcggattcactttcattatttctctaaatcaggggaggagttcttgggacatttttcctgccccaaaataagagttggtcagagcatatatcgtgttaagtttctatggtgtgtcagatatcagctgggtgtttaacgtgaatcatccttttaattcttacaaagatcttcaaaggtagaaatttgatgccatataacctagataagaaaaattagacttggagaagttaaatatttgcccagagtctcacagcttttaaggggtagccctggaattcaagctcaagcccgactcccaagtcagtgctctttttcttccctgtgctgcctgaacacaatgatgcaacttcataaaataataatcattagatcagttcttatgtaagtggttaaatctaacctgagcctcagtgaatgttaaggctcttctatgaagaagtttaagcttctggtgcctactcagagtttttacagcaggagattcccctggtgatgatggcttatgtgtatgctctgtgcttgtgtgtcacctttcctgagtcctttgggatttccagagtggcagccttcccagcactatttgcagtttggtagatatgagggaaggggagttgtggcctgctctgtcagtttgctgatttcagagccagctcacctgaagtcatcctttcttgcagatatttggcaaaaactcatctgggaataatctgctttatcaaatttaaaaaggtgaaaatttttatattgtagaaatataaggaagaagatagaaatagatggtttggagtggcttttactattcttgttagtttcatcctggaaaatgtttcctatgtaactttttctttttttaacataagcagcacattatagtaaaaaacaaaaaacacggccttgggctctagaaaatacagtgaaagtgctgatcatgaacaaataaatttttggtacactgcctggcacagactagggatacaattaacatttgttaaatgagtgcaactcaggctactgggcgtaagtatctggccttttctgctgcccaaatcacagagcagcccagaccccagttcacattagtgtgctctggctgagagggttcagtttttttttagatctgatggtgagcctggagccaggccatcatcatttcagaaaataaaatgcaagcattattccttggggggatgtgactttatttggggggctgaaaataaacttagcggtggtggtagtaataataacagctaatacttatattagctaatataagtattacagctaatacaaggttcactatggactcatgctagactaagtcttttatacatacaagtgcatgtaatccttataacacaattttaagtagatattttaccagtgaggaagctaagtaacttgcccaaggccacacagtgggcaatacttctgaaatgtaaatgtggagaccgaagtacagccacttaacctctccttagtgatattgtaaaggaatgggaagctaggcattttgaaagaccatctctttattgttttttcttggttttctttattagaaaaaaatgatgaagggatctactttccatgaattcctggagcaattcctggaaattctgcttttcttttacttctgtataaacctcaaatgaacttttcttttcagaaagaaatacaaattcaatttcatgtttgagacttacttcctgtacgtccccagcaatataatgattttttttcctcccttcaaataccagacaaatagcagaaatcaagcccaagcaagtagaaaagtcttgataaatgcaagtttcctcaccaagggataattcatggagagatgtgatgcccatttgagaatctggattcttttgagtttggtgatatgaaagtctcttttgtgaccttgagaaagtgggaggttttgttatttgttctgttgtcctttaaaatttaaaactggctgggcgtggtggctcgtgactgtaatcccagcactttgggaggctgaggtgtgaggatcacttgaggcctgaggtttgagacaccctggaaacatagggagaacctgtctctagaaaaaaaatttaaaaattagctggatgtaatggcatgtgcctctagtctcagctacttgggaggctgaggcaggaggattgcttaaacccaggagtttgaagttacagtgagccataactgtgctgttgcacttcagcctgggtgacagaaagaggccctgtctctaaaaaaagaaaaaaaaatttaaatctggccaggcaaggtggcttatgcctgtaatcctggcactttgggaggctgaggtgggagagttgcttgagcccaggagttcaagaccagcctgggcagcatagtgagaccctgtctctacaagaaaaaaaaactgaatctgctcttttgaatctttggaggatggggattgagggattgtgtgctcttttctctaatgaattgcataacagcattaaagatggcaaagcattaacttctttttttgacttatttttcataccacatagttatatttaattaaatattttccagggttcatatctgtatgagggaagatatgactaaaacaatgtggaaatgcaattgcttgccaaattaaagctacagattctccaaccttttttgggtaataggatttttcatttgtgcagaactaaataatgtgacagctgtgagattttaaccatggatatgcctatttctttgtctgttggaacaatttccatgacaggaagtgttgagagcatgtccttcatttttaaggacaggttataaaatattggttatgagatatctcaaattaaatttcatggatgttatcagagtttgaggtggctgaaacttttctccctgtctgcctctttgagaaatttttaaattcaaagtccctgaacaggaaaaagaaaactgttcatctttaaaacataaaatattatgataagagttctcaaattatttccttccttaaaggtatttgtattttgaaataaagaagacatgataaaagctctgaaactatgctcaccatcactggctgtcagagaaatgcaaatcaaaactacaatgagataccatctcacaccagttagaatggcaatcattaaaaagtcaggaaacaacaggtgctggagaggatgtggagaaataggaacacttctacactgttggtgggactgtaaactagttcaaccattgtggaagtcagtgtggcgattcctcagggatctagaactagaaataccatttgacccagccatcccattactgggtatatacccaaaggactataaatcatgctgctataaagacacatgcacacgtatgtttattgcggcactattcacgatagcaaagacttggaaccaacccaaatgttcaacaatgatagactggattaagaaaatgtggcacatatacaccatggaatactatgcagccataaaaaatgatgagttcatgtcctttgtagggacatggatgaaattggaaatcatcattctcagtaaactatcgcaagaacaaaaacccaaacactgcatgttctcactcataggtgggaattgaacagtgagaacacatggacacaggaaggggatcatcacactctggggactgttgtggggtgtggggagcggggagggatagctttaggagatctacctaatgctaaatgacgagttaatgggtgcagcacaccagcatggcacatgtatacatatgtaactaacctgcacattgtgcacatgtaccctaaaacttaaagtataataataataaaattaaaaaaaaaagctctgaaactaagaatcttaggtgggggtggtatttattaatcatttgcttctgtgatttcttttgtggaattatttttacttactggtttattgtttccaaggagtgcttgtttgaagaagaaaaaataactttctgcaacttcagagtgacacatttcataggtcccccattcagagatggttttcattaaatgggctccaaagttaatctacaagttaagagagaaatgaacatccttgacttagaacatagaaaagccaagtgacatttggcttgcaattgcctccactgccctgtcagatagtctattcttaactaccccgttagggtgggtttgagagaactctattggcagagccccaagtcacccctaatttgaagatcaccacccactagaggctgggttggtgtcatggtttcccaagtaagtcatgtcctcttcagtgattcaaagtctgacctcctacagagcaataggctttccctggagcagactatacccctcatctaaccattttttttgtctaacttcctgtgactcttactgggtacatccccaaattttgtatgtagtaataatctgttctatacaattcgccagttatatactttctataggttcagttttctcagctagatggtcagctcatcaaggttattaatccctttctcttgcaacttttgtaatcctatcgcagctgctggtagaattcccaggaaatgagattgggagttatgggcctttctcagttacaagatgttgagaaagcaagcagctctttgctgcatgtattcccttccttatggctccaagtttagacatatgactccacatgagttattccaaacatcttgctaaccacatgactccatctgggccattgacttatgttagaagagagggagtcaaaagagtcttcaggtacgtatttgaagagctattgcaggcacattggaaaacaactgtttgctgtgttcacaatggatagtagtacaaaagggaacagatggcagttagatggtaaaaacttagatgataaggaactggttgacctttagaacaggaaagatgtttagagttcatcatcccaatcctcattatatggatgagatactgaggctgaggctggctgaatgttaagtccaggctcacaaagctagtgagtcacatagctaggtattgaattggtgtctttgaacttgctgtttaatgtttttctgtatctctctactcccaatccttaatcattgcaaagattgtggctagttgctaaggtgctgtacccagcaaagctgagtgagggctctttctttgtggaattttgtatatttttaagttaaaagtctaaatcattgtcttcctgggaggtacaagtaaagtaagatattttctgtgagccagaatatttactaaggttgtttttttttttttttttttttttttttttgaggcagactctagctctgctgcccaggctggagtgcagtggcgtgatcttggctcattgcaacctccgtctctggggttcaagcaattttcctgcctccgcctcccaagtagccgggattacaggtgtgcatcaccatgcccggctaattttttttgtatttttagtagaaacgaggtttcactgtgttggtcaagctggtctcaaactcctgaccccaggtgatctacctgcctcagcctcccaaaatgttgggattacagacatgagccaccacgcccagcctactgatatttcttttttattggaagatacacatttgttcacatgaacatttcttctgctgcatttcatctcttcacattaaagtggtttccaggtcctatgtttatctcttctgctgtggaattgtgatctgggaggacctgccagcaccatagggcacatcccagttatcctgaacagacaagcgagaatcttcaagtttgttctttatttctaacatgtagaatccctggaatcatgggaagctactgggagcctgtctttgaaatacaggtgaacctggaatgggagagaaggcacagggttgggcacattgtaggtacttaataaataattgttgaacaaataaattatacttctcctcacctcttctcttataattatggagctggggaacctaaagacaaatccagtctaacttttatagttatgctttatattatgcagtaaagcaagtgaagtctagaaatgttaagtgacttgttaaaattcatacagctagtcaggggttgtgcttgggataggcttaggtcattctgtctcttgatattatattaggttgaaccaagtgaaattgctatttctgtaggtcaaaacagttgtatacaggttgagcatctctaatctgaaatccaaaatgttccaaaacctaaacattttgagccctgacatgaccctacaagtggaaaattccacacctggcatcttcactttctgatgattcagtgtacacaaactttgttctatgcacaaaagtattaaaaatattataaaaaattaccttcaggctgtgtgtataaggtgtatatgagacaaacgaatctgggtttagtcttgggtctcatccccaagatatcttatatatatgcaaatattccaaaatctgaaaaaaaatccaaaaatcccaaacagttctgatcccaagcattttggataagggatactcaaccggtattggcaatttaatactggttcaccctaatatgttttgaaggatctatactgtatacattcttatttcaataatagaaatcataactttggccttctctctaaaccaagcaagcatataatattacagcttaatgtagagatccacatttgttcggaatctgttgatcctgggtttacatcccttgttctttctaagctgaagtttcctcatcaatagaataggaataatattatgtgcatcactcataagattgtttaaaagattgagatgattctttgaagggcttagtatagtacctggcacatagtaagtacctaataagtatatgctattgttaattgtatcaaaaaggaagagaataaaactgataaggctttcaaaatgtataatttggccaggggcggtggaagatacatgtaatcccaacactttgggaggccaaggtgagaggcttgcttgagcccaggagttcaaaaccagcctgtgcaagatagggagactttgtctctacaaaaaaaaaaaaaattatatatatatatatatatatacatatatatatatatatatatatatatatatatatatacacacacacacacacatacacacacacatcatataaataaataaatatatatatatatacacacacacacacatacatcagccaggtatggtggtgtgtgcctgtagtcccagctactcaggaggctgagatgggaggattgcttgagcccaggaggtcgaggctgcagtgagctaggattgtgcctgggcaacagagtgagaccctatctcaaaatgataaataaatatataaataaataaaatgtgtaatttttctggaaagaacattcatctttttgaggtttgcaagatatgccaaacctttgttgtctaacagggacatatctttatattatctctatttcatattcttctgcttgttatagggaacatgtgtggaatgatattctatttttgagaccgttgctttgacacatgtgctgtgtgccacacaagattattatgatagaagtaaagcaaccaaatgtgagtatgcagaatgagaccatgagctctataaagggaggggacattctgtgtctcagtcatggatgattccttctcatttcctttcttttttttttataattatagaataattttacttgtaatgcatattgtcaaaaatctcatcctagaggccttctacagataattaaggtcagagcagctattgacaaagaggaagggaaaaggaatgttagctattttactatgatgtaatggatgccttagaaacctggatgaactaagggtctctggaacccagaaggtacatttccacactcattattaaaggtgatgtgattactttggcaagtttccagacttttgcatggtgtctttttcacaacttgtgtatatttcacagcttcacaacatatttataagcaattggttcaactaatagaaaacatgctatttacttcccttatctttgggatctgacactaactctgcaacttactgtttctgtaccccattttcttacctaaaaggaggttaataatatgactcatctcacaaacttgttgcgaagactgaataagataaagcgtgcaaagtcttaagaagaagacatggcatttagtaactaataaaaaatgtcacctctctcagtatcattattaccttagaaaaagtccttctcattttcatcagaggccaggcacatagttagggttcaaaatgcagttgacaaactgactgaattagcatagtctttaaaaactggaccctggaaccatatcccctgtttgtccttccctgccccatgggtaagcaaatatctccactgcctgggctcaggagacacccatgtgtaaagtatttctcagataactactcatgacccggtgacacatcaagagcaaatatattttcagacagctgcacacttggaggaaaagttaccacccttgggtaagaacagactagggcattcccagccctgagaaggaagcagtagatatttcctgagtacaagtagctttcacagcagagaaaataaacagaggccccttctccttcctttccatacctctagcccaccattcttagaggccagtagacttttcaggtgtcttcctccattatctaggctgccttgggtatgaatatactaaataccataaaaatacaaaaaaaaaaaaaaaaaaggaaaagaaaaaaaaacagaaaaaagaaataaaccattggggaggagaccaagcccaagacaagttgctttctgaagtgatgtagtgggagaggacttgcggtacagtcctaacagctacccacaaatgcccttgtcatcttccacttgaacttgtctcttcccatttactccatcctctatctacatttactttgtccacactactttgccactggaaatgtaagcaaagtttgatctttagaggaagatgctacatgaatacaacactggttacttatttataaaaaaccataaagttactaagaaatggctgctattttgagctatgaggtgagcactagttcctggaagtatctatggaagggtgaaaacatttagtgatcatctagtgagggtgacattgagcaaggccttttatgaacaccatgtctccttcacatagcagccttgcagaaataaatattatcccacattttacaaatgggaaatcgcaggttcagagaaataagctggcacaagaacacacaagaaataattagggcagatctctaaacaaagctatgtatgcacttgctactacagcaggctcggatcctctccccaggcctgtgaggcaggtgggcacacctattgctgaccttttgaagttgagaaaattggagcaaaaacattgtgaattttcagcttatctggttctactatgatgagaaagttcatccatccattcatttgcttatccatttattaaaagcacttttattcaggctctactctgggttgagcattgtgctaggcactgagagggtatcaaacaggtataaaacatgggctctcatggtaagtaagaatgcttacttcatgaccttttatcccagatatggagataagagtcctgaaatatttgtttttaatataagagcaaaatttaggttgtgtgaaaaacaattggtgcattggaagtttaaaggaagttagagatgcctctaaactccccatagagagctctgtggaggtggttaagttttatgtgttgatgccccctctctcgacctgccatgcacacacatacacacactctcaaactggtagtgctgatggtagcagaggagaggtcgcttcagaatgtttttaaattaatctttttattttgagacaattgtagatcacatgaggctgtaagaaatagtgcagagatccgtgtaccctttacccagtttcccctatggtaacattttgtacaactatagtatatcacaactcagatattggcatagactttttccagtttactaatgtgtgtgtgcatatgggcctgtgtgtattaagttgtatacaattttatcacatgtgtcaaccatcactggccagatactgaccagttacaccaccacagattctttccatttgttctttgataatcacacccacctccctacagcctccacagcccccatccctaacccctatcaaccactaatctgttcttcatttctataattttgccatttcaagagtgtcatataaacagaaccatgcagtagtggccttttaggattggcctttttatatttagcacaattcccttgagattcatccaagttgtgtctatcaagagtttttcctttttgttgcttagtagtatcccacggtatggatgtaccagagtttgtttaaccattcacctgttgaagagcactggggttatttctaatttttggctattacaaataaagctggaatgaacaggacttttttaaacatagtattatgtaacatagtcaggtctaaccttaggcagagcgtgaagtggaagtcactgtcattccttccttgggaatattttattctttcatttagcactcattcaacaggtattttttgagctaggcattgtgctacttacattctactgagaaatagatgagtgaaaatctgttgactctcaggcttcatacatcttaatatgtagcttctttggaggaaaacagccagtccagaccatgagcctcatttaagctcctgcggactctgattgaccttgagagttaaaacttggggagtataccttctttaattctcctgagccaactcatattttctgtaagatttcatgatgattcaaattctcattaaaaatcttaaaaattagtgttttgaattattttagaaacagaaatggaagaagtttctgcaacaattgttttaagatctgtttttctttttataaaactgttagacaaggatttttacttttaggaagatagtaaacactttctgaataatagttaagggaaaaggcaaaatcccacttttccttctgttttccgtacctgacgggggttcatttctggctgtcctgggtccagctgtgttgcttgcttgagctcatcctgaaactctgtcctatccattttggtatttagttaatgtcttttcattttagttttgttgagaattacaaaaacctttatcctgaggtgaaagactgaattccacagaggggacctcattggtgttttgccttccagctcttagctgggcactcaagtccttttcactcagcgaccatacatggttgtggtttccatgtggaatgggtgtggcatttctcttggctcaaatttcccctttctcacctcccacttctccctctctaccttgaagcctcttctgattggtttaatgagaaataatacccaaataagaagataccgcattaaatacatgcaagtgctgatgtgttgctgccggcagccacaggctgtggtgtgagtaactagtgattccgaggatgaaagaaatcagtttataaatctcaatgataggaacatttttttttctttaccccttaccagctctgtggaattgtggaaagaaattgaagaccaggattcaagatgatgtattttttgtataattctttgcgtgtgtgtgaatgttaaaggctggcaatttcctatgcttctaatgtgcatagatttaataaaacgaacatgtaataaagttaagctgcatgatgatatcatttatttcccttgtatctcagcctaaatagtagtggcatttgaaagccattatgttagagaataatataattatggaccctgaatttgaagtaaagcaattcagccttactattctccttgatctcctttgatgtttacttccacttgtttttcttcttctcttctatctaagatggaaggaagaaaaccagtaagacagagaatatcatatctttagatgggattttttttcttcacatctctgttattttacttattcttttttgcaagacattaatgaggtttaccataattttttttttttctattttggtggctttggtttcctaatgggagaatacagcagaaggaatttgaggcgttagtggttcatagcctagaaagctctgttttcaaaccattgcattgcaccgtctctgtcattaaatattgcaaagcatagtctcagctgaattcactgaatgtctttcctgggggaaatgctgcttttctcctctgtcagggtctctagaaaggtgagggttctgccaggtttaagaaagatgaatttccagttaccttgtgaaggttgatttcaggactctgttctgggtcatactaggaagcctgccatgggcacatggcacgtggttgttgtggccaagtaatgcccatcagataggtaaagacctcctcttcctgggctgcctggggaagtccagtctgaggaaatctgtggccagaatctgagccagagatcagaaaatgagccaggccacagagtgtgcagggatcatagagaaaggagcaagaagagccaaggactgaaaaatgtacaacccaagccacctggagaatgattctgtgctttgtgacacttctgtccaagaaggcagcatggggtggaagcacagagcatggacactggaattggacaatctggctggagttgtgctgccattactagcagttaactgagtaatgagcagttacttggcctctctaaacctgttttcttatctgtagaatgcttacttcatgttgctgtgagaaattaatgagttaatatatgtaaggtacttaaaaccgtgcctagaatattctgttatgtaagactttgatagtcttattgtttttattaactaatattaactatttttgcctagtttgctatataccatcaagaacaagggtgttaggatatatgaagaaccagagttctatatataaaaatcaaagtgttttatatggtttggctatgtccccaccgaaatatcatcttgaattgtagttcccataatccccacctgttgtgggagggacttgatgggaggtaattgaatcatgggggtggttacctctatgctgctattctagtgatagtgagtgagttctcacgagatctgatggctttataaggggctttcccccttttgcttggcacttctccttgctgccaccatgtaaaaaaggacatgtttgcttccccttctgtcatgatcgtaagtttcccgaggcctccccagccacatggaactgtaagtccattaaacctttttcctttataagttacccagtctcgggtatgtctttattagcagcataagaatggactaatacagtgatttggtactgggagtgggttgctgctgtaaagatatccaaaaatgtggaagcggctttggaactgtgtaacagacagaggttggaacagtttggagggctctgaagaagaaaggaaaatgtgagaaagtttggaacttcctagagacttgttgaatggttttgaccaaaatgctgatattgatgtggacaacgaagtccagattgaggtggtctcagatggagatgaagaacttgttgggaactggagcaaagctcatcatgctttggtaaagagactggtggcattttgcccctgtcttagagatttgaactagagagagatgaaactttgaacttgagagagatgattaggatatctgtaagaagaaatttctaagcggtaaagtgttcaagatgtgacctgaatgctgttaaaagcattcagttttatgtattcacaaagatatggtttggaattggaacttacgtttaaaaaagaagcagagcataaaagtttggagaatttgcagcctgactgtgtgacagaaaagaaaaaaccattttctggagagaaattcaagctggctgcatacatttgcataagtaatgaggaaccaaatgttaatcagcaagacaatggggaaaatgtctccagggcatgtcagagaccttcacagcagcccccccacccatcacaggtctggaggcctaggaagggaaaatggtttcctgggctgggtccagggcccccctgctgtgtgcagcctctaggacttgttggtgccctccatcccagctactccagccatggcttaaagagaccaaggtacagctcaagttgttacttcagaggttgtaagccccaagccttggcagcttccacatggttttgagcctaccagtgcacagaagtcaagaattgacgtttgggaacgtccacctagatttcagaggatgtgtggaaatgcctgatgtctaggcagaagttttctgcaggggtgggactctcatggagaacctctgctagggcagtgcagaagggaactgtggggttggagaccccacacccagtccccactggggcactgcctagtggagctgtgagaagagggctactatcctccagaccccagaatggtagatccaccaacacttgcactgtgtgcctggaaaagctgtagacactcaatgccagcctgtgaaagcagttgggagggggtgctgtatcctacaaagccacaggggtggagttgcgcaaggctgtgggagccaaccttttgcatcagcatgacctagatatgagacatggagatctcaaaggagatcattttggagctttaagatttgactgccctactggattttggacttgcctggggcctgttgccccttcatttctgccaacttttcccatttagaatgggtgtatttacccaatgcctgtaccctcattgtatccaggaagtaattaacttccttttgattttacaggctcataagtataagggacttggtttgtctcagatgagtctttgaactgtgggcttctgagttaatgctgaaatgagttaagaatttgtgggactgttgggagggcataactggttttgaaatgtgaggacatgagattttggaggggccagggcagaatgatatggtttggctgtgtccccaccctaatctcatcttgaattgtagttctcataatccctgtgtgctgtgggagggacttggtgggaggtaattgaatcatgggggtgattacccccatgccgctgttctagtgacagtgagtcagttcttacaagatctgatggttttataaggggctttttccccttttgcttagcacttctccttgctgctaccatgtgaagaaggatgtgtttgcttccccttctgtcatgattgtaagtttcctgaggcctccccagccatgctgaactttgagtcaattaaacctctttcctttataaattacccagtcttaggtatgtcttcattagcagcattggaatggactactgcagtgttcttcctattctctactcaccacagcgcagaacacttctgtaccccagatgtgcaggggttttccccacacataccaagcaagcaatcagttctacagcaaacaccagctgggtatcctctaattcaattcaattctgacattgcctaactgaagatagcatcagatctcacaggctgagggcccagtcccacaagactgtccctaattcagatgccaatcgcaagtaataggttgtcacctatatttctgattgactgactgtaaattggatttctcactactcctttttttgggtttgactaattcactagaatgttacagaactcagagaaaaactttacttgtatttaccagtttattataaaggatattgcaaaggatatggatgaacagccagatagaagaaatgcatagggcaaagtatgggagaaggggcatggagcttccatgtgttcagctaacaagaagctcttcaaacccaatccctttgggattttatggcagcttcgttacataggcgtgactgattaaaccaatggacacagtgattagcttaacctttgtgctggcagggacctctcttctccccagagactggggctttggactgaaaagtttaatcatgctttagtctttattgtgaccagcccccattctgaagctacctagtggctgccagccaccagttatcaccttagcatacaaaagacactcttatcactccagagattccaagggttttaggagctatgtaccaggaaaagagaacaaagatatttcacaatatcacagagagacatttcatttggtggaaaattatcctactctttagatgagcataagcactattgaaagaatgactgttgcttgcttgactacagactttgggatggttttactctgggctttgaaatgcaataagaggtatagggccatagttcattgtagacaaattctgctgtggcctgaattgtcttctttcaccagtgtgagtcacagcattttatcgtcagaaggagtctatgtgagagatcatcctttttagttccctcactttgcagatgaggagatagaagcttcagaaggttaagtgacttgcccagcatcacatagcaagagagagagactgagctgggagcaaagttgaccttgcctaatccctggacagtgttctttctctagtacacaccagttttctaaaatcatggcccctctcttcagtgagatgtacctaacaagtcttctcacacagtatgtccttaggaagtatttactgattgatctttgttgattaaaaatttataaaatgactgtttttcttcttctgaaactgaagattgttttacctaaatattttcagttttccatgatagtgtgaccttttttaagtcctacttctgctagggaaaaaaaaaaacacttgatgagttttatctgttccatatgtttatagcttttgaaatgaacatttgaaattccattatgtcagtttgtagatagtaacttatatctataatatatccatatatacacatatctatacacaacatagtaattaagagcacatatggaggtgaaattattctgcttctctgaacccagttcctcttttgtgaaataggaatgataatgacactttccttacagtgttggactgaggatttggggagatagcccgtgtaagtgttccagactggtggctcttcatagaaataatagcaatagcaataacttcacatgtaatcctgctgtccccctcccaataaacaaccacatctgaaccaaaatacccttgttagaacactcttctatggcaaagggatgccttattttactacctggggatgaggatcctggttttatcatcacttagcagccaccgagcctaattttctatgtaataataggtcaagaggttttcacgatttcataaattggttgcaaatgactgagaactaaatgtatagtagtttttatgtatatagatgtatatgttatataatatatatagtatagtacactacagaatatatagattctatattttgtttttattttattcatgtatttgtttcttgagacaaggtctggctctatcacccaggcttgagtgcagtggggcaatctcctctcaccgcaacctctgcctcccagtctcaagccattctcccacctcagcctctcaagtagctgggactacttggcatgcaccactacacctagctaatttttgtattttctgtagagatagggttttgccacgtggcccaggctggtctcaaacttgtgagcttaagtgatccgcctgactcagcctcccaaagtgctgggattacaagtgtgagccactgcacgcccagccttattttaaatagatagtgcatgcatgtgtctatgctactcctcttcactaagcttagacattgttaggcacttgctcaaggataagtcttcaagacttcagtggtgcatgtctacaggtcttgctgccttctgttgagttgctcaagatgccagaatggctgaaaagatgctagaactggttctgctttctaacttgggagctctgcttctctttggtcactgcattcactctgcaattagtaccgggtactgttgtgatggaaaagacggtttaa

SEQ ID NO: 731 - DNA, 8082 bp, Homo sapiens
  source 1..8082: mol_type = other DNA
ggtctcactctgttacccaggctggagtgcagtggagtgattatagcttactgcagccttgaccttctgggctcaagagatcctcccaccatcacgaggtcaggagatcgagaccatcttggctaagaaggtgaaaccccatctctattaaaaatacaaaaaaattagtcaggcgtggaggcgggcacctgtagtcccagctacccgggaggctgaggcaggagaatggcatgaacctgggaggtggagcttgcagtgagccgagatcacgccactgcactccagcctgggcgacagagcgagactccatctcaaaaaaaaaaaaaagaaaagaaaaaaaaagaagagagatcctcccacctcagcctcttgagtagctgggaccacaggcacacaccactatgcctggattttttttttttttttttttttttttttgtagagacagggcctcaccatgttgcccaggctggtcttgaacttctgagctcaagggatcagtccgtctcagcttccccccagcccagacactttggctttgcccattttatgggtaataagtgatatctcagggttttttgtttgtttgtttgtttgtttgttttgagactgagttttgctcttacagcccaggctggagtgcagtggcacgatctcagctcactgcaacctccgcctcccgggttcaagcgatcctcctgcctcagcctcccaagacacataccaccacgcccggcatttttagcagagatggggtttcaccatgttggccaggctagtctcaaactcctgacctcaggtgatccacccacctcggcctcccaaagcgctgggattacaggcgtgagccactgcgccccgccccctcagtgttgttgactttacatttctcttacttttttttttttttttttttaagagactgtgtctcactgtgttgcccaggctggcttcactcaagcgatcctctcgccgcagtccctggagtagctaggattacaggcacccgccaccactctcggccccatttctcttatttaaaaaaaaaaaaattgccgtgaaatacgcatatcgaaatgtaccatcttcaccatttttaagggtaagattaggtggtgttaggtatgttcagttgtcgtgcaaccagattgctgttttaaataacagcacttagagatgccgacttcgtgccaggcccagtttgggacattagggactcccagatgaatcagccgctccagtggaactccctgctggtgggggaggcactggcgaagcggtgctgagccgagtcctgacggcgctggagctgaggggcagtgcgggatgccccaggaaggctcctaggaagaggggacccacggtgacttcctaaggaagcgcggttcccaggtagaggagcgcatgtgagccaagatccctaggcctgagccgtctaggtgtgtcccaggaactgcaggaaacggttgggtgagtcagtggtgggcagcgagggtgataagccccttcgtgtcttcgggatggtaagtttggggcacaggtgagtgaagaccgaaggccaggggtggactgacactccgtggcaggcgcagggccgggcaggggggcggcttgggggtggcaaggtttgggtgagaaatggcagcccatggggaactaccgcagggctctgagaccttcagagccaagccccgacgccccttcccacctgcggggcagaactggggatggcaggggggagggtggttcccaaaggagataccatccctggtaaggggacatgggcccctgggagttgggttgggccacaaggagagaggcctgaacggccaaagggagggggcgtgggggaagccgcagcatcagacctctgcctcctccctcagatcgtgaggctccccagcctggctcgggagaccccgagatccccggccggtgacagcaggcgaccccctgctcctgtcaacctgtgggtccctacggacgtggggaagggaggagggaggccccagctccctgcgggggaggggcgtgaagacgcgcgggggtggggggagatgagccggcgtcgccatgacaacgaggccggtggtccggccttggggacccgggagggagggaggcgccgtggccgcgcgcgcgggcgggggcggggggccaggtctcccaggagtagttggggaacacccggcgattctggcggctgcttcctggtggcgcagggagcccgcgtgtttgcgagtgcgtgtgtgtgcgaagttctccgggtaagtgtgccagcgcgcgcctgggtgtgtgcaagggtgtgagcgtgcacacgtgggcacgggcgtgtgcgcgcgggggtgcccggttggatgtgtgcacacgagtgtgtgccggtccgcgtgcccctgcgtgagtgtgcgcgcgcgagcacacgtgtgtgtgcgcgctcgcgtgcgctcccgagcgggccccgggtgggagtccgagatcccgccccctccccagccccagcgcccctccccgtcccccgccgccgcgccggctgcatcctcgcctccacctcgctcaccccctcctccccgcactttctcggcgctccctccctctcggctcgcacagctcgactccgcgctctcctcgccggccgccgccgcccagcctgcgcccgccgtccccccagtgcctgggcacctgttggaggcagaggcaggtgcagggggctgggcaggccgggggcgtgagggtgcggggaagcgtgccagcctgtgtgcgctacgggggtgttcggctctcctgcggctgcaatttctggctcccctgaggagccagaggtggcatctgaggctggggtctccaccgtgggctgtggtgagcgagcgggggaaccaggcaggcagacaggtcctggggctgaatgaggggacagtgggcagttggagcctagaggggtgggtgacaccctgactagaccagcgcctggtgcagaggaggacagagcctccgagaaacagaggcggggccctgcagggccccttgggggacaggcaggctcaggagcagaggggagccccggaggagaggaaggagctggcaagatgatacagggacaacctagaagtgggtgggtgaggacggggtggtgcaacctcgacttctgcaaggagtgggttggcagcccagcccctgtggagtcagcttggggtctgcagggcccaggcctcccacctgccaccggctggcacacaccaccctctccctcgacacctaggaagggaggccagtgagggccccacagaccgaggaggccgtcgcctggccctcagccaggatggctaggtatgatgggctcactggctcacacgccctctcctagccaggggtgctgcatgaggggccgcaggggcgatcgcatgaccatcaacatccaggagcacatggccatcaacgtgtgccccgggcccatccggcccatccgccagatctctgactacttcccccggggaccaggacctgaagggggcggcgggggcggcggggaggcccccgcccatctggtccccctggctctggccccccctgcagccctccttggggccaccacgcctgaggatggtgcggaggtggacagctatgactcggatgatgccagtgagtctgggggcttggaggccccatgtgctggtgggggtctccaggcttgccgtggtggggggagagggggatgggccctgctggctgtgcatgtaggtaggggaggagggcagtgggggggtggcagggacggccaccacagctgcagtcagcgtggagattacagcttcagcaaggctcaatattcagtatttctgctgagacactccaccacccacacagccccagttgcggccgagccagggacccagacgcacacacgcatgggcccactcagcctcttgcactcacactcgcgggctggcaagagagagagacacacagagccagtgcccacctgctggcctctcgcacacacctgtctccataccgacccatgctgcctttcctctctctccagccgccctaggcacgctggagtttgaccttctctacgaccgggcctcctgcactctgcactgtagcatcctcagggccaaggtgggcactccctgccacccaagcccgggcccggtttgcgtgcagcccccagagggggcccattcctccttcccttcccaggcctgctccttcgtcctgcccttgccccctccttctgggctcctccagggtccagctctacaagagggatggagagaggtgccgggagcctctagccctctcccctgccctcctctccagggcctcaagcccatggatttcaatggcctcgccgacccctacgtcaagctgcacttgctgcctggagcctgtaaggtaacagcctcctctcgccccgcccggcccagcccatgactccagcctgtggggctggaggacaggtattgagaacctttcatccccacatcccaggccaataagctaaaaacgaagactcagaggaacacactgaatcccgtgtggaatgaggacctgacttacagcgggatcacagatgacgacatcacgcacaaggtgctcaggtgagggcccccctccccaccacccagcagcagctcggggacagctgacattgtaaccgctggttggttgatctatgtcccattaagcccgtacctctctgatgctcaagaaccatcagcggctccctagcccctttggcagcaggccaaaattcttccctgccattcctgcccctcaatatctcctgcctgccaggtgtggtggctcacacctgtaatcccagcactttgggaggccgaggtgggcggatcacttgaggtcaggagttcaagaccagcctggccaacttggtgaaacccccgtctctactaaaaatacaaaaattagccgggcgtggtggcatgtacctgtaaatcccagctactcgagaggctgaggcaggaggatcacttgaacccgggaggcagaggttgcagtgagccgagatcgcaccactgcactccagcctgggtgatggagactccatctcaaaaacaaaacaaaagtatcttctgcccctcaaacagaggactcccttcttccaactggccagttccacaactcctgaacttttcctgttgttttctatctggaaagctccttcctgccagcctaaattccgctcatctgaggttcagtccaagctctgccccctcccaaaaacgttcctgggttgccgagaccccttctcagagcccttggcttaagccagacctctgcagctttggtctgccccttccgtgccttgagttcccctaaaatctcttaaggagtgaagtcttcagggacagggaacttgctccgtcatcctaggagatggagatgtagggagagtactccctcaagtcaggtggcgggcagcgaaacccaggctctggagagacctctgcctttgtgcttggatttgcagctgggaccttccctgatggtcagggctgtgcagcagagaggccaccttggtttcagctattcgggtggaatggaggggaggccagaggccaaaaccagaatgagaccaaaaaatgagcgctcaccagggcccagcccaggcttagcattttcacatttctttctttcccttgactatctccatttacagatgggaattgaggcatagggtgatcaagtgacttgcccaaggtcacacaggtggctcagaagtggcagggctgggatctgcccatcctccatgccacagatgcccagcctggtagtgggtcactgcggaggcagggcagggactgcaggaggacaggtggctggaaagcaatcatttcttagtgagtccctgcggggctggctctctgctgcatgcaggaaaaggacgggggttcccgaggaggcgtggggtactggtctggctgcccaaggctccaaggcccttctagctctcacggcctgtgtctatggccacatccaccgtggtgttcggctcctgcccccaggccctgaatggaggcagtgagcagcgtgctccaagatttctgagggcttcccacaatggctgagcatgtcctgatggaccagggacagccgggtggctgcagagggagggacagaggaatgggcaaatctgcttgtccttctcaagtgccagcctgtcttccagatgagacgtagtgtttagggcagagctgggctggtccaaggcccttcctacaccccggaacggggctcaggtaccccaggggccctgacactgcagttcccgaccaggatcgccgtctgtgatgaggacaagctgagtcacaatgagtttattggggagatccgcgtgcccctccgccgcctcaagccttcgcagaagaagcattttaacatctgcctcgagcgccaggtcccggtctgtgtgggggctgcaggggcgccaggggagggggccctggggaggccaggcttccagaaccttctctttgccccctcagctggcgtccccctcttccatgtcagcggcgctgaggggcatctcctgttatctgaaggaggtgaggcacctcatggggatggggatgcatgtgggtgggaggctgcaggggcccaggctgaccctgagtctgtgccccgcagttggagcaggcggagcaggggcaggggctgctggaggagcgtggccgcatcctgctgagtctcagctacagctcgcggcgccggggactgctggtaggcatcttgcgctgcgcccatctggctgccatggacgtcaacggttactcggacccctacgtcaagacgtgagcccttgctctgaccctctcctccccagggagcctgccctggcctgagttgggcctggcctgtccctcacccctcagttcgtctccctccaccccacccccaggtacctgaggcccgatgtggacaagaaatccaagcataagacgtgtgtgaagaagaagactctcaacccagaatttaacgaggtacccaggaggggacgggacatggagggaggccagggaggggctggggagctggctcacgaacgggtggccggccttgtccctaggagtttttctacgagatagagctctccactctggccaccaagaccctggaagtcaccgtctgggactatgacattggcaaatccaatgacttcattggtgagggaggagctggctgcgggtgttgagggcgggcaagtggcagggaggtggccctgaccctgcccacctgctccccaggtggcgtgtccctggggccaggtgcccgaggcgaggctcggaagcactggagtgactgcctgcagcagccggacgcagccctggagcgctggcacaccctgaccagtgagctgccccctgcggccggggctctgtcctcagcctgagtggacagcagtgtcccggcacaggcccatcgagccgggtccagtacccaaccttcgcacgagtgtgttgcacgtttacacagggtgggctgcccccaccctgcactacctatttttgtgagtctccgtgacccgggtctgtctgctcatgaggggctgcggagttctatattcacatatgcaaacctcctgcctgactcgctagtccctgcaaatatgcaaaccccccatcatctgcacacccgggcagtgctcagagcccggccccaggcccccgcgctcctcactcctgcctctccacgctgccccgtccctctcccccaacagggaggaggtcggattaggggaggttcagaggaggagaatgtctcaaaaaaaaaggacaaaaaacaaacccagagccactcctttaatacagaaacttcattgaaaaaacctagccctgtacagctgcccttttaaagaggtggccattgcagggtctctgcctccccagcaggtggcagatgctcccggccactcgtttaaataactgtcccctggagggggccggggtttgaaggcagggcccctgccaccctcctgggggacacccgtgcatgtttacgccttttctggttgtgtcagtggccggagcatggcagctgggcatcaataaacacctccgagga

SEQ ID NO: 732 - DNA, 32744 bp, Homo sapiens
  source 1..32744: mol_type = other DNA
gtccccgcccctctggcggcgggagagctgctggctcgcccggatcccgggagctgcctggaggcgggcccggcccggggaaggtgagcggctgcgggacccagcccctcgccgggagcgggcaccatggtgctgtcggtgcctgtgatcgcgctgggcgccacgctgggcacagccaccagcatcctcgcgttgtgcggggtcacctgcctgtgtcggcacatgcaccccaagaaggggctgctgccgcgggaccaggaccccgacctggagaaggcgaagcccagcttgctcgggtctgcacaacaggtgagcgggggcggcgcgcaggcccttcccgggcaaggcggggttgccgggcagctgcagagggggaactggggtgggaggcggtcgtggatctttgcgcgacaaagcttggcggggaggggacagcagacgcgttggaggacaggtcaaggagtcaaaaaggtagggggatgggggaggctaggggatgggggagacgagacctgaaggagaattagggagcggcgagcttgtggggactgagagaagaatgggggccagcagcgagacctaaagggaggggacaggaaaggggacctggataagaattagggctgggaagggtaagaggagagggaggctgggaggggaatcgccagggttagggaagaccctgagaggtaccagagaatgaggagtttgcagaattgggaagaagactggggtctgtgagagggagatgggtggtggttgtggagccagggtagggcaagtcctgccagagctgagaagaggtaatgcctgcaaagccagaggggaggtggccgcggtcccgcaggagctgggaagctagctagcggggtctagagagctgaatccgggaggaacctgaaggactcttccccaccccctagcagctctgagctccagccagtcagagggggttggtatggcctcccccaagatgtctctgcagacgtccctggagacaggagggcttttatcccatgcatttgctcatggccagagccccttcgtgcaggaaatagcccgtgctcccattgtaaagagcagcagaaggggtctggggaagcagtttggaaggatttccctgcataggctgtgacctccaggatgcatttccaaagtacagaatgcagaatgttctctggagaaccaggaggcaaagagtcctgctagagtgatttgaggaaggatggccctggggcaggggcatgacttaaaggacctcctaaaggccctctagatcccttatagactgtatggttccaggagtggcactaaaatgctgtgactccatcttcctttttccaatcaataattcaaaagctcagaggacccagttgtgtggggcctgtgtcagtcactgtacagtgagagtggaaaggaaatggctgctgtccttgaggcacttataatccaagaacagtgacattgacagtggctaaataggagccggctgcacagcagaatgtgggacttgggacgatctggaaaaggggaatagtgggctttccactggccaggtgttgggagtccttctccacaagtcgtggtcggccgcctctcaaccttctttcctgcccaacacacttgaggaacagccactcttctgcctttcagtgatgtctctccaggcaccgccccctccccttcctagagagaaccactgggaaactagttggtgtaaatgacctctagggtctcttccaactctttgtcttattgatgaccagtagcccacagaacggctgatcatctgttaaagaaaaaccaggttgtgtctctcccctgcttcaaatcctccacaacttctcactgagcttggaagaggtcatagcaaaccatgacatagcatacactgtgtgccaggcgcactgttcagagtacactaattaatgtgtttcttgacccagtgagggagccatagaatgatcctaacttaaagatgaggaaactgaggcttagagaaggtaactgacttgcctagagctgcacagctagagaagttttagagccagactctagctgagcttgtctgattctggtggccacactattagccactcctctccacccactcacctgctttaacatggaaggtgcctgcctctccagccaagctcatgccagtttctttcttcatcagcagtcttggcttccctggatttacgatcattcttttaaaacaccaagcccttttctgccccttcatttttctctggcctttcatacaaatggctccttctcatccttcaggtctttttccatttaaagtctcagggaggattttgcctactgacacataaaacaaaacaccctcttcctgttattctctcccatattgtttctaacaaatccttttatggcactctttacattaggatgcaatctttcatattcacttactggtgtataatatttattcccagcaccctctcagtgcctggaaagtagtaggtgtccaataagaaattgtagatgaataaagtcatctcaggggtcatccaatggggattatcatcttcaaatactggtgcatgcaccatgtctttgtaaccatgtgcaagctcaataggggcacaataaatatttgttgatacatgatacctgcccatccacattcccttacctggttccctcagtgacaaagatgtgggcaacttggggctgaatctatgggtgtgaatgtgttgaagctgagatctcacaatgacttggttgctgttgttctcagattcattcagccactggcccagatgaagtaaatagagaaaagacaaccaattgacatttcaaagcaagtaaagagggtggcaaccattagcggtgacagatgacaggagggtgatgtacatggcacctattgacaagtaggacaagagccagggaagctctctgaggatgttccttgaggaaagaaggtatggaggctggaaaataggggtctagatgactgtaatcacaacagaggtgtccaaggcctaatagccagtgtctctgtaactcactagttttggctgctgaaaaaattctttgggtttggaggctattcctagaaatctgatttctgaccctgaatggctggatgaagttgaagtttgtagtgattttgaaaagaaatttggagttttcccaggagttttgtttattttttacataaggtctgactccatcacacaggctggagtgcagtggtgtgatcacggctcactgaagtcttgacttcctgggctcaggtgatcctcccacctcagcctcccatgtagctgggaatacaggcacgtgccaccacgcctgactaattttttttatgttttgtagagacaaggctcaccatgttgcctaggctggtctcaaactcctgggttcaagcaatttgcctgcctcagcctctcaaactgttagggttacaggcatgaaccactgtgctttgcccccaggggttcttaatctgggtccacaaacctcccaccaaagggtctgtagatagcattaaaaggtttgtggtcttggataggaaaaaaatgacatcattattttcacttacctctaactgaagcagtattttctgtaattaggaatagcaacaaaaaccatagcgtatcatccatacctgtgactttgtccccaagggaaatcacagatagcttggtagcacattacagctgttgcagatggttcacattagatttacactcatctctcattctaaattatggtacttattaaatctcctgctagactctgttatttaatgaattaataaagaagcaaacatatagctacttcacaatttggttttattagacagtgctttgcagccctttgtcttttattttctgctttttccaacaattcagaggaagtgtccctaggcagccctcggccattcattacctctcatgcttccagctgttttcaagtcacagttctttgcttttctgaaatatacactctggaccctttatcctgccttcttagacagtgcctcactcttaatgtgcagcccttccaggtatgcaaggaattcagttttactacgccgcccactcctggcctggcaggtcacctgggacctctctgtcatcagcctacctctagaagcttgattattaggcagtgacctggcagcttgagcaaggagaaagagccagggaggcaaagcgagaatgatggtttctccttcaccattacttctgaatctattagtgagcggcggccagacccatgggttcctgcctctgaatttcctcatcacccttgtctgcacaggctgccactcagcccacttctgggacctttcatagaaagtcctcctttcgcccaacctaaagaattgggagtaagaaaggagaactgctcttttccccttgccccacggctcagtcctgtacccctaccatttggcaggcacccgcctcctgttttcagaaagccttctttttcatggcctagttttctcccaacacagtgtttaccttgctgtgcacttaagtgagtcttttcaaatgccagagaggtcccctgggtgaccccagtgctgtacctttgaagctaacacatggccaaaggctttattgaaattgcttggccctcagcaggagttcccacaccaattttttttttttttttttgaggcagagtctcactctgtcgcccaggatggagtacagtggcatgatctcggctcactgcaacctccacctcctgggctcaagtgattctcctgcctcagcctcctgagtagctgagattataggtgtgcaccacaacgcctagcaatttttttgtatttttggtagaggtgaggctttgccatgttggctaggctggtctcaaattcctgagctcatgtcatcttcccacctcggcctcccaaagtgctggggttacaggtgtgagccactgcgtctggcccccaggccccttctgtccatatccccagccacccactgtcacatgtgatcaaactctacaatcccatcctctttccagcagagtcgggatcactgaagtggctttcagtggaactctagtagattagttctaaggttttacaaaataatataaataagtgctgaatttctttctttctttttttttttgagacagagtcttgctctgtcatccagaatggagtgcaatggtgcaatctcagctgactgcaacctctgcctcctgggttcaagcaattctcttgcctcagccttccaagtagctgggattacaggcacctaccaccatgcccggctaatcttttgtatttttagtagagatggggtttcaccatgttggccaggctggtctcaaactcctgacctcaggtgatccgcccatctcggtctctcaaaatgctaggattacaggcgtgagccagccctcatggcctgaatttctatcaaacaatatatgtgtagtggagccttctccttaagatcagagaatttttccttcattttccttgtattcttgacaatgtctggtatggtgctgagcacatggcagtgttttgaattaaatcattatcttgtaacctaacactgaataagagagggaagacacaaaggagtgcatactgttagggctccactgacacaggatttgaagccagcacagtttatttatggtgttaccctgggggacaggaaatgactgcagcgggtaggagagcttctgggctttgttcatgctctgcctcttgacgtgggtgctggttacagaggtgtgtttactttgtgaagatgcatccagctctacatttatgatttatgtacttttctgtctgcagttatacgtcagtaaggtttttattaaaaagtgtcatattgtgacatgtttgtgaacattaattgagtaccaggccagtatttttttattgccaggaggactttggggccatattcaagagacatgagcctcctttttgtgttttttttaataaattgcttcttcggccctgtttgctttctgctgtttctcccatggccacctcctgtgtgctgcataaaggattccccctggggattgggacgttaagaccatcagtgtggtcctattaggcctcctacctcttctcctcttccttagtcctctagagcaacgccttctctgattgtttcttttaattcacacatgtaagagtgaggatggacagatgctgcatttcattagttaaatagttcattcatcaaagattaatgagcacatgctaggccttgggatatggcaatggaaagacagacatatgcttttcttgataaatggggagacagacaataaaacaagcaattgccatgatcagggaagcacagggtgccatgggaaacccagggtgggggatattacttccgtcttcagcctaaagtagaattttctccagtgcaggttgttttttctcctgaagtctcccctgtaccttaatgatgataggacgccccatgaattgctaaccccactcctggaactgattcaactctggaaggctgtaaggtctgacctccatggattctcagacttttacaggactcattttctagcttactattagctcatctcttgcctggtgaactcacccattcatataaaccaccaccaccacaatgaagtatttccatacagtaataaataatagtgatagaatagctaacatttatcaagttctttatatgtgccaatcactgttctaagcattttaaccatattaaaatgttttttgagacacagtctcactttgccacccaggctggagtgcagtggcgtggtcatggctcactgctgcctcgatcttctgagctcaagtgatcctcccacctcagcctcccaagtagctgggaatacagtcatgtgccaccgtacctggctaatttcttttaaatttattttttgtagagagggtctcactatgttgcccaggctggtcttgcactcttgggctcaggccatcctcctgacttgtcctcctaaagtgctagaattacaggtgtgatccactgcacatggccataaccatattaattttaattatcacaatagccctatgaaatatgcataattattatttttcattttgcagaagaaaagtaaaacacagaaagcttaagtaacatattcagtgggagagctgggaatcaaatttacaaaatttggcttcagagcccacacttttgacgactaggttgaagattagcagaaaaaagtagtcaaaattttatttgagccattgtgtttccccagatatggcataaaagtgtctataaatacacatctttgtaggtcaacttcagaaacctttcccaatgctttcgattgctttgctgccgccatcacacttcaggcattgggtgcagcccagggccctccacagaaattttacacagtaaacatgtttgggctggttgcttagcaacgtggaagacagtatgaatttttcatcaagaaattagcatagattctttcagggagatgagcacatacccgctggaaatactcttcaaagcactcacatgtggacccctaagcctgtgtccctcagtcttttttccagtgacaggtctgacctgtcccatctcccttcctcccctagttccttctttgggtacagtttgtagataattcagatacatggctcttctcttcatggaattgatgattcactagcaccttttgttaattctagcagaaaacagtgctgcatcctttccagattttcagatactagtcaagttgtgaggaggtacctggggcacaggaggagggatagagaggccattggatcatgacgaaggaaacacctgaaagacaaaccagagggggcccaagcaaaggcagaaggaagagaagagaccagcaggagagggaagcatcagacccagaagacaaagaggagaaaaaataagacacaaccattccaggatcaaagacctacgagagcaatccgaatatgtggagacagtccctttgttgtccacactgacctacaatctcccaataaccagcagcagttcacctcccgcttccaccttcttcttactgtattcagtactcccagggcttatttcttgctaagaaacaaagggaaaatctgctctgaggatggaggagaatagcttcatagaagcaagttttaagaactaagagattctatacgtatgtatcagaatcaacacacgtgcacacaaagggtcccctataactaatttgataagaaataatggaactaatagagttataaaggaaaacaggtgaaaaaggtgggttcctccctctttcttccttggttgtgtttattgaataactgtgtgccaggtactgtgctaggaagtgaggatacagtggtaactaccctcttcccaatgacacagtgacccatcttcagctctcacaaagcttatggtataatggggcaaaccagagtttatagaagaagagggcaaataaatgaaaatgtgtgctggtggtaggtaacctgaacagaaggttctgttgctttgtaagtgtaagatgaagagcttttacaagagtaccttacaagatgaaagctttcctaaagagtgatggccaaactgcgagctagagttggagaagatcttaaccagggcaaaagggaaggatgttgggggctccacacagagaaatgagcctgtgcaaaggtcctgtggcaggaggaagcctaacatttacgagggcctggggaaaagccagtgtggctgaagagtagagagaaagggagatcctggtgaacaatgaggctggggaaataggaaggggcctggatgagcagggcattgtagaccatagacagatttatttattcatgcattcataaatcaaacatttattaatgtctccaggaggggcattgagctacgtactgataaggtgaaggttaccattattttcaaagctttttttattcaggtgaaattcacatgacattaatcactttaaagtgtaggatcaatgccatttagtatattcacattgttgtgcagccactacctccacctagttctaaaacattttcctcacctcagaagaaaacccctcatccattaaacagtcactattccgccctcctccaatctgttttttgtctttatggatttgcctattctggacactgcatataaataaaatcatatgatatgtggtcttttgtgactggcttctttcacttagcatcatgttttcaaggttcatccacatcatagaatgtatcagtactttattttttatggctgaaaaatattctgttgtatgggtacatggcattttgtttatccattcacccattgatggacatttggattggttctaccttttggccattgtgaatagtactgctaagtacattcctgtagaaatatttgagtaactgttttcaattctttcaagtatatacctaggagtgagattgctgggtcatatggtaattctatatttaacattttgaggaatcgctaaactgctttccacaacaactgcaccattttaatctccaccagcaatgtatgacagttcccatttctccacctccttgctagcagttggtattttaatttttatttattttatttattttttttttttaaaaagtcatcctactgggtgcaaagtagtatctctttgcggtattttctgagcttttaatatctaaaaaaaaaccccaaattctcacttttaaaatattcatcagtagctggcaagtttttttaaaaaaatttttattataagttctgggatacatgtgcagaacgtgcaggtttgttacatagatatacatgtgccatgatggtttgctgcactcatcaacctgtcatctaccttgggtatttctcctaatgctatccctcccctagtcccccacccactgacaggtcccggtgtgtaatgttcctctctctgtgtccatgtgttctcattgttcaactctcacttatgagtgagaacatgtggtgtttggttttcagttcctgtgttagtttgctgagaatgatagtttccagcttcatccatatccctgcaaaggacatgaactcatccttttttatggctacatagtattccatggtgtatatgtgccacatattctttattcagtctatcattgctgagcattgggttggttccaagtctttgctactgtgaacagtgctgcaataaacatacatgtacacgtgtctttatagaagaatgatttacaatcctttgggtatatatccaaaaaccacagtagctggcgagttttcaacaaacatttgctgtctgtattgagcaactattaaaatgagtccacatgggcaacccgtaaaaacatttcattgttcatgagtctcgtgagaggaatggagtgtgtgtgcagtagtcctggctgccctgttcttccagcaagtttgcacctgctgctctgtctgtcaaatatgttattattgtcatctttcccattctgttcccccaagctttagcccctcatgggtcccactaaaattccccccaatacccaggccctgcaaaccccatctaattgaggcagtatttagggtctttcaatatttccttaccaggccagtgtgatgcctggaggagccttgcccctctccagggccagttgctgcccacacaatgaaccttcaggaggagttcaataagtcccaattcattagataaagggtgctgtaattgccttatgttatagaaaagtcctgggagatttttacacactgcttaagaatgttacaatgatatttggggaagttgattgtggttttggggtagacttggaatgcattataatttttcccttaaaataatggagtaccagtgcctgctttctgaaatctgctaatcaccatgtttttaggaacagatcagagtcaaataatgagggggagttgcatatatgaatatgaatgaaaacaagcgtaaaggagagaggggtcctgtgagaattctgcgaaattgagtcagtccatctggcatagaccctagaatattttgacatatttcattgattcctctccctatccccacctccactcattaagtccaagacatgctttttctgtcacagaaagttgagcaggacttagcacatggcaaagagaagtgaggagacatgttgaatgactgaatacattgatgaatggatgggtagacaaatgaggaggtagggatctgtggggctgccacctctgcttgtagccaaaatgaaaaccacaggcacagagaagcaggggagggtgctgagtccaccgaaggatctctatgcttgcctttagtgatatatcaagaaatcaagaccagcaggaagcatgtggcaacttcactttttacaggtttctctcctttcaggtctctgttcatctggctaacgttagagagagttttttaaatcttcacctgcaaggccaatgaggtaatacccagggagatgttttatttggaagagcattataaaccacacaggttggactctctggtaagaacagcacgatgtaaaggctgtaggtttattgaggcaggattgcaaagactttgcttttcaaatagaattaagaaggatgttttggaaaagatggtgtttgaagatgcagataaggttgggtaaaagcggtttggtaaggcaactggaagagttgattgaaacagctgcaagtgtagaatatcttctgttagctttaagcttattctgcatttctgaatgccccctgcaccctgcttctcagagcatatcgcggagcatcttaaaatacactttgatttccagcacagtcacttcacatagaggaaaggggaagctatcagagaggaatacagtgaaggcagtgatgtgacatgaggagaaaatattcacatgatttggagggtttctttgcacattctttgcaatgcatcatctaatgatctcgtctcttacttactaacaaatggagcagattctttaagtggcaacatgactatcaccctttgcaaaacagcctccatacaaaacacatagagacaaagaacagaaaggaatgaacgtgaggttaggtgcctagcctaatcccaccacattgtagccttgcatttgatttttgggtacccattggagttaattttaggtaacaatctttgagactactcgaaagaaaaaattaactcagaatgaaaatgttcacttttataatcaagatgctgagctaaaatgggaatcaaatgagactcaaaaacctgaatttgaattcagactccaccatctcctagccaaatcaccacagccattctgaatcccactttgctcattcatgaaacagggattctacaaggttctctaaggttatatggaagaatgaatgagatgacacgtatgaaagcacccaacggattcagcacttgcctttgatcaaaggatatttttaagaatctgttaattattttcttatttatcctttaccaaagcaatgacttgtctattcaccatgcgggaaagaaaaaattcattaacagtattccagacgtgataaatgaaacgtgtctgttagaatgaaaaggggaacatgaacattccacttctaggatgattattcattcaataaatatgtcttgcatacctgctatgtgcaaggcactgagttagtcctcgggacagtgcagtgacaaggcagaacccatccctgacctcatgtcgttaatattctagagggagagatgttcatcacacagttatacacagaatgtagtaagtgctagaagtcatctccttgtgcctccagaaccccctaaatgctcccccgtcaaccccaaacctacttcttccccaccccctgctccaagcctatccccattttctccccctccacaccctggccccagaaggcccccacctatcagctgcattgaccaactcctctgccttttggcatcaggtggagttggcccaaaggagatctgaggacaagaggagtgtgaggggccttcatcacccctgctccctccctgctaggtgcctgggggctggctacatcctcagctgaaaggctcagatcctgtcaggccactgtctcccttcggcaccctgtcctgtttccagtgacctctcctgcttcttgccccttcaggcctagggatggtaagagtgcccagctctcccagtccctacatactcgccattccttgttgctttccttaaccctccatacatttgtaaatacctgctttatgaaactctcctcaattacccagttataatgtgccatctcttcctgcaaaaacccttattgatagcatactcaaaccatgttagctattattaccaaccctaatgattaataataataaaggaagagtctgtgagtcagaggaagtgtgccaatgaaattggcaaaactcaggaccaacagtgataacaccctctatttgcacaaggttctattgttcagaagccactttcgttttcccatttgattcagcatctagcctgatgctttgtgcgtcttgaagcctttaatatctgcttgccaaacagacacacctgcaggtaggaagctctggggctgttattctcatttcaaaaagcctggagtgagctgaggaaaaatagttctcatttatagtaatttggagccaggtactctgatatcactgaccttccatgatcaaatcatattttgggacattttgtagactgtttgattgtcagcccatgtaacacagaaggaaatctattaggtttgcatctcatttaaaagaaggaacagctagatctatggatgatactgactggctttgaatctgccaaaatgtcagctggtggaagaatgttagaagcagcaccttaatggccatcccttgaaatctgcttcctgactagtcatgaaattcacacagaagaatcactttgtcgcccaaacatggcagagactgcagacatccagtgacacacaggggttctgcttttttctttctttctttctttcttgttatactttaatttctgggatacatgcgcaggacatgcaggtttgttacataggtatacacatgccacagtggtttgctgcacccatcaactcatcacctatattagatatttctcctaatgctatccctccccaaccaccccacccctgacagaccctggtgtgtgatgttcccctccctgtgtccatgtgttctcattgttcaacttccacttatgggtgagaacatgcagtgcttggttttctgttcttgtgttagtttgctgagaatgatggttcccagcttcatccacgtccctgcaaaggacatgatctcattccttttttatggctgcatagtattccatgctgtatatgtgccacatattctttattcagtctaccattcatgggcacttgggttgattccaagtctttgctattgtgaacagtgctgcaataaacatacatgtgcaggtgtcttttttggaaagggaagcctgagaagttatagttgaagtgtatttttcttgaggcagctctcactcttggattcctccctttccccagcacatggttcccccaacctgggttaccctcactgtgtctctgtgtctccaggttggttttctcacctagtttcctccacatccgtccatccctcctgtatgaacctgctggtttcatttactgaaaacactgttttgctcatgtcattctcctactcacaaactgtcaacgtttctccattgtttataagatagaattcaagatttttttgcttggcattcaaggccctttatgacctagcctcaccattcctttccaactccatttctccaaccccagccttcctctccagctgactcaccatgtcctaagcatgctcccctctggatgcacactgctgctgtcctcccaatttgagatgcctctctctctctctcattgttaatcatccttgaatgctgcattgaagcccctcgtccaggaagccttctctgatcacatcaacaatgaagagttcctccttaggtcttatgtagcctacagtccaggtatttggctttttaagactgtcttctatttttatctatcttttcataagtttgaatcagaaatagcaaatgtctttcatcttccatatcaattcctattaatggatagtagcttcctggagccctaagctgaacaaacaccctgtgtctgagctcagcaggaaagaatgcttcgatcaattagctgaatctgccttgagcacagggtaggagaattgtagcataagcacctagtatctcccctttatggaatatctcatctctaccatgggatggtaaactctctgagggtggggacttactcctgtgtctcccatggtatgtagggtgggtgaacaggtgattggcaggcaacaagtatgttctgatttctgtttgacagcaatataatgtggagcggtttgacttaaaaccaatatataaggagaatctagttaaaacagcctctgtcttggttttgaaattgcactttatatctcggctgttttttcaacttccaggttagagattgatgtgcttttcaagtgctgcatataagtggatggatgtcttagattagtggttccctgcactttttttctacactgcatcacctctaatgggtgatagtcacatgggtttgatggttttgtagatttacctcctttctcttccatgaagaaaagcttatcaaaatgcaaaagtgtgaaagaggtcttattataaggataaccttgaatatatgttaatcaatttttaaatgggtacaaactcaaatttttgtactttattatttataatatattggcacaataatggttatagcagttggcctagttaatggtttcatcaattgcctgaacaccatagaatcatgtaatcctatagcttctctgaaagaacaccctaatttcaatgccaaggaaactgacataaaaacaaacttttcagcctttaatacaaaagtgactgtcttgggaaaagaacattaaattagaaacacaaattagaaactaagaaaaaaaagtctaaaggattcaaatgaaccaatattaaacaattgtgttcctatctgacagaagttttcaattatgcagagctgagatgcttctatacacagactcagtttaacaggaaaaatgtgagcccctagtaaaccagtacagtgggacaggagagggggcagaagtggaaattttggaaagcaaactcaaattttgggagtcacagagaccatgctctgaggtgaaacacattgctgacagccttgttgtggccactggagatgggaaaataagggtagggtggctggagtgaaaaggctgtgttcaagtccagattactgaccttttaaaatacatcagtttatgagtgttgatgagattacaacatggtcttgacattgcctttgttcagggcacaaatgaaacacatttcccacacaaagaatgttttgacatctaatgatgtgacacctgccagaaaagcaaaaacaatgattcaaacttttccattttcaactgtgtagttgttatccagagacacaaccccaagaaaccacagacagtatagtatacaggttagtagcactagctttggggtggacaaaggttcaaagcccaatgttttcatatattagctatgtgagcttggatatgtttcaatctctctgagcctcagtttcctcctctgtagtaaaaataattaggttattttttatttgttaatattagggtatatagaatagagaaaatattaggcacttatctatagttgcgtgaagattaaatacaataaagtttgtgttgtgcattgcagagcatctgttacatatgaagtttacagaggtggtggccaaagggctttgtgatgtgactgctgaaataatgcaggggccacctacaagaaggaaatctctaggtaggatcttgccatcttggggtttccagtcccacggagttttttgtttgtttgtttgtttgttttgtttttttgtttgtttttttaataattgttttaaaatttagtttccgccagaaatgttgggattgcagcaacattcaccctcctcctctcattgggttttagctgtattgcacctgcggactgactgtactctggacacagtgcaaactttccttctgccatcttggcggaatgcccctctccaatttctctacctgtcagacttcagggtgcccaacccaaagtcagcgtctctatgaaacctcctgcagctctcccttcttcccttccttctcctaccaccctccccttctccaggtaaagcttggtttgcttctacagactctgcctggtgttttactgttctccatcatagttattactctaataatccccctcctccccactccctgcaaccagcacacatacagactgtgcgtcggggtagcaatcagtgttggccatgccttttatcccataaaaggctcttaatgttgaatgatgattgatggagtgaatgagtgaatggctaggctaggagggtagagatgggacatccttcctccagccccactggcttctccttatatctactcaagacctgggaatgacaacagaccattgtgtcttcccaggaagggaaggatggggccaagctggaaagcctgtgggctccacagtcatgtgcctgggttcaattcccagttctgcatcttattaaccatgtgacttcagacttaacccttctgtgcctcagtttcttcctctaagtggggatgacagtaatgcctcctcatgaggctgtgaagtttaaatgaaaccgaatgggtaaaatgctcagacttgtatctgatacatggtaaagctgcatatgatgggttttctttttcttcaaattttagctcagggacttttccctgaccctcaaattcttagtagaaacaactcctgcgccccacccccaccccccaccactcaaccgacctcattaccatctgtcccggtctcgacagcacttattcctaagggaaatagctttttgggtcccctggcttcttgctgtctaccccactggaaatgtccactccataaggacagtgatcagacagtgttgttcgggcagttggccattgttgagaggtttaatcattgttgaatgacaaacagcagataaaacgtttgcgttagggctggctggtattcctgttgtgtctcatcctggccgggttgggaggggcagctgccagcagggcttacccaccaacaaatctccaagtcggtcacatcaagtaccggctggaggcagtgagtgccctgggccaaccacaaatgggcttttttagatttcaaaataatcacaagggaaaaggagaataggaggaggtgagctacgagggaggcggatttgagaaaggattgggggcacagactcggaacaaacaggagaggaggtgttggaagggataacaaaagatggtacaagggtaatgtcgccatggaaacactgcgccgcctggactggaagccaagcctcctcttcaaggtggatttcccctttgcagagtgaactgtgtcacctctctcccactcccagaaataactgtggatttgcctaagggcacatggcttcacaattcttcaagcaggcaagacgtagaggaccctggtgctggcagcttcctaggagatggaggcctagcaggcaaatcagtgttgccggggggagctgagcggactctgagacaggaggccgtgcctgtgagcagcttaacatgagagagggggtgtctacctctaccctacctggatgtttggggctcccccaaatcagggtgttcccaagcaaggcgtccttaggctccacctagaacccaccaagtcaaacctctggggggcctgggaatctgaactgtgcactccccaaatgaagctgatgcacgtcaaagtgtgggaattggcgctgacagtcccgtttccctgactgatgggcatgaaggggcagcatagtgggtggtgggaccaggcagcgtcctgggcatccgccttaggggcacagaaacgtggaggaatggtcaaggctcactagaaatgggaggcggtggctgaagtggcgggaaggcagcagggcctggtggttccgcaggggattctggggcgagtcagcctgggtctgaatgcaccctctaccgccccctagcgggccaagacttttggcacagaactgaactctacggactcagtgtcctcgtctgtaaaatgaagttgacaatatttgtacttcctataaggttattatgaggatttaagaagtttatgtttgaacagtgcagggcacaggtaaacaaggccacaaggtggaagaggctgggaccctaagtttgaaaataaacggcccttttcagactgtgagaaatcaacttttattgtgttcagccttgaggtttagcagttggccttccttgatgaatacaagtctgttaataagtgactggctagccatgaaggttcagttagttgtcagtatctgctaggacacaattggttgggtgtgccttcctctacagaaggaatgggcacagatcaaacctttggactggttaagagctgtgccccacattttctccaggaaaattttctctgcagttggaagtgaaattttgataaacttctaagctatcttcaaaggatagcgaggctgttcccactcagcctctaggagttggtccttctctggaggcaaaatgagcaaaatgaggatctctctcagtttcttacagcttgatgtaatggacttaatgcctgttgtccagacattaggatgtgtgtatgtgtgtgtgtgtgtgtgtgtgtgtgtgtgtatttgagagggagtggaaggattatggtaccagacctagaagtcataaaataaacaaaagaaacttttccttgctggtagtaatttaaaacattttaatactaaaacaatcatatggaatcaaatacaaagactcatatgaatttgtaagatagaattggagatttggagaaagatccccaattgctcctgactgcttcctcttccctagagtacgtgtcagcttctgcctctgaggctatttggaaagaaagtttgagaaatactggtttagagaccagtggatcctaaatgtaggtccacagccaagttctgggctgattgtgtgcaggaatcactcagcaaacttgctgagcatacagattcttcaaccaccccagaaagcccaattcagcatgttactcagaggtgcatgtgtgtacaagtatctatctctctctctatttttattgtgatgtaatttgcatacagtgaaatatacacatcctaagtttacagcttaatgaattttgacaaatatgtatccctcaggctgtaacccatacccctcacatgcctcttcccagtccattctccccaaaagcagtcactgttctgatgtctattaccactgatgagttccacctgtcatagaacttcatctaaatcagggtttcccaacttcagccctaatgacattttgggttgataattctttgttgtgggggaattagggaacgaatgtgtgccctcgaattcatatgttggaattctcaccccaaaggctatgatattaggaagtgggccctttgaggggtgatcaggtcatgagggtaaagccctcatgatgggattagtgcccttgaagaagacatgtgagagagatgctgtctgctctcaaccatgtgaggatgcaacaaaatggctctctgcaaaccgggaagtgggctttccccagataccagattcaccagctcattgatcttggacttccagcctctagaactgtgagaaatgaacatttgttgtcgaagctacccagtttacggtaagttttatagctatccaaactgagataggggttgatgttgtggcatgcttagcagcattcctggcctccaggaacagctcccaacccccatggtgactgtggtcaatagcagctccactgcctccagttgtggcaaccaaaaatgtctccagacactgcaaatgtcgcctgagcggccaaattgtccctggctgagatccagcactgtcagtggaatcatgcagtatgtatgcgtagacagctgtcttcttttcctcagcatgttttggtaattcttctctattgttgagtgtacctgaaactcattccttttgttggtcgaggaatattccattgtaagaatatgccccaatggacttctccattgtcctgttggtggaaggctgggctgctttcagcgtttggctaggatgagtcacgttgctctcagtagccatgtctaagtcttcttgcagattcatgttttcctttctcttggataaatacgtgggagtggataaaaactgttgagtcatagggtagatttatgtttaacttttaagaaacttccagttttccaacgtggcttgccattttcccttccaccggcactagtgaccatcccaaatgtctcacatccttgtccacactagtgttgtcagtctttttgattttagccattttagtgggtgtgtagtggtgtctacattttttttaacatcttcctgggtaattctcacaaacagctgtattagttatctattgctgtgtaacaaactaccccaaaacacaatggcttaaaacaacaatgcttattatctcagtttctgtggggtcagaaatccagtcatggcttacctaggtcctttggctcagaatctctgccaggctgtggtcaaggtgtcctctggggctgtgctcatctcagggtttgactggggcaacctctacctccaagcttgctcttgtggttgttggcaggattcagttcttcctgcggtgccctcgggtctttgcacatggggctctctataggaaagctttcaacattgcagtgtgttttatcagagggagtgggtgagagagagcaaggaaaatggaatgtcatttttttggtaatctaatcttagaagcattgtcttctcacatttgcataatctgttcattcgaagcaagtcactaggtccagcccatactcaaggacaggggattatacaagggcgtggacaccaagggacgggacactgagaggtctcatcatagaggcacctaccatggtggctctgatgtgagaatgcttgatctagaccagagcttccccaaccatctgtgagagaggatccagtttagcttagtttagttttgttgtaatgctcacactcaatgtctatatttatcacaaatgagtaaaaaagtaacaacaacaaaaagtagttcatcaactggtccctacacacaaaccccactttttgtagcacctgactagaccctagggtcacataaatattgccgacatttgtcgagggttggctgggctagcctctgtcctaagagctctgcgtgagttatcttatctaagcctcaatccaaccccaggagatagatgctattgttagcatccccattttacagatgaagaaactgggcacagagaagttaattaatcagacccaaggtcacacagcaagtaattgacagagcccagactccaactaagctgtcttgttttagagcctgaatacctgaccagcaggatatatttcattatatacacgttagtgtgcataatcgccagtattagaggccagagcgacagactcttgcaggtccctttgccctggcctcactacccccttggcgggggcttagctatactatagaccccagcagcagcagtggcccatggttggcatcatctgaatactggatgctcaactggatgcttcttctctgccctccccttttttaaagttcaagtttaaggagcaaagatgacctctttttcagctggatctgcttcccccacctgcaacctcctgggtggtgcagtgctactgtaagagggatgtcccagcatgaaaccccaaattaataaacagccctaaggtgaaaaattaatcatgtcacaaaaggggtcacctagcatctttggtaaggttaaacgtttgtttacagatcattaactacataattaagttttggttttccaacataagccccataagggaaggacagcatctgtcctgtttactcccatattctgaacacttagcataggacctggcctgtagtggggctcagtaaatatttgttcattaatgaaggttcaggttccaccccccgtgccatctgtctctgcctggattattactggaggcagagccggaggcgtctgtgctacccttcatgaggaagcaggagccagggaatggtgggcagggcctgggaggagagaggacaagcacaggggcattactgagtcactgccacttggcatccagggtgactgctggatttccaggggtcatcttccaaaaggcgactgaaggcacttctgggaatagtgaggaggaggaaggagaattcattgcctgtcttcctgctcacagggctcgagttcctcccatggagatgtttggggttttttctctctttttttttattatggtaaaagaacataacataaaatttaccatcttcaccatttttaagtgtacagttcaatttgtgtgtgtgtgtgtgtgtgtgtgtgtgtgtgtgtgtgtgtgtgtgtgataggatctccctctttgcccaggctggagggcaacagtgcaatctcggctcactacagccttcacctcccgggttcaagtgatcctcccacctcggccgcctgagtagctgggactacaggcgtgcactaccatacccaaataatttttgtattttttgtagaaatggggtctcactatgttgtccatgcttgtctctatctcctgggctcaagccatccttctgcttcagcctcccaaagtactgagagtacaggcatgagccaccgcgcccagcctcagttcagtggtattaattcattcaggatgttgtacaaacatcaccaccatccatctccataacactttttgtgctgtaaaactaaaaatctatacccattgaataataacttcccattttcccctgccccagcctctggcatccaccattctactttctgtctctatgattttgaggactctaagtatttcatttgagtggaatcatacaatatgtgtctttttgtgactggttgatttcacttggcatcatgtcctcaaggatcatccatgttgtagcctgtgtcagaacattccttctttctatggcagaataatactccgttatatagatataccacattttgtttatttattcatctgttcatagatatttggattgcttcaccttttagtgattgtgaataatgctgcaatgaacatgggtgtaaatatcttcaaagaccctgctttcgaatattttgagtgtatacccagaagtggaattgctggatcatacagcaattttattctttttttttttttttgagacaaggtcttgctctgtcacctaggctggagtgcagtggcatgatcttggctcactgcaaccttcgcctcccgggttcaagcgattctcctgcctcagcctcccaagtagctgtgatacaggtgtgcaccacaaagcccgggctgatttttgtatttttggtagagatggggttttgccatgttggccaggctggtctggaactcctgacctcaagtaagtcacctgatttggcctcccaaagtgctgggattataggcatgagtcaccgtggctggctatttttctttccttttgttttcttttctttttttttttagacggagtctcgctctacacccaggctggagtgcagtggcgcgatctcagctcactgcaacctccgccttctgggttcacgccattcttctgccttagcctcccaagtagctgggattacaggcgcctgccaccatgtccagctaatttttgtgtgtgtgtgtttttagtagagacggggtttcaccgtgttagccaggatggtctcgatctcctgacctagtgatctacccgcctcagcttcccaaagtgctgggattacaggctatttttcattttttaagaaaatactatactgttttccacagcagtgatacattttacattcccaccagcagtgcacagaattccgatttcttcacatcctcaccaatgtttgttattttctgttttgttgatagtagccatcctaatgggtgtgaggtggtatctcactgtagttttaatggcatttctctggtgattagtgatgatgagcatcttttcatgtgcttattggccatttgcatatcttctttggagaagtgtctatttaaatcctttgctcattttgaatcaggttgtttgggtttttgttgctgagttcccctatggagctttaactctctgcacatctgggttgcttctgagtggacagagtgtccctggtgtctcataactcagcaggcatggagaagtcccagggcagaaggcaagaggggcatggcttgagcccagtgtgaggacctgtgttgctgtgcccatggacagctggttggacacagtggggggagcaagcagccaaaggtcccagggacaggtgaggcggagaatctaaggaggcatttgaggggtctgatgcacatctgagggtgtgattcttctatccagatgtgcatgcaatgccaagaacagctgtgcacccatcctctaattgttgaatgcctgtctccactggaaatcttccctcattcatcctgcagatatacttcccaggctctattcctgggcttcaagggacacgtagacagagaatatctgattctaagtcctgtccctcctgcacccatggtggaaggctggagcaaggtctctctctagggccctgctaccctgagcacctccttcccccagacattcttgttcttcacctagaaccctctcccaggctccctctctcaacccctgaacctattttctgtttctctggcactgaagtttcagctatttaagtgcaaatatagatgcatttgaaagatgtgatggaaccaggtttgaaatgcaataaataagattgcacaagagaaggagataggtaatcagctgctgcttttgctccttgaaaagactcatgtagctgtcatcagactctgctcttggcctgggcaaaggctgtaagtcattcccagctaaagccagccatttgccacacaggataaagtgggataagaataaacagcaaatgaggatgccttgggctggatgcagagattcaagagggtttctttctaccctaggcccagtttctctacaccagggtcatgatctcctgtgatgcttgaaaaaggcaatgcatcagtttgggatgctcttggctgcaaggcacaaaaatcccaattcaaactggcttaaacaataagaacagtactactcacgtaacttgaaatgcagaagcaagacagattgctggattggttggctgagcagcttaatgacattgccatcaaggacacaggttctttctgtctctccactctgctgccccaaggctgactcaccttgcagtcacaaggcagggccacccgcttcctgtccagggaggaggggacttctactactgtggaatccaagtccctcccttccatctgggttggtttccccaggactggtgccaacccctgggaatcagtcaccaagataatgccaagaaatggaaggatctgacctcttcctgggagctggggatgggatggaacctagacaacctggtgttgtgtagggcgggtagatgggagagggaatggatattggtagacaaccaagaaatgcccaatcttttgctctaggggtgcattttaagctctggtaacaagctcctgaggttatcagggacatacaaattgagatccactgaggagggaggaaggcagagccagagtgtcaagacttgaggcaacacagagtgaacttcattcagagctgagcccagtgattatttcccccttgaaaatgcaaattcatccaaattgcatcaaactgggaatgaagcccagcccttttctcagacgattgaattgggatgaaaccaaatataaacacaaaaatgtttcccagaccacccaaacagtcttagttctggtcccaaccaagtgacagtagagggtgactttaagtcaggtgtgtgctgaggcccagcagcctctgggaacgcttttgtgccgatgaatgggagggagtggcagtgggtgggcccctgagatgctgtgattgccatttagaatccagtggcaagaccgacagggattttgcagggggcaagggggtggtgttgagaagcagctgcagggcaatggaaatgacaagaaatttgaagtgaaaacatctggaggctggatgatacataccacttgtcagttgtatgatcgtgagcttccctgagcctcagtttcctcattgtgaaacagtaggatgaaggtaatacagagttatatgagatattgaaggtggaggtgactttgtgtagggtagaaagacggggacattagtcatcgctctgtgtgtctcctccaaggaccctgagcatctgctgtcagaagcacagacttttactcccccaagcccggtcttcgcctctgccttccaaatccccctctctttcaaggtctcagtcatgccctggctcctccctgaaggccagctcggcctcccaggcacccctgattgtgccctgcatgtactgtgcactggccatcatgtgttatttacacatactgcctcccgtctgcttctgtattgtggtccagagtggccaaatatacttatttatttcacctgtttgtgatcatccctaactcacctatacctgaaaataaagcaatggtgtctctcatctctttgcagcctaaaaaagcaactcagaatgtggagtgggatagcctgcaaatcacttgtcacttaaggtgacggcccagagaggtgaaatgacctgcccaaagtgacccagctccagcggcagggttggtactggaagccagcctccttgatgccagtgacactctcagtgggggtggaggtgcaaaggggacctgattttgtaaatcatacatgtccctcccagggtgactggttgctgtgtgtaacaagataatgataaatgtttttgatggggactgctgtgctggggaaagatttggaggcaggaaaaatgtcgaaagccatgggggcagtgggctttgggccaggctgatctaggcttactctgctgctgccctcaccagctgcatgattccaagtgacttcactccaccgaagtcagaaatgcttttagagcctatgcgtgccaggcacattcagtggtgatcaggctagaatcaggtcctcgcttgggttaccttataatctactgtgcagtgtttctgagagaagaactgagggtttcttatctctccgagcctcagtttccttatctgtacaagaggggtaagctctaccttttagggaagttcagaagaaaacacttggaaatgcaggggcaggaagtggttgtccaagaggtccccgagagtccggcccctgcttcctgcccctttgggccctgctgcagcttcttatccacatcccctctgtttgtccaatggatgaaactaattaaggaatgcccctgtcacctaggtccggtctccttcaggaatggttggggacagagtctcaaccagggcagaatgtccaggattcatcctgggataattaaataaagagggtacaaaaattagaaacacaactttttgaaatagtgtaaactgttaactgcctctcctgccagaccacgtccactccctcccctacacagtgcaggatcactgctgccactgggtagggcagcctgagtcctgctgccagccatctgcacccactactcgcttcagccatggagatgggagggccaggagggctagcatggagggcaggaggtttcttgggagactcagtcatagacctcagtcttcagatccgcctgtcttaacctgagggcttttttatgggctgcccacccagagtgccagcagtttaagctctagacctggccttcaatcctgaggaccaggaaggctcctattgctacctgtcatacaactttgagtctctcaaataggagggaaagacagaagatccctgtcaatgtctctgtagatgctgtgtgaggagccccatatacttaagggttgacaagcaggtgggtctttttgaaaagaaagattccctttcgttccaagcgaaaagggcctagcctagagcacacaattgggcaagtggtacacaggctacattttggcttctactctgtcctcatccagagatttttgtgcagtgcacaaaccattcaatatggcagccctagtcacaggtattgattgcatgctccctgtgagctgacaccatgctaggcacaagggacacagcaacttgatgcccagtgacactcttactgggggtggaggtgcaaagggaaattgattttgcaagtcatacatgtctctcctagggtgactagttgctgtgtgtaataagatgataaatatttccgatggggactgctctgctggggaaagatttgaaggcaggacaaacatcgagagccataggggcagtgggctttggaccaggctaatctaggcaggagcaagacaagacataattcctgtgctcatagatctcacatgctagtgggagagtcttaatacaaacaggccagcctatgaccaaaacaatatagggtgagattgatgctgtgaagcaaagagtgggatgtggtgatagggagggacaggcttgggggagggatttaatttagattgtaaggttagagatggactccttggttcagacttcaggtgtgagatggagccagccatgcaaaaacaggtggaggtaggggtggacagtttgggaggaaaagttaggggctggaagctggaccaaggaaagagcccaagctgtttgagaagcagggagctcagtgactggagatgagcaaaggaaggattgggggcgatatcagagagatgagcaggatcaagctaggcaagctgcaaggagtctggattttgtgtggtgggagccactggcatttctgagccattaggtggagaagaggagggaggaagggagaagggagaaggaagaggcaaggggagcagatgagagcagcagagtggggaccacctgcagcaggtccaggcaatatccatgggcgcagccataggatggatgggccgatggatggaggaggtatggatgaacaaggcccacatctcagtggattgtggatttgagtgggtttggagatgatgttagaccttcctaggttgtgctcttcagagcagaatgaaaccacaactctccctctgcatcctacaacaggtcagttcaccgtttctcccttccatggggggaaacagacaagagggctcctttgtggactaatcagagtaatttgtgtttgcagttcaatgttaaaaagtccacggaacctgttcagccccgtgccctcctcaagttcccagacatctatggacccaggccagctgtgacggctccagaggtcatcaactatgcagactattcactgaggtctacggaggagcccactgcacctgccagcccccaacccccgaatgacagtcgcctcaagaggcaggtcacagaggagctgttcatcctccctcagaatggtaggggtctcctgccccctgcacttccatgggcagcactccagtggggcttgtcaatgtctctgtagatgctgtgtgtggcctgatgaggaggccgagtgccccggcatttgacgctggccaagcagatgggcactgggcctcagaattatggtcctttcttcctgacaacatgttgccataccacttctcccccagaccgccaactttccactggaaaatggagtccctttctagtcatatgtgtgcaactatgagagaggataaagagccatggttaaaaccatgggcttcagagtcaagggtttaatttgctgccctttcatacacttattgtgtggcatgggtcatgctgtaactccatgaacctcggtttcttcatctataaaatgagactagactattatctgtctggtaggggagttgtaaagtgtagataaaataacacacatagaatgcttaattcagagcctggcacaaaggaggtaacaaaaaacatattgggttttttgttgtttttttgagataaggtcccaggcacattttttttgagatggggtcttgctctgtctcccaggctggagttcagtggcatgatcgtgggccactgcagcctcaatctcccaggctccagtgatcctctcacctcggcctcctgagtacctaggactacaggtgcatgccaccatgcccagataatttttgcttattttttgtagacatgagatctcactatgtggcccaggctggtctcaaattcctgggctcaagtggtcttcttgccttggcctctcgaagtgctggggttacaggcatgagccaccatgccccgtcgaaacatattgttattatttctactctccttttcatcagcatccacatcaagagtgcagcacctttaggtgtactatgctgctgctgggcactggggaagatatgggaagaagagacatgatcgtccctgacccaaagaatatgtaggcgttttagaaagacaaaacataaagcagggagagtagattgttgtgtagtctctgttttgttttgtgtggttgatgagggagccagtggacacagatgcagcctaatgggctgtgacattgaccccacctgttgtcttggtgtggccactgtgattctgcacacagctgggaagacttgggtttgggttcctggcataggtgatagagatgagaaaggtgtaatcaggaaagcagaaccccagtgtgggtggcagtgacgatttcgactttcttaacaggtgtggtggaggatgtctgtgtcatggagacctggaacccagagaaggctgccagttggaaccaggcccccaaactccactactgcctggactatgactgtcagaaggcagaattgtttgtgactcgcctggaaggtatggctcttatttgactctcgtgggcttctgtgtgtctatctcccctggagaagctgtgcaggcaggatgggatcatctgcagctggagagagcactggattaggactctaacaaccagaccctggaacacatggagcttagacacaaagatttcccacactcccaaccccaacagtccaaagtggggattcctggttgacaaacgttttttctccaaatggtgattcaaggaccagactccttccagctgtggctccataacccccctctccttgtcatttgtatccttgccatctgtatctggcagatggaaggagaaagagaaggagagggcgtaatcattccttaacagcctttacctggacttggtggacgtcacttccgcttgcatcccattggccgtagctcagtcacatgagcacactcaactgcaaagtgggctgggaaatgtgggccgacaggtgccccggaaggaaaggcaatgagtttggggtgaagaactagtcgtctctgccatagatgaatttgaaattggacagggctttgtgctggacacacagcatgttccgaatggtcagaaaagtttctacaatctaagagccaagcggcctgagggtggcaggatgtccttggtttctctgccctgacaattcactttaaggtcagcaactaaagct
